United States Patent Application Publication US 2020/0377945 A1 - sequence listing, part 60

SEQ ID NO: 13574 - DNA, 123397 bp, Unknown
  gut microbiota DNA sequence
cctgaaccatctttctctgaaaaagagggacccacaagctgggcggcggagaggacacacgtcctctccgccgcaatttacctgttttcaatattttcttccgcagctgcggaccttttggccgaatggccgttgtcccatcaaaaggctccggcctttccacccggctcagagagtctcgtcccccagggactggataaggaggttgcgcagagaaatggcactctgccggttcataacgatggaggccacgtgatccgcattgggcgtagagacgttctccagcccgttggaggtgacggtgagggcattctccatatacttataggagatatccagggtgacctccaggatctggccctgggggtcagcgaccttgcgcaggccgaaggtgttggcgtattccggtttcatgggatcttctccttccgattcactgaaatgtggtggtataggtcaggacatggacgccccccggctccagccggcggatgcccgccttgtcctccaggccccggcccacaaagaccgcgtcggggagggcagaccagggctcaatacagaagtagccggtatcaaagggcttgtccgccgtccacagtcccagatagggaaaatcggggcactccaccaccacccgctcccggccggagcggtccaccagggcagcccggcgctccccctccaggtccaggacaatggtgtccagcccgaaggccctggggcacagggggatgcgccctccctccaggggaaagcgggcctctccgatggtcagcatacacctgctgtccatgccgtagggacggagctcctccaccccggagatggtaacggcgtagtccgccatagtctctccgggctccaggggggtccggaagccgtcgtgtccgcccagctcatagagcatgggaacggcggagcggttctccacccggtgcgccttggtcaggcggctgccctccaatgtgtaggtgacggtgaggacaaaggaaaacgggtacacccgccgggtctcctcgctgtcctccagctggaaggagagggtggtggggccctgctctgacacctggaactgagcgtcccgggcaaacccatgggtggagatggaccaggcccggccgtccagggtgtactggctgtcctggagccggccgatcagggggaatagcagcggggcatgcctgccccagacggcggggtcggcctgccacaggtactcagtgcccccagcgctccggacggagcagagctgggcaccggcgtcctggatggagacggtgagcaggtcgttggagagcgtataggtcatagctggggccctcccttcacatgccggccgttgaggacagcctcttccagtatgtccccccggtaacgcagcttcagagagaagaaggggacatcctcctcaatgagcctcagaaagatctcgtccccctcccagtgggggatggtgcacagctgtgtccagggcagccactccaggtcgccctccgggcagtcggccctcagggttccggtaaagcggtcgatggtgaacagatgcatgtactccgtgggccagcggtcggagacaaaagtgaccagcccccgatagcggtattccgctggggtgagtccggtctcctcgttcacttcccggaacatgcagtcctcggggctctccccgtcctcgaacttgccgccgatgccgatccacttgccctgattcagatcattctccttcttgacccggtggagcatcagacactgaccgccctgacggatgtagcagagggtggtgttgatcatggcaggataccgcctttccataatagtgctgccctcagtatagcacggcgggaagaagggcgcaagggaggcgcctatcccggcagggacatgcagaggagagggaagggattgccctgctcgtctgtctccgtgcggctgcggacctgaaaacccatgtggagatagaaatcgagggcttgagggttctgctcattgacgcacaaagaggtgacaccgtaccgccggatgccccgctggagcagctgccggcccagaccggtcccccgcacgtctggggagaggaagagcatctccagcctggtgccgtcgatgcccataaatcccacggggatgccctgatcggagaaggctaccaccagcaccgggacctgggccagagcctgggggacgtagacagccagggaacggatgtcctcttcggacaggaagtggtgggtggcccggacggaggactcccacacctggcacaggcaggtgagcaactcctgagagcgggcattgatttccaaaagtttcaaggcaaaaggctcctttcgggaaaaacggtccgggccccttcggggcccggaccgagcttaaatgggtgcagatcagaatatagcgggatgccggtcatacattgaaccggaacaggatgatatcgccatcctggacgatgtattccttgccctcggagcggatcaggcccttctcccgggcggcggccatggagccgcaggccatcaggtcgtcgtaggagaccacctcagcccggataaagccccgttcgaagtcggagtggatcttgccggcggcctgaggggccttggtccccctacggatggtccaggcccggcactcgtcctcgccgctggtgaggtaggagatcaggcccagcagggtgtagctggccttcaccaggcggtccaggccggactcggccacccccagatcgtccaggaacatcttcttctcctccgcatccagctcggcgatctccgcctccagcttggcgcagaccgggatgacctgggcgccctgggcggcggcccgctcctccaccagccggtagtaggggacggcctccgggtcggagaagccatcctcatccagattggcggcgtagatcaccggcttgagggagagcagctcgctggtggcgatgagggcggcatcatcctccggcacctggggcagatagccccgggcagacttgccctggtcgagccactcccgcaggccctggaacacctccgcctcatggagaaacttcttgtcccccttggcggccttctgtgccttgtcaatgcgcctgtccaccatctccatatcggacatgaccagctccaggtcaatggtgtccatgtcccggatggggtcggtggagccctccacgtggatgacgttctcgtcgtcgaagcagcggaccacatggacgatggcatcggtcatacggatgttggacaggaacttgttgcccagtccctcgcccttggaggcgccctttaccagaccggcgatgtccacaaactcaatgactgcgggggtggtctttttggggtggtacatctcggaaagcttgtccagccggtggtcagggacagccaccatgcccacattggggtcgatggtgcagaaggggtaattggcactctcggcgccggcgttggtgatcgcgttgaacagggtgctcttgcccacgttgggcagacccacgatacctaatttcacggcagaagccctcttttctcttaaaattcagtgcctgttattatatcggatttttctctgtcttgcaagggcttccggcccaactcccgccgtctttcccctcggcgggctggggcccccattatgcggggcagtctgtcttgtccccgtcggcaaagcaggcggcccgccgccggggagatgtgtccggcggggccacagaggcccctgtctctggacgcgcaaagcgcccggggctggacaagccggcctcccgagcgctttttctgtgcattccgtccccttacagcagggccacggcctcgatctccaccaatacatccttgggcagacgggccacctccaccgcggagcgggcaggataggcgggtccctcaaagaactgggcgtacacctcgttcatggcggcgaaatcgttcatgtccttgagaaacacagtggtcttcaccacggcggaccggtccagcccggcctgggccaggatggcggcgatgttatccagagactgttgggcctgggccttgatgcccgccgggatatccccggcagcggggtccaccggaatctgcccagaggtgaacaggaaccctccggcccggacggcctgggaatagggcccgatggcggcgggggcccggtcagtatgaatggctttcttcatggaatcaagctcctctcgatcgatccgatttgcgccggggcggcggtgcccggcggctgccgtcattgtagcacgtttcccccacgggcgcaacctcacagtttgtccagcacccagaaggtgaaagtcagggtcatcagaatcacgctcatgctggcaaagctgtccatcagcagggcaaaggcgttctggtggggatggcggcggcgtgtgcgctctgtccgggctgcgggagcggcggaaaccggctcctcctggacgtcctgcatccggctgcggtattcgcacagatctatcacattgccggagcggcggacgaaattatgggtggtatagtacagggtctgcatcatgttccctccgttcctgaatcttatctgcagtatgacagtgtgccggtcccaaaaaccggactttttctctgccccgcaagaaaacatatgttctacttttaaaatacaacatatgttctattttgtcaagaggaatggaacatattttcgatttactgggacaaaaatgccagtacccgcgctgggaggtctgcggcctcctcgtagagtccatgtcccagctcgggatagatccacagccggctttggctcaagtgctctgccagcaccccggccgcctctgcccccaccacttgatcccggccgccgcccaccaccagtgcaggacagccgatccgtcccagcgcgccgcgggcgtcatgcccgaggcaggctctggcctgaatgaggaagcgctggtagctcctgggccgcccgatggtgcccagcaggggcagcagcagccggtatcgccgcaaataccgctgggagtaggagcgctccgctgtgtcccgcgtcagccttcggtgatccccgtgttccgccagcagcagccagcgccccacggtctcctgcaccgtctcgttggcccagccggctgtcgccaccaggacgaggcgcctcaccaactccggtgcctccgccgccaggtgctgcgccaccattccgccctgggagatgccgagcacatccgcaccccagagtcccagctttttcatggcctccgcctggtcctccgccatcccgcggatggtggccccgggctccagcccccgcctcctgctgaacagatagaccttccgctccctgccgtactcccggcaggctgccgccaggggcagggccgtctcccggacggtcctcaggccgtcccccagtccagggaggatgaccaggacccgtccccccgctccaaatcggatgtgatccatctcccagccctccccccgcacggttccgcgctccacgccaagcaccgctacccctccttcattttttccatgataccactttccctgccgcctcacaagcggggaaaaggcccgtcggcccttgacgccgtgttttttttatagtagaatgatgctgtatctaaaaacagccgcatggctttgaaagggaagagtaacccccgccggggtgcagcgagaggacggacagtgcgagtcctccgatggcgcgggtgaaggccccctggagccgcgggcaggaaatggcccgccggtcccccgccgttatcgggtcagagtgcgtgccagccaggcacgaattcaggtggaaccacggacaagtttttgttcgccctgagccgacaccggctcagggcgtttttttgccccgccggaatgaccgtgtacaactaaaatcacgacaaaaaggagcttgacacatgaaaaacagtgaaaagaccatggaaaagatcgtcgctctgtgcaagggacggggatttatcttctccggctctgagatctatggcggcctggccaacacctgggactacggtcctctgggtgtggaactgaaaaacaatgtgaagaaggcatggtggaagaagtttgtccaggagaacccctataacgtgggtctggacgccgccatcctgatgaatccccaggtgtgggtggcctccggccatgtgggcggcttctctgaccccctgatggactgtaaggagtgcaaggagcgcttccgcgccgacaaggtcatcgaggactggtgtcaggagaacagcttcgagctgggccacagcgtggacgccatgagccaggcggagatgaaggcctttgtggaggagcacaacatctgctgccccacctgcggcaagttcaactggacggacatccgccagttcaacctgatgttcaagaccttccagggggtcaccgaggacgccaagaacaccgtctacctccgccccgagaccgcccagggcatttttgtcaacttccagaacgtccagcgcaccacccgccggaagctgcccttcggcgtgtgtcagatcggcaagtccttccgcaacgagatcaccccgggcaacttcaccttccgcacccgtgagtttgagcagatggaactggagttcttctgcaagccggggaccgagctggagtggttcgcctactggaagcagttctgccacgactggctgctgggcctgggcatccgggacgagaacctgcgtctgcgggaccacgaccccgaggagctgagccactactccaacgccaccaccgactttgagttcgtcttccccttcggctggggcgagctgtggggcgtggcctcccgcaccaacttcgacctgaccgcccaccagaacacctccggcaaggatcagacctactttgaccaggagagcggcgagcactacatcccctatgtagtcgagccctccctgggcgccgaccgggtcaccctggccttcctggtggacgcctatgacgaggaggtggtggatgccgagaagaacgatgtccgcaccgtcctgcgcctccaccccgccctggcccccttcaagtgtgctgtgcttcctctgtccaagaagctgggcgacaagggccgggagatccaggccgagttgtctaagtacttcatggtggactatgacgacgccggctccatcggcaagcgctaccgccgtgaggatgagatcggcactccctactgcatcaccgtggacttccagaccgtgggcgacgacaagacccccgcggacaacgcagtcaccatccgggaccgtgacacgatggagcaggtgcgtgttcccatcagtgagctgaagagctggctggaggagaagctgacctactgatctttcctatcaaaagaggccccctggagctccagggggcctctttttcatccctccgtcagggaggccgtaaaccgaatgaccagatctcccgcgccggggtcctcctgatccagcttggtcatcccatcgctgtacgaggtgcggctatatccccgggcggtgagcacctccagttccagggtgacgccccccatcccctggactttcccctgagtccccgccccttggaggcgggtgtcctcaaggatgctcaacaccatgtgcagcgatgcccgccgggcctgggtaaagcgctcttggcagaggaagctcccctccccagcctctggggccagggcgaagaggaggggggacaaaatgttcatggccggctccagcacttccagttccgtttgataggggttgcccgccgcgtcccatgtcacgctccatccggtcacgcggccatcctggtccactgtccaggtgaccgggctccactccccagcccccttctccagttcgatccactgactccagctgacataggcggagggctggaccgcccagctcccgtctctgttcagagaggtcctgggtgtagtccccagaagctctgtccggcgtctctcataccagttgtagttctccactgcctgctctgcggtcagcggctccgtgggataagggggaagatagctccggtcggtcaccagaaattctgcggccgtgaccagaaggtagagcgccgccaggactgccccccgcccccacttcatgggccgggcggtatagctcagcccctggtcccaagacattacctggtccttggcacacttctcatagcagtcccaaaggcgggcaatgttgtagatagggatgcccagccccgtcccgcggaagaaaacgcccaccagccggtcgcccgcctcctcccatgtcagcttccggccgtcctcccgccgtacccgcagccccatgatccacttgcccggggtgtaaccccaggcggccagcaggatcggctccaggaggaacaggaacagccagccgccgtacatatcagccaggcttctcagcgccccatccaggacctggtcgggggcataccattccagcaccagatagcgcacggccatccacagacaggtgcacagccctacatccagcccccgggcaaagtatcttctccaggggtagggggcggcggcaatggagtcccgagacaggtccacctgccgggagggcggcaggggccagctctccagctccttgagccagggctccgggtccagcgtcccgaagtccacctctgtccggctcatctccaggcacacctgggcgtagcgctccagatccccccggtctgcctccagcacggcggcctgctcccgcagggcctgagacagggtcagctctcccgccttcagccggctgatggtccccacctccaggctcagcttccgcagcagcttgatcttctccagagtcgccgcatcctcctccgagtagtcacgatagttgttctcccggcgctccggagcgatcaggccctcctgttcatagaagcgaatagtggtccggggcaggccggtctgccgctccagctccttaatggtcatggtcctccctcctttgtccccagtataaagtatgcaccaggttgacagtcaagaggaaatttcctttctcctccttttttgcccttccagcaccgcccccctctccctgccctaaaagaaaagagccccgcctgctcggaaagcaggcggggactcactttgggaaatcttgctgttacaccagctggatgatggccatctcagcggcgtcgccgcggcggggaccgatgcggacaacgcgggtgtagccgccgttgcggccggcatacttggggcccagctcctggaacagcttcttggccacatcctctttggtgatgaagcccagagcctggcggtaagcagccaggtcgttctgcttggccagggtgatcatcttctcggccagaggagctacctccttggcgcgggtgatggtggtcttgatctggccgttctccagcagataggtcaccatagcgcggagcatggcccggcgctggtcactggtgcggcccagtttacggtgtttcagagacatatcagacactcctatatttcgcgcggcgaaatttctgaattcgttcaggggccggacggccccggaggacacccttgcggggacagggaggaccctgccaggcgaagcggaacgttacatacctccgccctgtcccgggaggcgggacgcctctcagccgttgctgtcgtcgctggccagggacaggcccatcatggccagcttgttgatgacctcttccagggacttgcggcccaggttgcgcaccttcatcatctcttcctcggtcttggagatcaggtcctccaccgtgttgatattggcgcgcttgaggcagttgaaggaacggacggacaggtccagctcctcgatggtcagctccagcactttgtcccgctgggtctccgccttctccaccacggtggagcggttgcccatggtctcactgaggtcggtgaacagggcgaaatgatcgcacaggatgcgggcacccagggaaacggcgtcccgggcatcgatggtgccgttggtccagacctccagggtcagcttgtcatagtcggtggcgtcgcccacacgggtgttctccacggtgtagttgaccttgcgcaccggggtataaatggagtctaccgggatcacaccgatgacagtctggggcgtcttgttcttgtcggcggggacatagccgcggccgtgggacagggtcagctccatgttcaggctggcgtcggggcccagagtggcgatgtgcaggtccgggttgaggatctccacctcgccgtcggacttgatatcgccggccgtgacctcacactcgccgtttgcctcaatgtagaccgtcttgacgccttcgctgtacagcttggcaatgatgctcttcacgttgaggacgatctcggtcacatcctccttcacacctggaatggtggtgaactcatgctggacgccggcgatcttgatggaagtcaccgccgtgcctggcagagaggagagaaggatgcggcgcagagagttgcccagcgtggtgccatagcctcgctccagcggctccactacatatttgccataggaattatcgccggggttctcaatacattcgatgcggggcttttcgatttctaccatatgctatataccctccttttcgcgacagcttgcaagcactgtctcattcagctcaccaattctgagggttttctaagcgaattacttagagtacagctcgacgatgaggtgctcttccacggggaagtcgatgtcgtcccgtgcgggcatagcaacgactttgccctggagggtatttttcgcgtggtccagccacttgggcacattgacctggatggcgtcctcgcccagcaggcgcttgaacttgacagaggaacggctcttctcccggacctcgatgacgtcgcccaccttcaccaggaaggaggggatgtccacccgctggccgttcacggtgaagtggccatgggtcaccagctgacgggcctcacggcgggtcatggcgaagcccaggcggtacaccacgttgtccaggcggcgctcgatcagggtcagcaggttctcaccggtcttgccgggcatccgggaagccttctcatagtacatgtggaactgcttctccatgatgccgtagacaaacttgaccttctgcttctcggtcagctgaagggcatactcggactgcttcttccgcatctgacccttggggttgcggttggtgttcttcttggcatagcccatggcagcgggggacaggttcagggccttgcaccgcttggcaataggctgcatatttctagccatgtgtcaaaaacctccttcttccagatcagacgcggcggcgcttcggggggcggcagccgttgtgggggaccggggtcacgtccttgatcagggtgacctccaggcccacggcctgcagcgcacggatggcggcctcacggccggcgccggggcccttgacaaagacctccacgctcttcaggccaaactccatcgcggccttggcagccgtctcggcggcggtctgagcggcgaagggggtggacttccgggaaccgcggaatccaaggccgccggaggaggcccaggacagggcgttgccctgcatatcggtcacggtgaccatagtgttgttgaaggaggagcggatatgcacctggcccttctcaacattcttgcgctcgcggcgcttgcggataactttcttacccttagtagcagtagccatgcttatccctccttacttcttcttattggcgacggtacgcttgggacccttacgggtacgggcgttggtcttggatctctggccgcggacaggcaggcccttgcggtggcggatgccacgatagcagccgatctcagtcagccgcttgatgtccatcgccacattgcggcgcaggtcgccctccaccacgtagctgtggccgatgacctcacgcagcttggcctcgtcctcctcggtcaagtccttcacgcgggtatcagggttgatcccggcctcggccaggatcttgttggcgctggtgcgcccaatgccgtagatataagtgaggccgatctcgattctcttctctctcggcaggtcaataccggcaatacgagccatttattacagcacctccaatttaaccttgtctctgcttatgcttggggttttcgcaaattaccatgactttgcccttgcgcttaatgactttgcacttctcgcacatgggcttcacggacggtcttactttcattgtgataacctcctgatgaatgcctgaatggccccgtcgttgtcacaagcttcgcatcgctcacatccagccagggctgaatgttcgttcgcttcactgcccctcctctccaaagcggacccgcttcgctgggcttcgctttgaggcggcctgcggccgctgagggaacggattccccggaggcaaggctccagaggaaccagcctgtgacagcgcggtcgttaatagttacttagaacgccaggtgatacggccccgggtgaggtcgtagggtgacatctgcacggtcaccttgtccccgggcaggatacggatgaagttcatgcgaagtttcccagagatgtgggccagaatgatgtggccattgccaatatccacatggaaggtggtattgggaagggattcggtgacgattccctccagctcaatcatatcatctttcgccaagcgtgattccctccttgaaggcggccagcgcccttctcagttctcggtctgataccggttccccttgtctcagcttgtggatggccgggtggtcatactcctgccggacctcggtcagctgccgtacatggcccagcttctttgcctttggccgggagacctttcttcgtttcccgtctgccagcagcagtcgctcctgccgctggtccatagcaacgacgcagaacacgccgcccttatcccgtccggcggtcgcctggacgatttggcctgtgtaatcaaacataggctccatcctcggtgactgtgaggacctcggcgtcaccttcggtgatgaggatcgtattttcatagtgggcggccagagagccgtccagcgttttgacggtccagccgtcgggcagcacccggatctgccagtcgcccacattgaccatgggctccaccgccagagtcatgccgggcagcagacgggggccgtggcctgcggggccgaaattacgtacctccggggcctcgtggagctttgcgcccacaccgtgacccacatagtcccggaccacagagaagccgttggcctccacataggcctggaccgcatggccgatatcggacacccggcagcccttccgagccattttgatgccctcccaaaagctctgctgggtcacttcgatcagcttttttgcctgatcgctgatctgaccgcaggcataggtggcggcacagtcgccgtggaagccgccgatgaaagcacctacgtctacgctgacgatgtcgccctccttcagcttccggggaccggggatgccgtggatcacctcgtcgttcaccgagatgcaggccgaaccgggaaaaccgccgtagcccaaaaaagagggcttggccccgtggctctcgataaagcggcggaccgctgtatcgatctcatgggtagtgacgccgggtgccaccatggaaccagccagggcccgggcctgggcggtgatccgcccggcccggcgcatggcctcgatctccctgggagatttaatggaaatcagttctacgcctttcacgccttcagcgcctccatgatgacctcagtggtcccctctatagtgggctgattcgggatggggttcaggatccctttggactcatagtaccccttcagcggctcggtctcgctgtggtagacctccaggcggtgacgcaccgtctccggcctgtcatcatcgcgctgcatcagtacgccgccgcagctgtcgcatatcccctcctgtttggggggcttggcgtgaatgtggtagggtgcgccgcaggtggagcagactctgcgtccctccatgcgctcctcaatctccgcatcggagatctcgatggagagcacgtgatcaaaggtgacgccggcctgatccagggcctcggcctggccgatggtgcggggcaccccgtccaggatgaagccgcttgcgcagtcgggctgagccaggcgctcggccacgatgccgatgatgacctcgtcggggaccagcttgcccgcgtccatataggacttggcctggagcccgatgggcgtgccgtccttgatggcggcgcggaggatattgccggtggatatggtcggaatgcccagcttggcactgaggatctcagcctgtgtgcccttgcccgcaccgggggcgcccagcatgatcagcttcatacccatgatcaaagccccttactccaggaagcccttgtagtggcgcatcagcatctgggcctccagctgcttgacggtctccagggccacgcctaccacgatgatgacggaagtaccgccgatggccagggagctgtaacccaccaggttcccggtgatgatgggcgcgatggcgatcacagacaggtacagcgcaccgaacatggtgattttgttgagcaccttggtaatgaagtcagcggtaggcttgccgggacggaagccggggatgaagccgccgttcttcttcaggttattggccacctcaatggggttgaactgcatggtggcatagaaatagctgaagccgatgatcagcaggaaatacaggatgctgtagaacggcttgctggtgtcgaacagcttcaggaagccgccccagaagcccggagaatccatggtgtggccggtaaaggccccgatggtggcgggcagagaggcaatggactgggcaaagatgatgggcatgacgccgctcatgttcaccttcatagggatgtgagtggactggccgccgtacatcttccgtcccacaacccgcttggcgtactgcacaggcaggcggcgctcagcgttggagatgaacacgatgaagatcaccagggccagcatgcccactacgatcagggccaccacccaggggggcagcaggctcttctggtaggcagtgatagcggtctcgctcatccccatctgggtcagctcttccgcgctcaggccggcggcccatctggtcacgccggtgtagatgtcgcccaccatctggggaccgcgggagacgatgcccgcgaacaggatgatggagatgccgttgccgataccgaactcagtgatctgctcacccagccacatcaggaaggcagaaccagcggtgaaggacaggacgatgacgatgcccgcccagatgccgttgacgctgccgctctccaccaggccgtagctcttgatcagggtgtaatagccgaagccctgcagaagtccgatggccacagtggtgtaccgggtgatggaggcgatcttcttgcggccctcctcgccgccctccttggccagccgctccagagcgggaatggccacggtcagcagctggatgataatggacgcattgatatagggctggatgctcagggcgaagacggtggccatagagaaggcggagccgctcatggcgttcatcaagcccaggatggtgccgctctgagccgccagataagtctccagggtggtggagtcaatatagggcaccggcacggcggaacccaggcggaagatcagcagcgcaaagatggtgaacatgatcttcttgcgcaactcagggaccttccacgcgttgcgtactgtttcgatcacttagatcacctcatactttccgccagccgcgacgatcttctccttcgcggaagcggagaaggcggaagcctggacatgcagcttcttggtcagattgccgttgcccaggatcttgacgccgtactggcacttggagaggatacccttctccagcagagcctgggcgttgaccacagccccgtcctcgaacttctccagagcggagacgttgatggactccaggggcttggcgaaaatgttgtggaaaccgcgcttgggcaggcggcgggccagaggcatctggccgccctcgaacccgacgcggacgccgccgccggaacgggccttctggcccttgtgtccacggccgccggtcttgccgttgccggaaccggcgccgcggcccttgcggtagggctgcttgttcgcgccggctgcgggagagagttcatgcagattcatttctcgagcgcctccttcgtcagttttcctcggtgacctgaagcaggtagccgatgtgggcgatcttgccccgggtagccgcgttgtcgggctgcacggtggtgtcgccgatcttacggaggcccagggcctcggcagtcgcctgatgcttggcgatgcggccgttcaggctcttgaccagcttaatgttcagattagccattggaacgtcctccttaacccacgatctcttccacgctcttaccgcggatgcgggccacttcctcggggctcctcagggacttgaggccctcaaaggtcgcggagaccacgttctgcgggttgttggagcgcaggcacttggtgcggatgtccttgattcccacggcctccatgaccgcacggacgggaccgccggcgatgacgccggtaccgggggcggcgggcttcatcagcacgcggccggcgccgaactcgccgatcacctcgtgggggatgctggtgcccgccagggacacagtgatcatgttcttcttggcatcctcgatgcccttgcggatggcctcgggcacttcggcggccttgccggtgccgaagcctacacggcccttctcgtcacccaccaccatcagggcggcaaacttcatcacgcggccgcccttgacggtcttggatacgcggttcagggaaacgagcttctccacgaactcgctgggttctctctcaaatctagccattgtcgtttcctcctcccttagaactgcaggccgccctcacgggcgccttcggccagagccttgacacggccatggtacacatagccgccgcggtcgaacaccacgttctcaatgcccttcgccttggcacgttcggccacgttgacgcccacctgcttggcggcgtcggtcttggtgccctcacaggagaaatccttctccagggaagaagcggagaccagggtcttgccgttcacatcgtcgatgatctgggcgtagatgttggtctcactgcggaagacgttcaggcggggacgctcgggcgtgccggaaatcttcgcacgcacacgcttgtggcgcttgatgcgctgggaacgagtatcaggtctgttgatcatagtggcacacctccttacttcttggcgccggtcttaccagccttgcggcggatgacctcgtcggtgtatttgatgcccttgcccttataaggctcggggggacgtttctctctcacttcggcggcaaactggcccacctgctgcttgtcgcagccgctgatgatgatcttgttgggggtgggggcctcgatcttgatgccctcgacttcctccacgatcacctgatgggagaagcccaggttcatgaccagcttgctgccctccatggccacgcggtagcccacgccgttcacgtccagctccttcttgaagccctcggtcacacccaccaccatgttgtggagcagagtgcgggtcaggccgtggagcgcgcggttctccttggcgtcgttgggacgggtcaccttcagctcggcgccctcctgggcgatggtcatgttggggtggaactgacgggtcagggtgcccttggggcccttgacggtcaccacgttgttctcttcgattttgatctccacgccggcagggatggcgataggagctcttccgattctcgacattcctataccctccttaccaaatgaatgccaggacttcgccgccgacatgggcctcgcgggccttcttgtcggtcatgacgcccttggacgtggacacgatggcagtacccaggccgcgcaggacgcggggcagctcatcggcaccggcatagacgcgcagaccgggcttggacacccggcgcaggccgctgaggaccttctccttgccggcattgtacttcagggtgatgcggatcacgccctgcgtgccgtcgtcgatcagctggaagttcttgatatagccctcttccagcaggatctgcgcgatggcctttttcatgttggacgcggggacatccacggtgtcatgcttggcgttgttcgcgttgcggatccgggtcagcatatccgcaatgggatcggtgatgtgcatgagtcttacctcctattcagattaccggcaagccggtacagacggcaaggtatcgggaattaggctcgtccccgacctgttgaccgcctctgcgccctttgggcgcatctatcaaaaccgcccgcaggcggagttgaccaccactggcggccgcctcgggcggccgcgcgctcacagcagcgcaaagccccgtagccgcggactgcgtccagcggattacgggtttcgcacacctgaaagcgtgggaaattcttttctgcgcccttgagacgcaatcggtttattatacccctgtttttcccggttggcaagggcttttaatcacgcactcgtgagtgcgtggaaagattctttgggaaggggccaggatttggccccttccctgaagatcttatagggaacaagctgccaggcagtcagagcgccccttaccaggaggccttcttcacgccagggatctggcccttgtaagccagctcgcggaagcagatacggcagatgccgtagtcacgcaggtaggcgtgggggcggccgcacagcttgcagcggttgtactgccgggtggagaacttgggctctctctgctgcttcaggatcatggatttcttagccataacttctcctcctccttagcgggtggcaaagggggcgccgacgagcttgagcagctcccgggcctcttcgtccgtctgagcggtggtgcacaccacgatgtccatgccgcggatcttgtcgatcttgtcgtactcgatctcggggaagatcagctgctccttgacacccagggcgtagttgccgcggccgtcgaaggaatcggcggagatgccgcggaagtcacggacgcggggcagggccacgttgaacaggcggtccaggaactcccacatcttgttgccccgcagggtgaccttggcgccgatgggcatgccctcacgcagcttgaagttggccacggacttcttggccttggtgaccacggccttctggccggtgatggcggtcaggtcggacaccacggcatccagcaccttggcgttctcccgggcttcgctgcagcccacgttgaggacgatcttctccaggcgggggatctgcatggtggacttatagccgaacttctgcatcagagcaggagcgacttcgtcctgatacagcttcttcaggttgggcgtgttagccatttcgattcactcctcctctctcaaatctcggcgccgcacttcttgcagacgcagaccttcttgccgtccgccagcagcttgtgggcggggcgggtgggcttattgcacttggggcagacgcgctgcaccttgcaggcatagatgggggcttccttcttcaggatgccgccctggtcgccctgcttgcggggcttggtgtggcgggagaccacgttgaccttctcgacgatgaccttgccggccttgggctggacctccagcaccttgccctgcttgcccttgtccttgccggacaggaccacgaccacgtcgtccttcttgatgctcattttattcatcgttcaaaccctcccttacagcacttcgggagccagggacaggatcttcatgtaatccttgtcacgcagctcgcgggccactgggccaaagatacgggtgccgcgggggttcttgtcctccttgatgaggacggcggcgttgtcgtcgaaccggacataagagccgtccgcgcggcgcacgcccttggcggagcggacgatgacggccttgaccacctcgcccttcttgacctgaccgccgggagcggccttgcgcacggaagccacgaccacatcaccgatgttgccgaacttgcgcttggaaccgcccagaacgcggatggtcttgatctccttggcgccggtattgtcggcgaccttcagatagctttcttcctggatcatgccggcacctccttatttcgccttctcgatgatctcaaccacgcgccagcgcttatccttggacagggggcgggtctccatgacgcggacgcggtcacccacgccgcactggttgttctcatcgtgagccttcagcttataggttctctttacgatcttcttgtacagaggatgggccacgcggtcggcgatggcgaccaccacggtcttgtccatcttgtccgaaaccaccaggccgactctggtcttgcgggaagaagttctgttttccatgtcttagttcctcctcttagcggccggcgagctgctgctcgcggatgatggtcttgacccgggcgatatccttcttgacctgagcgatccggattgggttatccagctggttggtggcgtgctggaggcgcaggttgaacaggtccttcttcaggtccaccagcttgctctccagctcggcggcggacatcttacgaacttcattggccttcattacgcttcaccacccttctcggtctcttcacgcttgacgatcttgcacttgacgggcagcttgtggctggccagacgcagagcctcgcgggcgacctcctcggagacgccggcgatctcgaacatgacgcggccgggcttgaccacggccacccagtactcaggggagcccttaccggagcccatgcgggtctcggcaggcttctcagtgaccggcttgtcggggaagatcttgatccagaccttaccgccgcgcttggtgtagcgggtcatggcgatacgggcggcctcgatctggttgctggtgatccagctgggctcgatggcctgcaggccccactcgccgtaagtgacggtgttgccgcggctggccttgcccttcatgcggccgcggtgaacacggcggtactttacgcgcttaggcagcagcattactgagcgcctccttccttcggagcattggcctgaccggcgggacgggggccacgattgttattgaaaccaccctgaccggcgggacgggggccgcggttgaagccgccgccctggcggtcccggttgaagccgccctgacggcggtcaccgtcgcggcggtcccggcggggacgctcccggcgctcctgatagggcttgctggtatccagggtgcggggggtggtacgcagggtctgagtcaggacctcgcccttgtagatccacaccttcacgccgatgcggccgtaggtggtggcggcctccgcgaagccgtagtcgatgtcggcgcggagggtctgcagggggatggtgccgtcgtgatagtgctcggtgcgggcgatctcagcgccgcccaggcggccggagcagcaggtcttgatgccgcgggcgccggcgcgcatagcgcggcccatggcgttcttcatggcgcggcggaagccgatgcgcttctccagctgctgagcgatgttttccgccaccagctgggcgtccatgtcggcgttgcgcacctcgatgatcttcaggtcaacgggcttgcccaccatggcggtcaggccggcctggatcttgttgatctcctcgccgcccttgccgatgaccacgccgggccgggcgcagtgcagatacacgcggaccttggcgttgtcgcgctcgatctcgatcttggggataccggcggagtacagggtcttcttcaggtagtcccggatcttcttgtcctccaccagcaggtcgcccaccttttcgttgcgggcataccagcgggagtcccaatccttgatgacacccacgcgcaggccgtggggattaactttctgtcccatagttctcctcctcccttagcgctcgctcaccgcgatggtgacgtgagaagtgcgcttgttgatccggtacgcacggccctgggcgcggggcatgatgcgcttgatgatggggccgggattggcgtagcaggcggacacatacagcttctcagggtccatctggtggttgttctccgcattggcggcggcgctcttcagcagcttgagcacgggctcagaggcagccttgggcgtattcagcaggatggcggtggcggtggccacgtccttgccccggatgaggtccaggacgatcttcaccttacggggagagatccgcagatatttcaggttggcttttgcttccatcttttctctcctccttacttaccggtcttgctgcccgcgtggcccttaaaggtgcgggtgggcacgaactcgcccagcttgtggcccaccatgtcctcggtcacatagacggggacatgcttgcggccgtcgtggacagcaaaggtgtggcccacgaaagcggggaagatagtggaggcgcggctccaggtcttcaggaccttcttctcgccggtctgattcatctcatcgacccgcttcagcagctcaggggcgcaaaaggggcctttcttgatacttctgctcatcttttactgcctccttacttcgcgttgcggtgcttgacgatgaacttctcagtacggttcttcgtcttgcgggtcttgtagcccagggcgggcttgccccagggggtgacagggccgggacggcccaccgggctcttgccctcgccgccgccgtgggggtggtcgcaggggttcatgacggagccgcggacagtgggccgccagcccatgtggcgcttgcggccggccttgccgatctggatgttggcccagtcggtgttgcccacctggccgatggtggccttgcagttctcccggatatagcgcacctcaccggaggggaggcggacctgggccatgccattctccttggccatcagctgggcggccacgccggcggcgcggaccagctgggcacccttgccggggtagagctcgatgttgtggatcatctcacccacggggatgttggcgatgggcaggcagttgcccggcaggatgtcggcgtcggggccggtcatgatgatgtggccggccttcaggccgttgggggccaggatatagcggcgctcgccgtcctcatactcgatcagggcgatgttggcggagcggttggggtcatactgcaggttcaccacagtggccttcccttccttatcgcgcttgaagtcgatgatgcggtacttctgcttgttgccgccgccgcggtggcggaccgtgatgcggccatagctgttgcggccggcgtgcttgctgaggacctcagtcaggctgcgctcgggcttggccttcttatcgatgccctcgaaggcggacacagtcatgtgacggcgggagggcgttgtgggcttataagtcttaatagccattgttcaatttcctccttacaccatgccctcgaagaactcgatggccttggaatcggcggtcagggtgaccatggccttcttccagctggggcggcggccggcgggccgggcacccatgcgcttcagctttccctgcatgttcagggtgttgaccttggcgaccttgacgccgaagatctgttccaccgccttggcgatctcgatcttgttggcggacttggccacctcgaaggtgtagcgcttcatctcggtatccgccatggactgctcggtgatgatggggcgcttgatgatatcataagcggtcattacgcaaacacctcctcgatgatggccagcgcggccttatcgatgaccagctggttggcgttgacgatgtcatagacgctcaggaccttggcggtggtggtgaccacgccggggatgttccgggcggacttgaccacgatctcatccacctcaggggtgatgaccacggacttgccggcgccgataccggcgaggaagccgcgcatggtcttggtcttgatctcgtccagcttcaggccgtccaccaccttgatgtcgccggaggcggccttggcggacagggcggacttcagagccaggcgcttcaccttcttgttcagcgcatagctgtaagagcggggcttgggggcgaacacgatgccgccgtgggtccactggggagcccgggtggaaccctgacgagcgtggccggtgcccttctggcgccagggcttcttgccgccgccggagacctcagcgcgggtcagagcggactgagtgccctgacggcagttggccaggtggttcttgaccacctcatggaccacagcctggttgggctcgatgccgaagaccgcctcggagagctcgatctcaccgacctgctggccggccatgttgtacacgtttgctttcgccatgatttacactctcctttccttacttgttgcgggcggaggccttctgcgggttgacacgtgcggaagccttctgcgggttgttgctgatgccggcggcggggcccttcttctccacgtgagtcttgacagtgctcttcacgaacacgatgccgcccttggggccgggaatggcgccgcggaccgcgatcaggttgtactcggggtccaccttgaccacgtccaggttctggacggtgacctgctcgtcgcccatctggccagcgccgatcttgcccttgaagattttggacgggctgctgttggcgcccatggagccggcgtggcggaccacagggccggagccgtgggtctccttcaggcggtgggcgccgtggcgcttgatgacgccctggtagccgtggcccttgctgatgccggtcacgtccacaaagtcgccggcggcgaaggtgtcagcggtgactttgtcgcccacgttgtacttctcgctgtccttcagggcaaactccttcagcaccttctggaactcggtgatgccagccttcttctggtggccggcctcgggcttggtgagcttgcgctcggggatggtctggaatcccagctgaacggcctcatagccgtccttctcggcagtcttcttctgcaccacggtgcaagggccggcctcgatcacggtcacagggaccgcgtgtccggcttcatcgaagatctgggtcatgccgatctttttgccgatgatcgctttctccatattggatttcctcctatataaaggttattggtcggcgtagttggtcaccccattgggctgggggccattgctccgacgacttgacccgtccgcctccatgacgcggcggactgcgggttcaacagggttaggggagatctcagcgcttacagcttgatctcgatctccacgccggcgggaagctccaggctcatcagggcctccacagtcttgggggagggcttgatgacgtcgatcaggcgcttgtgagtgcggcgctcgaactgctcacggctgtccttgtacttgtggacggcccgcaggatggtgacgacttccttcttggtgggcagggggatggggccggagacagtggcgccggtgcgcttggcggtctccacgatcttctcagcgctctggtcgatgagctgatgatcataggccttgagacggatgcggatcatttctttctgagctgccatgggtgttcctccttaacatacatacgaagttgactctgtcgcgcttcgtacggtgagagatctccgtccacgctatcgtgcgtatcactccgggtcatgaagaaaaccggcgcatagacaggccggttttatccctgccaggcgatatacgccgtgacacggatcctctcagccgcccgattctcggacatactccgcggaagttacctcgtttccgagcaatctcccgcatcatcgcagactgcgccctcacaggcgctttgctatcatacaacaacacccccgtgtgtgtcaagggtgttttgaaaatttttcggcggtgttccgccaatttccccggctttttcctccggcctctttgggcatcctgccagggcggcccgccgctcccgccggcgggcccccgaaacacggtccccggggccccgcctgcgctcaggactcccgcaccgtgccgctctgccccaggagcagcgccccgtcctcccggtacaggcggagggtgtacgccgccccctcgtaccagtccccggagtacgctccctccggtgattccagcggaaacagccacacgccgtcctccagacagaagccctcctgggcgcggcggaggaagcgctcaccccccggaagcgcggtgtccacatccagctccgcccgggccgtctcccctgggatctggagaaacaggaggttgcagccgctcatccgcgtccttccgggctccgggacccaggcaatcacaccgttgatcgggaccggagccggcccctcccccaggggaaagacccccaggacctgccgcccgggccggtccaaggtgacagaatagacccgattctgggcaacacccaccacaaacggatcgaacacactcagataggtcccatcccggctctccacactccctatatctccggtattccaaaagccgctctgatatacgatctcgctccggggcagcagatactgcccctccagctgccggaacgccatctccgctgtgggcatgggacagccgtactgcccccacaccagggcggccagcgccaggaccagcagcaggttccgggcagcccttcccttgtgccccagccgggggcggcgctcccacagcgccctccacgctcccttcacgccctctcctcctccaagtccacagtaaaagtgaatatcgggctccctgggccgtagtccagccggacccactccgcctccgggtcccagtcctccagatacagttcatagccgctgtggaagggcccgaagcccatttggctcatcccgttcagcagtccgcccgtttccgggtcctccggggaatccggccccaggccgcagactgcgccggtgctgtcggtcacagtcatccattcctcccgcagccggccccgctcccagaagcgccaggtgtccacccggagatagcagtacagcccctgccgcccgtcctcccgctgccacagggcggcccggagcagtgagatcttctgtccattcactgatgctgtcaggcagggctccagggtgaggatctggtccgggtccccaccgggcagatagcggatatcgtcgcagtcccccataaccgccgtccctggcaggccgtccatgtcccaccactcggagcggtggtcgtcccccagataggcgtcatccccccggaacataccgatggccagcagccacaggaggcccgccgtgagcagcacccggctggcctgccacaagtacctcggccagggccggtggagccgggccagctcctttccgatctcctccgcgtcccccatctgctccaccgcctgccgctccgcctcctgccgccccaggtccgggaagatgcggaccaggtccgccgtcttgtcctccaggtgggcctccagctcagcccgcaccgcctcccggtcaggccgggagcggatacctgccgccgcccggtccagccagcgccttccctctgatgtctgtaccatctcgttcctccccgctcactgtctccgcgccagttcctcttcacccagcgccgtgctgacctggatctcctccacctccagcaggtccagcccggggccgtacacccgcagggtgcaggggacgctccaatagccgcttcccagctcctgctgggcccggcctgcctccggcatgtcctccggccactggaaaaagaatagccacgcccccgactcctgaagctccccgcgggcaaagacggtcccctcccaactgtcccgggacaggtccagcaccccatggatcataccggcctcctccggcagtccaaagaccaggaacccctggccgctggtaatgctaccgccttcatatcggcgtatctcacccagggggagtatcgtcaccccttcctccatgggatagcggcagacgttccaatcccccaaagcgtccccaaagttcctcgccaccagggcccagccgtcccggagccccaccatggtcggtctcggcccgtcgctctggaagacgacctcactgggtacaaggaggttgacccgctccatccgccggaaattccgctccaaatcccccacggggaaaaaaagttgcgcccaggccagggacaggatcaccagcgttgcccccacgtttcggacgatccgccaccctcggctcagccgcggaaggcggagcctctttcttctttctgtcagctccatgatctcccacctcacttcaagggcaccgtgaccgaccacgccactccgccccggtcataggacagccggacccactccaccccctccgggacgttggggacgctgaagatcaggttcttgtggaactggctccactccgcgccgcccgtcacccccaggctgttctcccgctccgccgccatggacgggtagtggttgcccaggctgtcctcccccgtgacgtaggccatggggtccagatagagcttttcccaggggagctggtccacccccagggcgcagaacagccaccgctccctatccagggaccagagagcggcggcctccacccagaaccggtaccagcccacccggagcttctccgtctccggctccagcagggtcagaagctcccgctccgccgcctccggcacctccccagtcagggccccctccggcccataggggtcctcccccatcaggtagcagtcctgggcgctgaggtacacctgctcctggaaccagtactggttcccccgtagcaggtcaggaaccgcctcccgcagggaccagagcactgcccaggccagcgcgatctggctcagccgccacagccagcccagccatggccggtggagccgggccagcgccctcccgatttccttcgggtcccccatctgctccaccgcccgcttttccgcctcctcccgctccatatccgggaagatgcgggccaggtccgccgccttgtcctccaggtgagccagcagctcccgctccacctcccgctggtccggccggaagatgatcccctccgccgcccgctccgcccagcgctccagctcgttcttctgctttttccgcctctgcatctcttcaccacctccggcctctcatccccttcacgccagagcgttggctccgccggagagcacgtcggccacgccacggtggaagctggcccactccgccttcttctccgccagcagctcccgccccttccgggtgagccggtagtacttccgcatccggccggagggggcctgctgctgatagccgctcagatacttccccttctccagcccgtggaggatggggtacagggtcccctcctgaaactgaaaggcgtcgttggagcggcgggagagctcctcgatcatctgatagccatacatgtccccgctctccagcagagtcagcaccagcagcgtagagctgcccgcgatcagccctttatcgaatttcatgttcgccgtcctttctccggcccctgccggacgatatacctagtacctctaggctcaatataccaagatattctaggtatgtcaagagggacggggcagaaaaaaggcggcaggccatgcctgccgcctttttattgttcttccagccaccgcttcagatcccaaaggtccggggcgatgtggacatggggccactcccggaaggcagaggccggcgtggtgccattgagcaccgcggcgaactctgtccctgcattttgggccgcccccgcatccagcaccgtgtctccacagaacaaagtctcctccggccccgcccccagtcgggacatggcagccagcagcccctccgggtccggcttatgccgcttcacccggtcgctgccgatgatcaggtccagctcccccagcaccccccggttctccaggatggcctccagggtatcactgcgcttggtgctcacgatccccagcccgatcccccgggccttcagctcccggagcagctccggggcacctggaaacagagtggtctcccggcgctggcgctccatggacgcctccaggaacaggggacggaaggccgcccggtgctccgggtcccgatcccctgtaagcagggtgtaggcatcctccagcagatagcccaccgtccttctcactgtctcccggtcgggggccggccaccccaggcgggtgaatccatactggaatcccgccacgatggagtcggtggagtcccccagggtatagtcaaaatcgaaacagatggcccgatatttcatgcacatgctcccctcagccgttttttctatcttaccacagccctccaggggccgcaatcctcagtcatacaggttgcgcagaaatgcttccgccccatagcgcaggcagcgctggagcctccgctccccccgcttgatgttccgggacaccgtggacttgtccacccccagccgctccccgatctcccgcatgttcagcccctgggcataatacagggtgagcacctcccgctgcctgggcgtgacgtcctccttcagggcccggatcaggttgcgcttgagccggctgagctcggcgctgttgtccgcagccatctgccgggtgtacaccgccatatccgcggcgtacagcttgccccgcctatatcgtgtatttgacatttctccggtaccccctgtcgtagtagcgctcacagagcactgccagttcccgggcctcccgcagcatggtggacagcaccctgatccgctcggccagcatgcatcgctccccctcgtccatggtgtgctcccaggcatcccgcagctggacgatgcggaagtccagcgcccgggcatggtcccggtactccaccgaaagctccaacaaggtcatctcacgcactcctcctcttccctctttgcggcgcaggcggcgcacagcagtcctccgtccgcccagaccagctggtcacagcggtactgctccccgccgcacctcgggcataccagcacaggccgcgcctgctggatgtcccgcagcggcgggtacggcccccggctccgccggactatttggatcttctcctctgtttggtaaattttttctctctcctctcaaaataatacttgacaaaagccgagacgtctgttatagtatcccttgctgttggacagccgtcttgacaagtgctggtgtagctcagccggtagagcagctgatttgtaatcagcaggtcgggggttcgaatccgtccaccagctccacaatttcatatggaggagttcccgagtggccaaagggggcagactgtaaatctgttgcgtttcgcttcggtggttcgaatccaccctcctccaccacgtggccgcaaagttcgctttgcggccatgtttttttatcctcaggacaaaaaacatgccgtccgccgcctctctgtgattttatttgaccctcacctcccatcgattctgctctttttttgaccctaaaagtgcttattttcaagccttttagggttttctgtttcctccagcccgaagcggccggaaatggatgtcaaatgatatgagcaagccgtcccccacactcctttcggtccagcggccccctttacgggcggaacggcggccctgccggtccgggaccgcaaggccgcctgtcttcggatgcttttttactcccttttatatagaacatatgttctaatttcagtcatagaatactcccttttccttcccctgtcaaccctgttggacatctcttcctgtcggagttttctccctggtcccgaaataagggaccgcgccggcagaaggggggcgctcccgcctctcggcaggcgcaaaaagcccgggcacatccaaaacaggagtgcccgggcttctttttatctcattcagacgggggaggtctttagaaatacttcttgattccctcgggggccagggaggcgtcgtcactgatggtgatggtgaacttgatgccatgtttctcgccaaaggcgttcagccaatccaggaacttctcggtctcgttgtcgcaggggccgggaacgatcttgcacaggctgtcgatgaagatatgggtgatgtcataattgccagcgtacagaccgctgacaaagcccttcagggtggcatagctgtcgatatcgtagctgctggcctccaccagacggatctgatagtggatgtcataagtcagcttggagccccgctcgatgcagacgacattgccgtgctcggtctggacggcgttgttgatcatgtcgatcatctgcttggtcttgccggagcccttcttacccatgattactctaatcatgttactcactccttacgatgttaaacgtgggaagctggtcccttccttgctatcactttaccatatcgaaccgtttttttcaaccggattctttgtgaattttttgggatctgtccagggagggctcaaagccgggactccagcttctgcttcatctcctcatagcctggcttgcccagcagagcgaacatgttcttcttatatgcctccacgccgggctggtcaaagggattgacccccagcaggtagccggacaggccgcacacatactcgaagaaatagatcaggtaacccaccgagctctcgctgatctggggcatccggatcaggatgttgggcacgccgccgtccacatgggccaggatggtcccccgcagggcctgctccgccacaaaggacaggtgcttgccggacaggaagttcagcccgtccacattctccgggtcgtccgggataaggaaggtgcccttgggctcgaagcggaccacagtctcgaacatcaggcgctggccctgctggatgtactggcccatggagtgcaggtcagcggtgaactccacgctggccggaaacaggcccttgccctccttgccctcgctctcgccgtagagctgcttccaccactccgcgaagaagcggaagctgggctcatagcaggccagcagctccaccgacttgccgctctcatacagggcgtgccgggcggcggcatactgccaggcagggttgtccattcctgggatggacagctccttcatggcccgggccgcgccctccatcagggcggcgatatcgatccccgccgcggcgatgggcagcagccctactgcggtgagcacggagtagcggccgcccacggcgtcaggcaccacgaaggtctcgtacccctcctggtccgccaggcccttcagtgcccctctggcccggtcggtggtggcgtagatccgctctctggctccctccttgccgtacttctgctccagcatccccttgaagatccggaaagccaccgcaggctcggtagtggtccctgatttagagatcacgttcaccgagaagtcccggtctccgatgagggcgatcagctccagcagcgcgtcggtggacaatccgttgcccgcaaagtagatgtcgggggtgtccttcaccttcaggttatagttgggggaggacagcagctcgatgaccgcccgggcacccaggtaggagccgccgatgcccaccaccaccaggacctgggactgctttttgatgcgctccgccgccgcctggatgcgggcgaactcctcccggtcgtactgctccggcagggccacccagccggtgaaatcccccccggggccgttgccggcggccagcatgtcggccgctttcttcaggccggtctgacgggagaccgcgtagccctggggcagaaatccggccagctgagacagatcaagctttaacatagaaatcctcctcacaggtatcaagatctatgctttcagtgtaacacatctttttgcttttttcacgaaaaatttggaaattttcgcatttccctttttcatatttttctccggaaatcgagaaaaaacacttgacattccacccagcggcatatataatagtccatgctgttcggacgattagctcagctggtagagcatccgcttgacgtgcgggaggtcacaggttcaagtcctgtatcgtccaccatttaaaacttgatattgtgtcgtgggggtatagctcagctgggagagcgcttgaatggcattcaagaggtcagcggttcgatcccgcttatctccaccaaaacagagaccgacttgttttcacaagtcggtctctgtttgttaccggacctcatacacacaagctccatctatgtttttcccgctgaacgacatgctctggcagcgccctccagccacatcctcatagagaaacaccccctcatgggcctggggatatctggagaagctgtccagcatgatctcccgaaggctgtatttcccgggcgccaggccagccaggatgcttggcatggtttgatcccactcttttcggttcatggctatatgacctccttcatttaaactgccttgttccaattttattataccaaaacgccgtaactttgtaaataactgttttaagctaacagttgattttctcgactggctgtgctatcatatggtcaaagcatttaagacccaaaattttttgaacgagggggcagctggataatgaacggcgagacactttccacccgctttgcgtaccattatgacctgactttgagcctggctctcccgggtccggaattttccgctgaggaccggcgcactctggagaacgggatcaattcctataatgaaagatccatctacatgaacaaccccaaacatatcagtctgctggaaatgggaaaaaaccacatcaagatcaggctctcctccacccagatgctgaccaccccgggccgcggcctgcgggcgctgactgccatcctggtcaaaaccccctccttcgaaggccgcgtcacaccaggaggccagctcttccgcgtactccacgcggagcgccccgatgaccgaggcggtgccccggaggcagcggcgatatcagacgcggagctggtgaaggcactggtggactatctgctggaacggaaagacgggtcggccgccagcagaaagaaaaaggccgcggtggaggcgatgaagcggcttgccatagacgccgccatgatctgcccgccgccgaaacagagtgaacagtaaggcctttggtgcaaggaggtacactggtttgaaaagacaggaagctatccgggtcctgactggccgcctcagatcttcccgtgttaggcacagcgcaggctttgacagcggtcagatgcagatcaccatgggattcaacgcggtgtatgccccggatcaccgcatcgagtcctgtatctggttctacgaggacacaatggaggcaaggtgctactactcctccctgggtgcagaactatgccggaaaagcagacatatcgacgctcttctccgccttctgaattttatcaatgcccgggtctttccatcctgccgcggcagcggatatatgctgtacagcccgcacatcctctacacaccgcggatctatctgacagctgacggccgctttgacattacgatcaccaccatcatcccctatgacttcttcggccttgctccgctggagacattggactatatcacgatatgctgcccggaactgctggatcggctggctctcccgatctactgcgtgctgctgggcaaagagaccgcggatggtgccatctcacacatcgaaagggagttcctgaaaacgtaatgtcctgcagaagagtgtcagaacagcatgctgcggctcatatttgtgaccgacgccaccgcagcgggaaggctctggtccatccggcagaatcaccccgaaagcggatctgacgtgctcaatgtgtatcactgtcagcagcgcgtctatgaggagatatatgtcaaggagcaggtctccctggagggggacgagtgcagctttccatctgcgccaaccgccgttccagctggagccgggcgctgcgcccctatggatccgctttgccggtcaaggggctgaatcataaaaaggagtctctgtcatgaaatcttttacctataccatcgtcgatcctgtaggcatccacgcccgtcccgccggcctgctggtcaagacagccaaggccttctccggtaccgagatctccgtcaccaagggtgacaagaccgtcaagagcacccagctgatgaagctgatgggcctgggggtcaagggaggcgacaccgtcaccgtcaccgccgaggggccggacgaggacagcgccatctccgccatggaacagctttttaaggagaatctataagcgagccccgtgcccacggtccgtttgacatggggctttttgaaaagaggaaacgacatgaagattttgcaggggcaaggggtttccaaaggtgtagagcacggccccatctatttttgccgccgcagccagacgctcattcagcccgacaaagccgacgacccccggttccagggggagcggctggaccgtgccatggagcagacggcccagcagctgggacagatggccgaactggcccgggcgcaggcgggggacagtgccgctcagctgtttgagacccacgccatgtttttagaggacgaggactataccggcgccatggaggagctgctggccgaggggtactgcgccgagtacgccgtggaccaggccggggagcagttttccgccatgctggcggccatggacgacccctatatgcaggcccgcgcctgcgacgtcaaggacgtcaccgggcgcattttgaacaacctgacgggcgtggtggaggggggcatcgactcccaggtgccggtgatcctggccgccgccgacctggccccctccgagaccatccagctggacaagagcaagatcctggccatcgccacccagggcggctccgggaacagccacaccgccatcctggcccgcactatgggcatccccgcggtctgcggcctgggggccagctttaatgagagctaccacggcaaacaggcctacatcgtgggggagaccggccaggtgatcttcgacccggaccaggagaccctccagatcctgaaggcccgccaggcgcagcaggcccagcgccgggcgctgatgcgcagcatggcgggcagagaggatgtgactctggatggccggaagatcaagctctgctgcaacatcggctctctggaggacgtggatgcggtgctggccaatgacggccagggcatcggcctgtttcgctcggagttcctctatctggccgccggcggctgcccctccgaggaggaccagtttcaggcctacaagcgagtggccttggccatgaagggcaagcgggtcatcgtgcgcaccttggacatcggggtggataagcaggcgggccgtttccatctgaacagggaggagaacccagccctgggcctgcgggccatccgcatctgtctcaaccatcccgaggtgttccgcacccagctgcgggcgctgtaccgggccagcgcctgcggtaagatcgccatcatgttccccatgatcgccagcgtgtgggaggtgaaggagtgccgccgggcctgccagcgggtgatggatgagctcaccgccgaagggatccccttcaacccggacaccgagatcggcatcatgatcgagactcccgccgccgtgttcatggcgcctgagctggcccggctggtggacttcttttccgtgggcaccaacgacctgactcagtacacgctggcctgtgaccgacaacgcagcgacctgggcaagtttttcgatcctcaccaccccgcagtgctccgggctctgaaaatggccgccgacgccgcccacgaggcgggcatctggatcgggatctgcggggagctgggggccgacccggatctgctgcccaccttcctggccatcggcatcgacgagctcagcgtcgccccctccgccgtgctccccctgcgcgccgccctgcgcaagagcatcgcaaaccgctgcaccctcgacctgctgatgtcctgagccgagccaggccctctcccatccgaacaaaaggaccggtcgggcccctgtgacacaggggcccgaccggtcccactttctcttccagcagggaggcatgcggctcctcccggctgtcaggcgccctttctttcgggagggccgctccctatccgcagcagctttttcttcaattccccgccgttgaaggggaccagaggatagaggtagcactgccctgagatggtccggttggacaccagcaccaaaaacagcaacgccgcacctcccacaaagccccacaggcccagaagtccggtagccaccagcaggatcaggcgcatgaacttcagcgcatagcccagttccagattgggctggttatagttggcgatggccaccaccgccatatacagcatcacttcggcggaaaaccagccggactggaccgcgaagtcccccaggatgatggctccgatcatggagaaggaggtggtcaggatgttgggcgtattgagggcggccagcttcagcccgtcgatggccagctccaggatcagcagctggaggagagggggcacctgcgccggctcctccatcagaataaactccagccacccggggacccgttccggctcctggatcagcaggagccacaccggggtaaggaaggtagtgagaaaggtggtaaaaaaccggaccagccgcaggtaggagccggtgatgggcgggaagtagtagtcattcgcctcctccatcacgtcgaagagggtggtaggcaggatgatggcggcgggggaattgtccaccagcaccaccacatccccttccaggatctgggccgccgccgcgtccggccgttccgtgaacttgaacttggggaagggattgtaccaccgcttccggaccagcagctctgccaggctctcctgattcatggtcaaagcgtccaccctggcctgggcgatgcgctcccgcaccgtgttgaccagctccgggtccgcccggccctcaaaataacacaccgccacgtcggtcctggaggtctcccccacctccaggtgctccacgcacagccggggcgagcggatgcggcggcggatcagcgccgcgttgaagaccatagtctccacaaagccgtcccggctcccccgaaaggacttgtcctggtccggctccgaggtggtccgctggggataggtgcgctggtcgatcagcacgcactggtccattccatccacgaacaccgcccatactccagacaagatctgccccacgatggtgtcctcctccccgctgatggccacctcgcagtaggggacacacgactttgagaaagtatgggcatcccggagcaggtcctcgtcctgtatcccatagaaaaattccagcagcttctccatgatctcgtccttggcaaagccgtctacaaaaaacatgcaggcctcccgcccgcagatccgaaacacccggtagaccacatcgaaattccggtcgcaccgcaaagccccttggaaatgcctgatgttccaggtgatgtcccgctccaccgccatatccctctcctccatccattttttgattagtatccgcggaacgggccgggatataccctccgccgcatgcttgacacgcccttttccccatgctaggatgaacaaaagaactcaaaggaggcccccctatgctctacggctgctgtgtcaatctgctccccaaaacactggaccggatcggtttggaatacgccggacgcctgaagcggctgggctacgactacattgagctgcccctgaacgagctggcccagctcagcgagcaggagttccgggatgcccggacggtgctggaggagctggacctcccctgccgctcctgcaacgactttatgcccgcccgctttcagatcaccggccccgacgtcacctccagagcggagctgaccgactacctccggcgggccctggagcgggcagcttggctgggtgctccctatacggtcttcggcagtccctggtcccgcagctgtcctgagggctactcccgggaggcggcctttggtcagatcgccgaatttctgtcccttgcgggggaggaggccgccccatatcaggtggtcattgccatcgagcacaacaaccggggcgagaccaacatgctcaaccacttctccgacggggtacggatggcccgcacggtggaccaccccaatgtccgggtcctgtgcgactactaccacctgcggttcgagggggactccccctctgtcctgctggacggagggagcgagctgttgatccacacccacatctcccagctggaaggccgccgctaccccactgacctatccctggagcccatgctgcctgagtacgccggggtccttcggcagatcggatatgccggcggggtgagcgtcgagtccaaggtggatgccccggagcattgggaggagcaggcggcgctggccctggcgaatctcaggcaggtgctgggctgaccgtccccccgccttccttcaatatttttctctcatgaaactttttcttccatcccgccgtctattaggatgggagaggaaaggaggcaccatgagcccttcctcgatgcagcagcaggtggaatcccagcttttggcgtcctacgaatctctgtatcgcttggcctatacctatgttaaaaatccggatgatgccatggatgtggtccaggaaagcgccttcaaagccatctcccgctccgccgacgtgcgttcgcccgctgccatccggggctggctgtgccgcatcgtggtcaatacggccatggacgtgctccgcgcccggtcccgtcaggctgacgcggaacacatccccgagaccggtcaggaggatgtctatcaggacacggatctgatgcaggcgctggacctgctggacgagcgggagcggacggtgatagtcctgcgtttttttcaggagctgaagctccaggagatcgcccaggtcaccggagagaacgtaaacactgtcaagaccattttgtaccgcagcctgaagaaactgaagcttgagctctctgaaggaggccctatccgtgaatcaagaccgtctcgatcatctgaaacaggaatatgacgccatccccgtccccccggagctggaggagcgggtccgcgccgccatccggcaggccaggccggccggggagaagccgccccgggtcctccggctggaccggttcctgcggcgtaccggcctgtccgccgccgcggccatgctggctgtcgtgctgctggccaattccggccccggcattgcccacgctatggagcaggtgcccgtcctgggggccatcacccgtgtgttcaccttccgcacctatgaggaagaccggggcaacacctccgcccacatcgacattccctcggtggaggggggcggggacgcgctgagcgccgccatccaggcgtacaccgacaccatcatccaacagtatcagcatgaagccgcccttcagggggagctgggccactatgacctggacctgacctacaccgtggccaccgacaatgagaccgtttttgccctgcgcttcgaccagaccctggtgatggccagcgggaatgagtcggtcaagatctacgccgtggacaaggctacaggggagctcctcaccctgtccgatctcttccgcccggacagcgactgcctctccgtcctcaccgaagaggtccagcgccagatggcggaacagatggcctccgatgaccaaatccactactggctccatgacgaggacgtgggggacctgaacttcactgccctggacccggacacctccttctacatcgatggggaggggcggctggtcctggtctttgacgagggtaccgtcgcccccatgtatatgggcataacagaattcacgattcccgcccaagtcgtggaggacatcgccctgccccagtatctgtcctgagccgtccggcggtccggaccagagcactttcggggttccctttccttttcccccgggacgcgggaaatcgggacagcagttccctgacaggagggcatctttttatgagaagttaccaccgtaccgccgccctgctcaatatggtcctgagctgtgtcatatgcagcatagccgtcaactggatcgccctccccaacggctttgtggtcacgggcatcaccgggctggccatgactgcggagaccttcaccgggatcaactacgccctgatctactatgggctgaccctggccatcctgctcttcaccgccgtgaccttggggtacaaggaggtgtccagcatcctgttcctgtccatcctctaccccctggtcctgtgggtgctcaaccatgtgcaggtggagatcattctgaaggagaagctgatcgcggtcatgttcttcggcgtggtctacggggcgggcgcaggcctgacctaccgcatggggtactcctacggcggaacggacaccctgagcaagatcctcaagcagaaggtctttaaggccgcggagctgaaaaacctgttgctctgcctggacgccgtcattatgctgatcatgctctcagccttcagcctggacacggtggcctacgcctttgtaggacagatcatctacgtgaacagcatgaactacgtcatcttcaacatgggtccccgcctctatgagatccagatcgtctgtgaggacccccgggccatcgagcgttttatcatcgaggagatcggcaagagcgccaccatctccaaggtcatcgggggctactcccaggcggacaagatccagctggactgtgtctgcaactcacgggagtatgtccaattgcgggagttcatccgggacagcgggatcgactgcttcatcaaggtcttccccctcacccacgtcttcggccgcagcaaggatttccaccgcctcagcgaccagaatctgtgacaaaaagcgggacacatatgtgtcccgctttttctccccattgcccaagaggcggttttcattttccctgttctgtggtacaatgctcctgcgcccctctggggcaggacttttgactttccggagagagaccatggaacaggaactttttttgcccaccctgatgcactggcagtacggcaacaactggtgcggcagcctgaagcgggccagcttctggatcacccctaaagatgaacagctcaccgcccagctgtggaccggaccggccatccgggaaaacgcggagatcctgtacaccgcacagttccccatcagcgacgaggggctggagcagctccgcacctggctgctggagcacgccgctgctgtcaacgccgccaacccggagtccttccgctacgcgtggtagcccccggcgccgctcttttccatttcgatgaaacaggaggccgcggccccatgaatctgaatcaactctactatctccaggccatcgcccaggccaggggcctcacccgggccgctgacgccctctatgtcactcagtccaacctgagccactccatggccgcactggaggaggagctgggcatcccccttctctacaaaaacgggcgggataccctgctcactccgtacgggcaggagttcctcgcctacgccgagcgggccatccaggagatcgaggaggggaagcgggtggcccagtcccggtgcagccccacccggggccaggtacggctgggcttcatcagcgctgtcagcgccactctgatcccctggtgcgtcagtcacttctaccagaacccggacaaccagggtattacttttacctttgacgagaaacccacccggcgcatcgccgccgatttcacccaccacgccctggacatcggcttcggcacccggttcgacgacagctcatttgagttctgccccgtggtgcccgaggagctggtggccgtggtccccgccggacatcccctggcccagcaggagcaggtgacgctggagcagttgagccgggagcggctggtgatctacaaccaggccagccccacccgcaatctggtgctgtccatgtttcgtcagcaggatctccagccagatgtcgctttcgaggtggccaccgaccacatgttagccagctttgtctcccagggactaggggtgggcatcatgccccgcatgttcggcctccggctctactctgtccgtcccctctacatcgcggacactgagacccaccgcatgctctatatgttccgccccaaggaccgcagggtcctgcccgcggtccagcggttctgggactttgtgctggaggtctgcgcccagtaccagtccgacgaatagatacggaaaggcccgtcctccccgcatgcgcgggggaggacgggctctcttctgtcccgccggctcacttgtccgggtgcaggccggaccagcctgtctggggcatggtccgcagccgctccaagtcctccgcctccagggcaaagtccagcgctaggttctggcgcatccgtccagcgtcggccgacttgggcaggggaaccacgccgcagtccagggcgaagcgcaggcagatctgggcctgggagaccccgtatttcccggccagctccgccagcaggggatcatccgccagcctctggcggcccagggggctccatgcctccaccaggatctggctggcccggcagaactccaccgtctcccactggacatagccgggatgaaactcgatctggtccaccatggggggcactgtgcacacctccagcaggttctccaggtggtgaggcaggaagttgctcaccccgatggcccggacccggccggcccggtacagctcctccatggcccgccagctcccccggtccagctccttccactcctcgcaggcggcgtccggcctgggccaatggatcaggtacaggtccaaatagtccatccccagcgcctggcatgaggcgtcaaaggcggccagggtcctgtcgtagcccagctggtccttccacgccttagtggtgatgaagaactccgaccggtccaccccggaagcggccaccgccctgcccaccgcctcctctgtgtggtaggcggaggcggtgtcaatatgccggtagccagcccggatggcctcagagagcaccgcgaagccgtcggtctcccctgccttccaggtcccgaagcccacctcgggcatctccacaccattgcgcagcatcttgtttttcatatcaatttctcctttcttctcccgccagacggcggaccgtcagttccctgacctcctccggctccaggaccgggataggccgtcccagcagcaggcccagataccgctgcttgcagtactgctccagggcctgggtccggtgccatgcctggaccacgtcccgtccccaggtcaccgccccgtggtgggccagcagggcggcgctgtgcccctccgccgcccgggccaccgcccccgccagctcctctgtccccaggggcagccagggcagggcggggaccggccccagcagcagggcccagtccgcagtgatgggctcggtcaggtcctcccccaggttggccgaaaacacggaatatggagcgtgggtgtggactacgcctcccacctcaggccgggtatggtagagagccagatgcatcgggctctcggacgagggcctccctgttccggacagcacccgcccctccagatccacttccagcagcatgtcctcctccaggtctcccttatagacccccgagggagtaatgagcaccccgccatcggagcaccgggcagacaggttcccgtcgttggccgccacatagcccgcctgggctatctggcgggcggcctggcagatcttccgccgcagctcctgcttctctcggctccagctcacggcgcatcccccttttcccgggaaaccagctcccgcaggctctccccgaaggggggacggcagatgcctccctccgtgacgatggcagagatcaggctgtggtcggtgacgtcgaaggcggggtcccagcacctcacctccgctggcgccatgggctcccggtaccagagggagcggatctcttccccgtcccgctcctcgatggggatgtccgccccggtgggacagtccaagtcgatagtggaggtagggcccagcacatagaaggggacattgtagtaccgggccaggaccgccaggccgctggtaccgatcttgttggcagtgtccccgttggccgccacccggtcgcagcctacgaagcaggcctggacccagccgttcttcatcaccatggaggccatgttgtcacagatcagggtgacctccaccccggcccgggccagctcccaggcggtgagccgggccccctggagcaggggccgggtctcgtcggcaaagaccctcagctttttccccctctcctgccccagcaggatgggacccagggcggtgccgtaccgggaggcggccagcgccccggcgttgcagtgggtcaggatgccgtccccctcccctaccagggtcagaccgtgctccgcgatccggcggcacatctccccatcctcccggtggatggcccggcactcccgctccagcacctggacgatctgctccggcggccctgccgtccggtccgcccgggccagcatccgctccagcgcccagcgcaggttcaccgccgtgggccgggtggccgccaggccggcagcccactcccgcagccgggtgcggaacgccgcctccaccggcgcccggtccgccagccttcgggccagcacatacagggcatacgccgcaaagacgccgatggctggggcgccccgcacccgcagggtgcggatagcctccgccagctcttccggctcttccagttccagccagacctcccggttgggaagctggctctggtccagcagcctcacccggcggccgtcctccgtcagcccaagatattggtttttctccttccagcgggtctcctccatcagaccgcctcctctctgttttgattatgcctagattttcttttcctgtcaacctggaggggcctgagattttcgttgtcattttcttcaaattgcgctataatataaagaaacaggaggtgcggatgaacagcctcgcccgtacctgaagccacactataaggaggcgtgtctcatgagcaactatgtcgtgtccatcagccgcgagtttggaagcggcggccgcctgatcggcaagaagctggccgcaagcctgggcatcccctgttatgaccgcacactgatccaaaagactgcggagaagagcggcctttcccccgactttatcgcccgggcggaggagcgggcccgcagccggttccacctgaacatcgcccccatcggcatcggtgtccccaccttcacccaccagggcatcccggtcagccatcaggcattttttgcccaggccgacgtgatccgggagctggcggcggaggggccctgcgtcatcgtgggccggtgcagcgactacatcctgggggaggaccccgcttgcatcaaagtctttatccatgccgacatggccagccggattgaccgctgtgtggcagagtatcacatcccctccgacaacatggagagccggatcatccagatggaccggggccgcgctaactactataactattacaccggccacacctggggggagatgcgccggtatgacctgaccctcaattcctccaccaccggcatcgatggcgccgtggagatgatcgcccagctggtacgcctgcgctctgctcagttggaccaggcccctacccaggcgccctgaaaggagttcccatgtgtgacgcagccctctctccccgcatcctgatctcaggggcggatggaaagatgtccaactatgtccgtgccgtccgcgccgcgggcggcacgcctgtttctggttactgccccccagcggacctgtcctgcgccgggctgctgctgtgcggcggcggcgacctggaccccggtctgtacgggcagcccgaccagggctcccagcccccggaccccgcccgggaccaggcggagctggagctgttccgcgccttttatcaggcgggccgccctatcctgggggtctgccgggggatgcaggtcatcaacgtggccctggggggcaccctgcttcaggacctgggggacatccggcgtccctcccatacccacccccaggcggaccaggtccacccggtacgcgcccagccgggcagcctgctccacaccctctacggcccccgcttctccgtcaacagctctcaccaccaggcggtggactgccccgccccagggctggtcctcaccctccgggcggtggacggcgttcccgaggccatggagcacccctccctccccattctgggggtccagttccacccggagcggatgagcggcccccttctccgccccgacacggtggacggcgctcccatcttccgctggttcctggccctctgcggccggaccggccccgtctcttcttccactcaggaggtctcccagttatgaaccatgctcccctgcgcatcctgaccgtagcggcggccctggtcctctccgtctccctgctcaccggcgctgccgtccctgttcggtctctccccgccgcctccggggaggagacagccctctccggcccctcccttcaggacccggacaccctcgcccgggcggtggcctgtcaggccctctcctactaccgcccggagctgctggaccgctatctggcctacggcgccctttggccggagctctccccggaggacgtggtcacccgggtgaacatcggcctggacgggaccttttacggcgatgtatcccaggcggaggagccggagagcctctccgtcctggtcaacaaataccacccgctgccggacggctatgtcccccggctgcacagcctgcccgcccggtacgccccctccgggggctccctggcccctgccgcagccgcggccttcatgcggatggccgacgcggcccgggaggacggcatcaccctttacagcgtctccgcctaccgctcctactcctatcaggactccctgtaccgccggtacaccgctcaggacggcgtggaggccgacacctactccgcccggccgggcttctctgagcaccagaccggcctggccctggacatcaataccgccagccgcagtgcccatttcgagaccaccgcgacctaccgctggctcatagagaactgctggcgctacggcttcatcctccgctatccggaaggcagggaggacattaccggcttctgctttgaaccctggcactaccgctttgtggggcgtacgctggctctccaggtccgggagagcggcctgacctacgatgagttcctggcccgcagggcagtggacaggccccatacagcgctctgcgccggggacatgcctctggaggccgtccccatccttctggacggcatctgctggctgcccgcccaggcggtggccgccgccttcggccgtaccgccgccatctcaggggaccagctggtcctccccgccgaggagggctccgtggtccttaccgccggctctctcaccggggagcgggacgaccgccccttcgcgctcagcagcctgcccttccagtgggagggggagttctacctctccctggaggacctgtgcgctctgctggaactgacggcccggcgagaggaggggttgatctctctcgttccccgctccgccccatctgctctcctgccggaggagctgccgcccatccagccactcccctgctgaccccgcccggcgcctctcacggcgccgggtcctcttatatagtatgatgtggttgcagatcttacaaaaaaggaggcagatccatgtttcgacccatgcggcggcaccgccagcagctctctcagggggactgcgccgccatcctgtcccgggggacctccggcgtcctggccgtggccggcgacggcggctacccctatgcggtccccctcagctatgtgtatcaggagggaacgctgttcttccactgtgccaaggcagggcacaagctggacgccctgcgtcggtgcagcaaggcgtccttctgcgtcatcgatcaggatcaggtggtccccccggagtacaccacctactttcgcagcgtcatcgccttcggccggacccgtattttggaggacgaggcggagaaacaagctgccatttggctcctggcggagaaatactgccccggcgacagcccggagcatcgccaggaggccattcgccgggaggccggcggactgtgccttgtgtcgctctccatcgagcacatgaccggcaagcaggccatcgagctggttcgggaagaccgccggcaggctgatctccctttgtgacccccgatccccttttgtgttctggggctgaattttccttttttccaccctgtcccctgcggggggcggtaacacacaaaaggctcttgagcagaaacaagcggatgccccgctggggcatccgcttgttacggtcccgaagagggcgccccgcacagcggggcgccctccttatcttatgggagcttattttgccacgatgactcggatacggccgccgtccttctcggagcggtcataccaggcggacagctcgtaaccgccgtccttcacgcggtccagggaggacaggtagtagtcgccgcccctgtactcatagaccagcacgttgtcggacatgaggtaggtccggttgccggccgtgacagtgttgccgctgacgcgggcagcctccacctcggtcagctgccggatcttatcgggggcctggacattgcccatcaccaccacagggcccttcttcacgccgtacttgacgctcattccgggcagggatacgatctcgcccgccagatccatggtgtaactcacgatgacgctgacgccgccctccgggctgctgtccaccacatcagtcatgatgccgtagctgtgcatatcgccggtggcgtccttcaggatcagctttgtgatctcacccgcaccgttcagggtgtagtagcgcaccatatcggtggtcacgttcagccccgccagacgctcgggatagatccttacgccggtgccctcataggtgtccaggatctccacgccgtctgcgaagggataactgcccagtttggaggcgtcggaggacaccttgccggagagcttgccggtctcgctcagccgcttgagggacacggagccgtcctcactgctgatgaccacctggaccaggttgcccagcttgaagtagtcggtggtccactgatagctgtatgtgcggccgtcggtggccaggatggtcacagtgtcagcggtgtaggaggagttggccccggagccggagtaggtgccgcggctcaggttagtgacgatgccgatcttgctgccgtcctgagaggcggaggcggcggccacagcggccacgccgccgttccggcccagcagcagggtgacggtgtcccccacctgatagctgcccaggtcggacagctcgtaggcggcggaggctgtctcaatctcataggtctggcctgccaccttcacggatgtggggttggagggggtggggctcagttcctggatcgtgccggccacccggtcggtgtacacccacagggtctgcatggactcactccagtagacgatgtcgttgttctggatggacttggcggaggaggcggcgccgtcccggtacacccgggcgctgtccacatcgaaggggacggactgctgccagctgccggccgccaccaccgggccctccatcacgccgttgaccagggccacccggtccacctcaccggcggcgttgagtgagtagcccagcttgttaatatagggggtgccctccttggtgttggtggagagcaggttataaaacagatacagggtatcctgccgggtcagcacgtcggtggacttctgggcggtgacaccccggtccagctttaggttgcggtacatggccagctggccggtgggataggccccagagaagtcctctgcggtgtagcccagcagcttgaggacgatggtagcgccctccgccagggtgatctggttggaggggcggaaggtcccatccagatagccggaaatcagcccggcctgcacccccgcctggacatagccggcggcccagtgggtccggggcacgtcggggtagggcgaggtggatgcctcccccacctgatccccggtgccggtggcgttgaccgccatggtgataaactcggcccgcgtgacccggcggttcaggtggaactcaccgctctcatcgcccaccatgatgcccagggcgttgatgacctggatggcctcctctgtggagactgtggacgcggcagccgctcctgccggcaggaccatcaggcccagcagcagcactgccgccagcaggccggagcaaaatcgtctgattttcatctgtgtttctcctccttattcatagcgcagggcgtcgatggggttcagggcggccgccttttttgccggcagatagccgaacaggatgccgatgcccacggacacgccgaaagccacggccaccgagctcaggttaggcaccgcactgaaggtgctcccgccgcccatactgctggtcatcatgcctccaatgagggaaccggccaaactggccagaccgatccccaccaggatgcccagcaccccgccgatggctgaggtggtgccggcctcaatgatgaactgcccgcggatatccttccgcttggcgcccagggacttgcggatgccgatctcccgggtgcgctcggtaacggagaccagcatgatattcataatgccgatgccgcccaccagcagagagatggcggcgatggccaccagcaccgccatcatggtgcccatcatggcgttcatggcgtccatcatctcggcggaggtcatgacaaagtagtagtcgctgctctggaaggtcttgtacagccggttctcgatgatgcccttggccgttgcagctgtgtccttgctggtgctggtgaacatgtacatgctggcgtccgcgctcccgctcaggcgcagggcggtggtgtaggggaggtatatgatgtcgtccccgctcccctcgctcatgtcgctgttcttctccagcacaccgataacggtaaagtgctccccgccgatggacagctgcttgcccagggcgtcgccctggaaggcctcttcctccagataagcgccgatgacgcatacgttctggtagcgggcagcgtcgatgtaggagataaatcggcctttgcccaggttctggccgctcatggtggcccccctctcgttgaggaaggtctcacccacaccataaatgctggtgcgctcaaaatcctcgctcccctgccgcaccgccagctgagcggagacatagggggtcacgccggagatgtactggggatatttatccaccagttcatacatatcgtctgggtccaccgaacgggagtcccccccgtacataaacaattggacctggaccagattggcgcccagcttctcaaactgctcgttcatcatattctgcatgccgttgcccaggctggtgataacgatgacggcacccacgccgatgatgatgcccagcatggtgagcagagcccgcatcttgctggtcatcagggacttcagggccaggcggaaggactgtccaaagttcatgcgcccgcctcctgttccgccggggaggcgtccgaaaatccgcctgccgccggctcgtcctgctccatctcttcgggccgcaccacggccctggggtcatgggcatcgccgtcgtagatgatctttccgtcctggaggcggacgatgcggtccgccttcaccgcgatggagttgtcatgggtgatgaggaccacagtgtccccctcccggttcagctttttcagaaagcccagcacctcccgaccggtgcgggagtccagtgcgccggtgggctcgtcagccaggatgaccgacgggctgcccgccagggcccgggcgatggacacccgctgctgctggccgccggagagctgggagggcaggttcctgcacttgtccgccagccctacccgctggagggaggccatggctcgctccttccgctccgaggcgtccaccccggcatagagcagggggagctccacgttttccagcacgttcagcttggggatcaggttatactgctggaagatgaagcccagcattttgttgcggatctcggcctgctggtcgtcgtccatggtagacacgtcgatcccgcccagatgataggtccctgaggtaggcacgtccagacagccgatgatattcatggccgtggactttcccgagccggaggagcccacgatggccacgaactccccctggtcgatggtcaggctgacgccgtccaaggcatggacggtctcctctcccatctggtagatcttgtagacgtcctttaattcgatcaggtgttccatacgctcagccacccacgcccatcatcatggccatagcgttggaggcgatattctgaacatagaccgtctcgccctcctccaggccgtccaggatctcgatgtactcgctgctgctccggcccagggtgacagggcgctcctccagcttggcggggtccaccaggttgccgctctcatccagggcgccctgaccggccaccagcacggtgttgccccgctggaccgcctctaccggcacgcacagcacattgcccgcgtcctccaccagcacctcggcagacacgttcatgcccggcttcagctcctctggtgtgccctccaccaccacggtgaccgggtaggtggtgcggccattggccgtggtgccgttgatgttgatcttgtccacatagcccttgaaggtcataccctccagagcgtcggcggtgatctctacctcctggcccacctgaatgttgttgatgtccagctcattcaccttcatctcaaaggtcagggtggacatgtcatacagcactgccaggttccctcccgcggaggtcaccgcggagctgtccacgttgtcgccggccttgaagtttttctcgataacggtgccggagatgggggcggtgatctcatagttctccagggcctggagccggctgtccagggccagcttggcgttctccacgccgatgcgggcgttctccagggtggtctccgcggcagtaccgccgatggtggccagcacagtgccgtaggacaccggacttccggaggtgacatggagggcggtgatctcccccgctgtctgtgccaccacggtctggccggtgctttggctgaaggtgccgcttccggcacaggccacgctgcccaccacagcggtggcggcggtggtgccggtcagtccgccgggattgctcacccggaactttacctgacggatcaaggcgcctccggcacccacctcgtcggcgccggagatgctctcgatggtgccggtcactgtctccatcgtcccttcaatggtcagtgtgcccgtctggcccacgtacagccctgcggcgtctgcgctgtggaaggggatttccaccgtcatggtggtgttgtcccccacgtccgcgatggggtcgcccaccgccaccgggtcgcccacgctgacatagagcttctgcacgatgccgctggcagtggagtaggggttcacgctctcctgagcggtgcggtaacccagctccgcctgcgctacgctcagctgggcctgctgcaccgcgttctgggcatcctctgcgtcaaaacggtagagcagagcgcccttctctacccagtcgccctcctcaaagggagcctccacgatctccccgttgaccagggcggagaccttgtaggagtcgatgggcgtgatggtcccggtgctggacacggagatcctcaggtcctgccgctgggctgtctcaggcagataggtgcccgccacgaactgctggccggcgctcatcatgggccgaataaaaatcaggaaaatggccgccagcactaccaccgcgataatcagtcgcttgagccattttttcttctttttgggcaccttaagcttgggcggttcctttttgcccggtgcctggaccgcctcttccgtttttacctgtgttgcttccataccttgaatctcctttatgtcttggtcgcggacggggctgctgtcccccgtctcaaaatgtccagctgggcgcacagccgcgcccgggccggaccgctgtcctcttcaaagatcgcctgtgtcatggcagtggccgagatgtatatcaggatccggaagatgtccatcaagtcctcttccccccgcaggtccagcctgtcccggtccacccgccgctccagccactcccccaggtccggccgatccagcgggctcagccgcaggcccaggcgcatgtccgagttgcggctgagcatcctggccagcccggcccagtgcttccgctgggcccgcagatcatcgaacagggcgggcagcgccccgagcagatcgcctccctgctcctccagcacccgctccagccgctggagcagcccgtcctgataccgcttcaggaggtagtggaacagctcctccttgtcacgaaagtacatgtaaaagctgcctcggggaatccccgctgcccggatcatccgattgatagacgcctcagcatagggcacacgggcaaactcctcctcagcggccaacagcagccgctcccgcttctccgcgggcaggtggaagaaggtcttgctgggcattcccgtcccgcctcctcacatgacaagttgtcacacagtatagtcccccttcatttttctgtcaatcgcccccctccaggtttcaaaaaatgttcacaatccttctccgccgtacgggctgcagcggacggatattccgtccccccgccccagtctctgtcagaggccccatatgcttttcttttttaccatatcagagaatctttaagtacagtacataagaaaaattaaaattttcttaaaccggctcctccgctgcatctgcctgagtcctgactctacaccttcccccagggggaaggtcaagcaaaatctgtggctggcccacattttgtccactggataagccttttcattttaattcctattttttaagaaatcaataatattttcttttttactaagaataaccagagggatcgtcctgttctgcattaaaataggggcaaaaggagcgtcagagctatggaagaactcggatacgccctgcggctggcgcgggagcgcaggggcttgacccagacccaggtgatgaacctcaccggcatcaacaacaaaacgctctccggctatgagaacaacatcgcggagccggaccttcagaccctgaccactctgctgcggctctaccgggtgtcggcggaccggctgctccacctgcccgtctcggctcaggagctccccgccgatgaggtcaggctccttaccctgtaccgtgcctttccagaggagcagcggcagcagctgatgctggtgctggagaccctgtccagatccgcccctaagcccaagcccgcccctaagcccaggcagccgtgaccggaatctaggcttttccctggaagcagagcaccccccggagccttggctccggggggtgctctgtactatctggccagttcccaaatagcggccgccatcatctgggcgtttttcagcagggtgtccgcttccatatattcgtccggctggtgctccgtcatctcctgtccggggaacaggggcccgaaggccaccaggttgggacatgccttggcgtaggtgccgcccccgatggagagcagctccgcctcctgcccggtctgctcccggtacaccttggacagcgcctggaccagcgggctctccgggggcatgtagatgctgtcctgcccctcggtgcgctccccggcaaagccgccccgctccatggcccccatgagcctgtcggcaaagtcctcataccgggcggtgacgggccagcgcaggtccagggtgagggacagctcctccccgccgccccggatgatgcccaggttcaccgtcagcgccccggagatctggtcagacatggcaatgcccagcccctcgccccgggtctcctctcccaggacatccgccaggaaggcggcagcctggcccgagtccccatccagccccagctccttcagggccagcagcaggcggccgatggcgttgacccccttctccggggtggagccgtgggcgctctggccctccgcctccaccagcagtccctccgctgtctctgtcacccggacgccgtccagcgtcagggcgcaggcggcggaccgctcctcctccggccaattcagctccgcccgggcccggtcaggcaccacattgtgagcggtccccccggaaatgcagcggatggaccggggggacggggccagcgcccgacggaagtccaccacggcgatccccttctccccgttgataatggggtacatgccgtccggggtgaagcccatcactgggatctctccgccggcctccacatagtggcggatacaggaggagcccttctcctcgttgcaccccaccagcaggcgcacccggcggtgcaggggggcgccgctgtcccgcaccgctttcagggcgtacagggccgccgccgcgggccctttgtcgtcgatgaccccccggccgtagatccgcccctccgcccaggtacagtcatagggggggtagtgccacccgtctccggcggggaccacatccagatggcacaggacagccaccatctcctccccctccccgtactcgcaccagccgcagtggccgtccacgtcccgggtctggaagcccatctccgacgccctggacaggaaccagtccagcgcccgccggcactccgccccatagggggcccgccccgtcccggggaccgagacgctggggatgcggaccagctctctcagatcccggagcagggcctcctcttctttttggatcaattcatcaaaattcatcccttttctcccctttcccactcattttcctccagacagcgggagatggcccaggctactccctcctcctggttggagggggcggtccgccgggccgcctcccgcaccgctgccggggcattgcccatggcgatgggcagccccgccgcccggagcatagacaggtcgttgtcgctgtcccccacggcggcggtctcccccagggggacgccgtacagcagcgcgatcagggccatggcccgccccttgtccacccggtcaggcaccagctcaaagtcgtggtcattggaggcagtcagctgcaccccgggcagcgcgcccagctcctccagggggtagcgggcctggttccagtccccgtgcaccttggtcagcggcagccccctctcctccagataggcccgcgggtcctccgccaccacagcggcggagtggaagatggggaaggggtaggtccgggaaagggattccttggaaaaggggtccaccacgatctcctccccggcaaagatcatcagctcgatctcccggcccaggcacagctccagcgcccggcggcccgactcctccggcatgtcccagcggcgcagggtctccccccggacaccgtccaccacggcggcgccccccaggcaggagagcagcgcatcgcagcccgcctccccggcgaaccaaaccgcctcctggatcgggcgtcccgtattcagcaccacccgcacccccgccgcccgggcccgggcgatggcatccttggacgcctgggtgatccggcccgccgggtccagcagggtcccgtccaggtccagcgcgatcagtcgtatcatgggcatcttctccttgagcaattataggaacaggctccccacctggtagaccagcagagaggctacataggccacccccagctgccacccgatggaaaacagggtccacttcgtgctgttcatctccttggccagcgtagacaccgccgccacgcaggggacgtacagcaggatgaacaccagcatagagaaggcagacaggggggtgaaccccgtcatggccgccgccacctgggcgccggtggcagtgagcgggaaagcgtagaacatggacagggagctgaccaccatctccttggcgatcaggccagtgagcagagccaccgccgcctgccagaagccgaagcccaggggcttgaaaatgggggcgatgacgctgcccagggcacccagcatgctgtccgcctcgttctccaccatatgcagggagaagtcaaaggactggagcagccagagcaggatgctcatcagcaggatcagggtgcccgccttgatgaggaagcccttcaccttctgccacacatgggtgagcatgttgtgcagggagggcaggcggtaagggggcagctccagcacaaagggggcgggctccccggcgaagagggtatgcttgaacagcaggccggacaggatgcccgccgccatgccgatgacatacaggccgaagaccaccagcccggcccagggtccaaagaaagccgaggagagcagcccgtacaccggcagcttggcggagcagctcataaagggcaccagcaggatggtcatccgccggtccttctcgttctccatggtccgggcacccatgatggcgggcaccgagcagccgaagcccatgagcatgggaatgaacgccttcccgctcaggccgaagcgccgcagcaggcggtccatgatgaaggccgcccgggacatatagccgatgtcctccagaaaggacaggaagaagaacagcagagcgatctggggcaggaaggagagcacgccccccacgccggcaatgatgccctcacagatcaggctcaccagtacctgggacacccccgcccccagcagagtctcctccagcgcggcggagcatgtgtcgatgcccgccgccaccagattggacagccaggagccgaaggggccgaaggtgatgacgaacatcaccagcatggcgcacaggaacaggggcagggccagatatttccccgtcaccaccttgtccaccttctcgctgagggtcagctcccccggcttctgccccttggtcactgaggcggctaccacccgctcgatgtactggtagcggctgtccgccaccagggtctcccggtcacccaggtcactggcgctttcgtattccgccaccacccggtccagctgctcctgcaccggctcaggcagggccagtgcccgctccaccagctcgtccccctccagcagcttgatggaggcccagtgggcgggcaggccggcggcataggcgtagtcgtggagcagctcccccatccggtggtggatgtcgtgggtaaaggcgtcgtacaggtcgtcgggctctacggtgcagcccaggtgcatctgccggtgggcggtgtggagcagttcctccagcccctccccggtgcgggcggtgatggggaccactgggatgcccagctccttggacagccgctccacatcgatctggtccccccgtttgtccacctcgtccataaagttcagggccagcaccgtgggccgctccagttccagcagctggacggtaaggtacaggttgcgctccaggttggtggcatccacgatgtcgataatgcagtcaggggcctccccgatgatgaaatcccgggcgacgatctcctccatggagtagggagacagggagtagatgcccggcaggtccacgatggtcagggtcttgtcgcccagacgggcggtgccctccttcttctccaccgtcactccgggccagttgcccacatactggttcgagccggtcaaggcgttgaagagggtggtcttgccgcagttggggttgcccgccaaagccacccgcatgggccgggtgtcgtgggcagtggggtcatagctccccccgtgctcctggagctcgtgctcgtggtcccgcaattggcggcgggcggtctccgggtcggtcacgtgccgggtcatggcaccccgggcggtcccgccccgctccgtcctcctgggctgtcccatccggatctgggccgcgtccgcccggcgcagggacatctcatacccccgcaggctcacttccagggggtcgcccagaggggcgatcttggtcaccttcaccacagtcccgggagtcagccccatgtccaccaggcggcgcttcaccgccccggactggttgcccaccgacagaatcatcccgctctctccgggggtcaggtcatatagggtccgctcccccgatccactgtgttctgacacaggtctcacttcctcacgataatgatctctcacactggacctaattgtagccgacttttcccctcttttcaagggcaagtcccgcctggagaattcataatttatacaaatattttttacactccattcaccctgccgcccccgccccggtctatactgttcccatcagaacagtttctttttgaactatcggaggtgtgcctatgctctcccccttggagaccgccctgaccggccagcccttccgccgcctctactgccggatgctggacgagctggctcaggagtggtccctctcccgcaccgaggcagaggtgatgttcctgctctcctgtgataaaaccctggacaccgcccgggacatctgcgagactcagctgctgaaaaaatccgccgtctcccgggcagcggagggtctggtgcgtcggggatggctggaggcgctgcccgacccccgggaccggcggatccagcatctccgactcctgtcccctgcccggcctttcagcgaagaggtccgtcgggcaggagaggcgttcttctgtctgctgcttcaggatgtcaccctggaggaacagcagcagatggagaagatcgctcagaagatagagcacaatgtgcgcaccgtactcagccagtccgattcgattccacacattttgatgaaaaaggatgggaaaccgctatgaaagaagtgaagcagccctctaaaaagcctctggtctattactacctggtggctctgctcattctgatggtgctgaacttgaccctgttccccgccatgctggagaccccggtccaggatgtgacttacgatcagttcatgtccatgacctatgagcagaatgtgggccaggtccaaatcgagggggatgagatcacctttaccgacaagaccaacgagaaggtctaccgcaccaccgccaccaacgaccctgaccggacccagcgcctctatgagaatggggcccagttccaggagatcgacacccagcccggcctgctcacctccatcctggtgggctgggtcctgcccctgctccccttcctgctcatcggctggttcatcaacagacggatgaaaaaatccatgggcggcgacggcatgatgttcggcatgggcggcggctctaatgccaagatgtatgtcccctcatccactggaatccgctttgccgacgtggccggcgaggacgaggccaaggaactgctcagcgagatcgtggacttcctccacgacccggagaagtaccgccagatcggcgccaagctgcccaaaggcgccctgctggtaggccctccgggcaccggcaagaccctgctggccaaggcggtagccggcgaggccaacgtgcccttcttctccattgccggcagcgagttcgtggagatgttcgtgggccggggtgccgccaaggtgcgggacctgttcaagcaggccaatgacaaggccccctgcatcgtgttcatcgacgagatcgacaccatcggcaagaagcgggacggccagatcggcggcaatgacgagcgggagcagaccctgaaccagctgctcaccgagatggacggctttgacggctccaagggcgtggtggtgctggccgccaccaaccgcccagacagcctggaccccgccctgctgcgccccggccggttcgaccggcgcatcccggtggagctgcccgaccttcagggccgcatcgatatcctgaaggtccacgccaagcagatccgtctggcggaggacgtggacttcgaacccattgccaagaccgctgccggggcctccggcgcagagctggccaacatcgtcaacgaggccgctctgagggcggtgcgggcaggccgcccctacgccactcaggaggacttgcaggagagcgtggaggtggtcatcgcaggataccagaagaagagccgggtgctctccgaccaggagaagaagatcgtggcctaccacgagacgggccacgccctggtagccgccctccagacccactccgccccggtgcagaagatcaccatcatcccccgcacctccggcgcgctgggctataccctccaggtggacgacggtgaccatttcctcatgtctaaggatgagctgctgaacaagatcgccacctacaccggcggccgggccgccgaagagctggtcttccactccatcaccaccggggcctccaacgacatcgagcaggccaccaagctggcccggtccatgatctcccgcttcggtatgagcgacgagttcggcttcgtggcctttgagacggtgagcaaccagtacctgggcggggatgctgccctggcctgctccccggagacccaggcccgcatcgaccggaaggtgacggagatggtggacacccagtaccagaaggccatggacctgctgaaaaccaacgaggaaaagctccaccagctggcccagtacctctatgagcacgagaccatcaccgggcgggagttcatggagatcctagagggacagcgggaggtctgacagacggccttctccttccctccagggtccgccgcgccagggtccgaaaatttttcttgacaaaccgggcctccgggcccataatacagttgcaaaagacaggggagcctgcggcagcgggctgagaggaagctgagcgcttcgacccttcacctgatgtgggtcatgccaccgtagggagtcatgctggccgtgaccagacggggtgcccaccgggcaccccgttttttgatcctttccgaagggagcgtgaggagacacatcggcgccccggcctggccgggagcgggcagagggggagcgccctgtgcccgggccgcatacagcagcgatgggaagccgtgttccggcgtgagagggggccagtaagccccgaccgaacccagggaggaccctgtctgtccttccgggacccgatttgtggcccctcggggccggaaaaaggggagacgctgtctgcttttgtgtgtttccccatccattttgaaaggagcactttcccatgaatcagagcaacaccaaaaagctggccattgccggcattctgtgcgccgtggcggtggtgggcagcctgttcactttccccgtcctggccagcaagtgcgcccccatccagcatatggtcaacgtcctgtgcgctgtcctgctgggcccctggtacggagtcggggtggctttcggcgccagcctgatccgaaacctgctggggcttggcacgatcatggccttcccaggcagcatgtgcggcgccctgctgtgtggactggtgttctggaagacacggaacctccccgccaccctggtgggggaggtcttcggcaccggcatcatcggcggcctggccgcctatcccgtggccatcctgtttaccggtgcagacgccgccacggtggctttctacgcctacatcgtccccttcctcatctccactgtggccggcgccattctggccggcatcctggttgccgccctggggcggaccggggccctgtcctccatgcggaccgccctggagcgctgaatccccacttcttttcccggcccgcagagcgggccgggttttttgcttttttgcctcctccggggtataatgggaccaacgacgagacaagggaggtcttttcccatggacatcaccccggaacaggtccgcgcccaccggctgcgggcccaccatctggaccgccggtatcccgccagccggatactggaggctgcgggggcctgcgggctccagaactccccgcccggcgggtgggagactgccctcttccagcgcctggagggctgttccctccccctcctccgagacgccctgtaccgggaccgggccctgctccaggcctggagcatccggggcgtgcccctggtctttcccgccggggagagcggcgtctttctctccccccttctggcccgggagggggagtgtccctggatctacacccgggggatcaccgcggccctggactttgtcggcatgtccttcgacgaggcccacacccgggtgcgggaggccgcccgctgcctggacgggaccaccatccgcagcaaggaggccctggaccagctgctggctgaccgggtcggggcgcagctcccgccgaaacagcgggccctgtgggactccccctccatgtacggccgccctgacaggcagaccgtgggaggcgccgctgtctcctttctcctccgcccctgctcctttgcctctctggtggtgttcggccgccgggaggagaacagtcccacctttacctccttccgccgctggctgggccgggagccctccccctgccctcagggggaggcggagctggtgcggagatttctccactgctacggccccgccgcccccgccgatctccaggcctggctgggcagctctccccaacaggcgaagcggctctggtccgccgccgcagaggagatggaaccggtccgggtgctgggccggacccgctgggccctgatccgggaccgggacagcctcaccgctccgccggagcagcccggccgcctgatcctgctggggccccacgacccctatctggacctgcgggaccgagccctggtcctggaggaccccgcccgccagcgccaggtctggcggacggtctccaaccccggcgccgttctgaaggatgggcgcgtggccggcatctggaccggaaaagcggtacagggacgactagagttctccctgtccctgtgggagcccctctctcctggagcgcttcgggccctggagcgtgaggcgggggcctacgccgccttccggggcctggagctgagtctcctgccctaatcgctgggccgcctgatccgcaagctgagcagctgtgccctacgggcggtgctaatcagtttacgaacaagcctcgcaaagttcgcgcccgcaggcgcgaatccagttctgatctgttttccccggcgacatgtgcgtcggggaaaacacctctcaggctgcaagtgtggggtttgtccgcctgcggcggacaaaccctgcgcgcggcagactgcatctttctcgaaaaagtggccttgccactttttcgaccctctcagcgccgcccgatgggcggcgctgctgctgttcattccactgtcttcagcgactccaccatatccagctttttcagctttcggtgggccgccagattgaccaccagggagaagacggcggtgagtaccccggcgtagagatagctggacagggccagtgtccgcccgaacatgagcaggtcgatctccactgtcagcaccagccactggtggagcagcttccccatccccatccccagggccacgccgaacaccgtgaggatcacgttctcccggtagatataggcggacagctcgccgtcgtagaagcccagcaccttcagggtggccagctcccgcatccgctcggtgatgttgatgttggtcaggttgtagagcaccacaaaggccagggccgcggcgcacacgatgatgaggaccacggcgtagtccacgctctccagactggaggtgaagacctcccgggtggccgccacctgggacagggtggtgacgccgtccagccccaccagctccgcgtccagggcctccgccccttcagcggggtaggccgccagcacctggttctcctccggcggctggccatacagggtctggtagtaggcgtcggtcatgtagacatagtgcatgatatagtgctccgtgacatccgccacccgtacctggacccggctgtccccgtccagagtgaaggtgtcccccgccgacacccccagcagggaggccagcttctccgtcaggaccactccgtcgtcaggcaggagcaccggcacgctgtccgtccggtggcgcagggagacgaagggggccagcgcctcctggctgggcaccacctccaccgtgcagtccaccgtgtaccgctccgtctcggcggaggccgtctccgagcggctcaccagccatccgctcaccagctcggaccgctccagcgccccggtcacctccgccagctcgccgggggtcactcggtccaccagcccgatctgggcggtatagcggtagatctcgtcgtactgcctgtccatcacgtcgaaaatggagccccgcaggccgaaggcggtgacgatcagggcagcgcagccgccgatgcccaccaccgtcatccagaagcggcgctgatagcggaacaggttgcgcagggtgatcttgtagttgaaggacagccgccgccacagggtggcgatccgctccagcaggatgcgcttgcccatggggggtgccttgggccgcatcagctccgccggcaccgctgccagggtggagaagcaggccgccagggcggagagggtcaccgtccccaccgcggccccgcaggccagcagggaggtagcggggtaaaagccgtactggatctcccccactgtgtagaggatggcccaggcgttgcagatgatccagggcagcagggtcagccccactgccagccccagggccgcccccgccgcgctggccaggaagccgtagcccacatatttcaccgcgatggcccccttggagtagcccagggccttcatcccgccgatggtgatccgctgctcctccaccatccgggtcatggtggtcaggcacaccagggcggccaccaggaagaagatcagggggaacaccgccgccagactgcccatccggtcggcatccatctcgtagctggcgtagccggtgttggtgccccgtcccaggagataccaggagcagtcctccaaggcatccaggtcccgccgggcctgctccagctccttgcgggcgtccgccagctcctgctccgcctccgccttcccctcctcatagtcggccaggccgtcggcatactccgcctcgccgttctgcagctcagtcagggcatccgccagctccgcccggccgtccgccgactcccgctccagggtctcccgggcgtccgccagttccgcctggccgtcccggtactcctgccagccctcgtccagctcctgcctggcatccgccagctctcgctccccgtcggcgagctcctgctccccatccgccagccgggccgcgccgtcggcgtactccgcctccccgtcgtccagctcccgcttggcctgggtcagcagccccagggaggcgttgagctccagggcgctggactggagccggggcagcccggcggacagctgggcctccacctggacggcctggacctccagtgcctccgcctgggccagggcctgggccgcctgggcctggagctgctgagcctgagccgtcagctgctgggcctgggcctcgtactgctgggcctgggcttgaagctgctgggccagcagcagatttcccatggctgcggcctgctgggcctgggccgcatactgctgggccgccgcaccggcctgggcggccccctgctgggcctggaccgccccctgctgggcctgggccgccccctggcgggcctgctgggccccggcgcgcatctgctccacgcccgccagcccctgctcatactgggccatcccctcggtgtaggcggccaggccgtattcatatttggcgtaccccttgcggtactccgcccagccgtcgtccagctccgcccgggcgtccgccagctcctgccgggcgtccgccacctcccggcgggcatcctccagctcgggcagggcatcctggtactcctgctccccgtcccgcagctcagtcagagcgtccgccagctccgcctccccgtcgtcgatctcccgctgggcatcggcggtctcctgttcaaaggtgttcagcccgtcatagtactccgcccagccgtcatccagctcccgccgggcatccgtcagctccgcctccccctcggagagctcctgagacacctccgcctccccgtcagacagctcccgccgggcgtccgccagggcctgctcggcctcttcccggatggactccccccgcagggcggagcgctcctccgccagaggctccagggcgtcggaaaggctgttcaccagctcggtgtagtcctcactgtaacacaacagctcctccgccccctccgcccgaaggtaggcgtcggtgtagtagcccagggaaaaggccgcctgcggcagcagaacaaaggctgagaccgcccccgtccccagagaggaagaaccccgctccacggagatatacagaggggaatccgccgttcccacgatggtgaattcccgccgggccagggcatcctcaaagtcgccggtcccggtgtccaggcggatggtgtccccgatggacaggcccgacttctccagaaacaggggctccaccaggcactcccccgctttccggggcagccgcccctctaccagccgggggcggttggacccctcctctgcaaaggagtgaacctttacgatcatctcctgatccttcagggggacagctgcgtcgatggtgtaggccccctcggcttcctccaccccctcctgccgggccagcagctccacatcctcctccgtcaggcccagggtggagaccacccgcaggtccatcagccgctgctgatcaaaatacaggtcaccggtctccttcatgtcgggggcagtggcccgcagtccggccaggaagcacaccgccagggcggagaggaccagcagggagaggaagcggctgcgggtgttccggacctcccggaccgcgtcggtcagcaggcggctgggggctttttttcgggacatgggctgttcccctcctctcctttttgtattttttcttcacaaaatcgcattttgtagaggcattaccactcaatggtctccacgggaaccgggcggtcgttgtggtcgatgcgctccacccgcccgttcttcacgtggatcacctggtctgccatgggggctatggcgctgttgtgggtgatgaccaccaccgtcatgccctgctggcggcaggtgtcctggagcagcttcaggatagacttgccggtgacatagtccagtgcccccgtgggctcgtcgcacagcagcagcttggggtttttggccagcgcccgggcaatggccacccgctgctgctccccgccggagagctgggcaggaaagttgttcagccgctcccccagccccacatggcgcagcacctcctccgcgtccagggggtcccggcagatctgggcggccagctctacattttccagggccgtcaggttctgcaccaggttgtagaactggaacacgaagccgatgtcatatcggcggtatgtggtgagctgtcgggccccatagccgctgatctcctggccgtccaccctgatagccccgctgtcacaggcgtccatcccccccaggatgttcagcaccgtggtcttgcccgcgccggagggccccacgatgacggcgaactgtcctttctcaatctcaaaggagatgtcgtccactgcggtgatggtgatctcccccatctgataccgtttccccacatgctgaagggagatataggccataggtcatccctcctgttgtccgttataaaacaggtgttgaatatcttgtattttttattataataggggataacagaggattgcaatgggcaaaagggcggcttctgtggaaaatccgacaggttctgtcctctgtgtcgaaaaacggaggaggtgcgtccatggcggaacagcgccaggaccggagggtccgcaggtccaaggcccagctgcggcaggccctgatccagctgctccaggaaaagccggtggaggagatcactgtccgggagctgactgaacgggccgatgtgaaccgcgggaccttttacagccactatcaaaacatctaccacatgctggaacaggtggaaaacgagctcttcgacgagctggggcggctgctggatgcctacccgccccacctgctccgggaggagctgacccccatcctggtggacgtgttccgcttcgtgcggagcaacagccagctgtgtctggccctgatgggcgcatggggggagggcgacttcttccgccggctggacgccatgatctatgcccgctgcctgcgggagtggcagggcatctaccccctgggcagtctggacggccccaactactgtctggagttcgtcatcgccggggcggtgggcatggcccgctcctgggcccttcagggctttcctcaggcagaggaggagctggcccgcctggccgatcggctcatctcctctggtctcgccggcacgcttcagcacttcgattgatttcctcatttttcgctccatctttttgtggaaatcgccggtcgaaaaaatgaaagaaatcgttgcgggacccttcttttttcgataaaatgaatctgtatcggaacttgaaaaagagggatgggacaagctatggagcttttgaaagagcgtatccgccgggacggcaaggtaaaggggaccgacgtgctgaaggtggacagcttcctgaaccaccagatggacatcaagctcttcgccgagatcggcagggagtttaagcgccgcttcgcggactgccagatcaacaagatcctcaccatcgaggcttccggcatcggcatcgcctgcatcacggcccaatacttcgactgcccggtgatcttcgccaagaaaagccagaccaagaacatcgccggcgaggtctacaccgccaaggtggagtccttcacccacggccgggtctatgatatcatcgtggccaaggagttcctgggccccggcgaccgggtgctcatcatcgatgactttctggccaacggcgccgccctgatgggcctgtccaagctggtggaggacgccggcgccactctggtaggggccggcatcgtcatcgagaaagccttccagcccggcggcgacatgatccgcgcccgaggcatccggctggagtccctggcccgcgtcaagtccatgaatgaggagaccggcgtggagttcgtggactgagcccgccgtccccagaattgaatcgcccttcgattaaaaccggctcgcccggttttaatatatttgtgcgggacccgtccggctcctgcacatgatcttttaaggaggaaaacacattcatgaagaagcttcttgcctttgtcatggccgccgccatgacgctgtccctggccgcctgcggcggcggcagctccagctccgccggcaccagcacccccgccggcaccagctctgctccggccgcctccagcacccccgctgacaccgccgacttcaaggtgggcgccatctacatcaacggtcagaacgacaccgccggctacaccttccagcaccacagcggcatcaccaaggctatggagaacctgggcctggaccccgccagccagctgctcatcgtggacaacgtggcggaggattacaccgccgtctccaacgccatcgacaccctggccggccagggcgccaatatcatcttcggcatctccttcggctacatcgacgccatgaatgacaaggcggaggagtaccccgagatcatcttctcccacgccaccggctacatgggcaatgacaccaacttcaacaactacttcggccgcatctatcaggcccgctacctcaccggcgtggccgccggcctgaagagcctggagatgggcaacaactccatcggctacgtggccgcctacaaccgggagtatgctgagacctgctccggcatcaacgccttcgccctgggcgtgcaggccgtcaaccccgacgccgtggtccatgtgaacaagatctccacctggggcgacgagaacctggagcgccaggctgcccaggccctgatcgacacctatgactgctgcgtcatcggccagcactgcgattccgcccagccccagctggtggccgccgagaacaacgtgttcggctgcggctacaactccgacatgaccgagcaggcccccaacgcccacctcactgccgccatctggcactgggatgtgtactatcaggccgccattgagaccgctatgacctgcggcggcgccgagaactttgtcaccgagatgggcggcaacgcctactacgccggcctgtccgagggcttcgtggacgcctccaccctgaatgagctggtggctgcccccggcactgccgccgccatggaggccgtgcgtgagctgatcgacagcggcgagtgggacgtgttctccggcgtgaagctgaacatcaccgtggacgccgaggccggcaccgccgctgtggagcaggtggatgcccccctgatgtccgacggctatgagctgaaggacggcgaggtcgtggagatggccaaccccgagatcgtgcccgccggcggcgccagcgtgaccgacgacgtcatcaagagcggcatgaactacaacgtggccggcgtggtggagggctgagtcccctccccccgtcagacacagcgcagaccctgaaccgggccggccggcatcccccgccggccggcccggccttttggctcctgctccccggtccggacccgcctccggaccggggaggagcagccaaaggcggcggagggccgcaggggaccgccggtccccaaggataatgagaaaaggggagaacgccatgccaacagaatacgccatcgaaatgaagggcatcaccaagaccttcggcagcgtggtggccaacagggatgtggagctgaacgtcagacagggggagatcctggccctgctgggtgagaacggctcgggcaagaccaccctgatgaacatgctgtccgggatctacaagccggacagcggcaccatcctggtcaacggccggcaggcggtcatcaattcccccgaggacgccaagcggctgggcatcggcatggtgcaccagcacttcaagctggtggacattttttccgccgcggataacatctggctgggggatgagaagtccggccccattctgaagaaggaccggtacgccgtcatccaggagatggcccggaagttcggctttgacatcgacccccggaaaaaggtgtacaatatggcggtgtcggagaagcagaccctggagatcatcaaggtgctctactacggggccaaggtcatcatcctggacgagcccaccgccgtccttaccgtccaggagacagccaagctcttcgacgtgctccgccgcatgaaggcggagggccacgccatcatcatcatcacccacaagctcaacgaggtgctggagatctccgaccgggtctccatcctccgcaagggggagtacatcaccaccgtagacaccgcccagaccgatgagcagcagctcaccgagttcatggtgggccacaaggtggacctgaacatcgagcgccccgtggtggaaaagacccgccccctgctggagatccgggacctgaccatccgcagcgacgagggtgccgtggccatcgaccgggtgaacttctatatccggggcggcgagatcctgggcgtggccggcatcgcgggctgcggccagaaggagctgtgtgaggccatcgccggcctgcggcccatcgagggcggccagatgatccataagggggagaacatcgtgggcctctcccccaaggcgatcctggacaagggcatctccatgtccttcatcccggaggaccggctgggcatgggcctggccccctccctgtccatcacggacaacatgctgctgaaaacatacagcgacggcaggggcatctttgtggaccggaagcggggccgagcggaggcggaacacgtcatccaggagctggaggtggtcaccccctccaccgagaccccggtgcgccgcctgtccggcggcaacgtgcaaaaggtgctgctgggccgcgagatcaaggccggccccaacgtcatcgtcaccgcctatcccgtccgcggcctggacatcaactcttcctacgctatttaccacattctcaacgagcagaagaagtccggcgtgggcatcctgttcgtgggcgaggacctggacgtgatgatggccctgtgcgacaagatcatggtcctctgccacggcagagtgatgggcgtggtccacgcccacaaggtcaccaaggaggagctgggcctgatgatgaccggcgccctggacctgacccgcaagtatgaggacaagcccgcgggcattgcccgggacactctgatcgaggaggtggaccaatgaaccggaaagaaccgctcttccgcgtggtcaagcgggagtcgtccagccccgtccgccaggccctggcctatgtggcggcggtggtcatcgccctgctcatcggcgcggccctcctctcctccatggatgtggaccccctcaccttctaccagaagatggtgaccatggacatcccgggcaacaaattcccctggcgcatcgtggagaacttcgtcaagctctttgtccccctgctcatcacctccctggccctgtcgctggccttccggatgcgcttctggaacatcggcggagaggggcagttcatcatgggcgccatctgtgccgccgcggctgcccacaagctgggcccggtcctgccccagcccctggtggtgctggtcatggccctgtgcggcatcctgggcggcggcctgtacggcctgatcgtggccctgctgaaggtgcgctacaacaccaacgagaccctgctcaccctgatgctcaactacatcgccctctatctcctccagttcctgggggagaccaaggctggctggaacttcttcctggaccccgattccgcccgacccaagttcgccggcttccccgacaacgcggacatgatcaccttccccctgggccccttcaacctgaacctgtccctgatcatcgccatcgtcctgtgcgtgctcctcttcggctatctgaagtacaccaagcacggctatgagatcgccgtggtgggggacagccccaacaccgcccgctatgcgggcatgaaggtggggcggatcgtggtgcgcaccatcttcctgtccgctgccctcatcggcctggccggcgctttctatgtctcctccgccggcaccctgtccacctccgtcaccaacgatgtgggctggaccggcatcgtggtggcctggctggccaagctgaacacggtgggcatcgtcatcaccgccctgctcatcacagtgctccagttcggctgtcaggctgccagcaccacctattcctccatcgacgccaacttcgcggacctgatccagggcatcatcctgttcgccgtcctggccgcggacttcttcacccgcttccgtctggcgcggcgcgccgcagcccccaaggaggtgtccaaatgaacgcatccatcgacgtattgaccctcttcctgttcaacatcgtgctggtgaacatccccctgctctacggcacagtgggcgagatcgtcaccgagaaggctggcagcctgaacctgggcgtggagggcaccatggccatcggcgccatcttcggctacctggcaggctgtatggccaacagcctgctggtgggcctgctggtctcctttctggccgccggcctgtgcggggccctgtttgccctgctcaccgtctccctccaggccaaccagaacgtcaccggcctgaccatcaccaccttcggcctgggcctctacttcttcatcggcaagggcctgggggaccgctggcccgtcatgacaagcgccgacgccctggtcagcggcttctccgcccgggagatccccctgctctcctccatcccggtggtgggcaaggccctgttttcccacaacatcctggtctatctgggcatcctggtggcggcggcggtgtggtggtacctcacctgcaccaagaccggcctgcgcctgcgctccgtgggggagaaccccggcgctgccgactcggtgggcgtcaacatcctgctgtataagtacgtccacctgatcctgggctccggcatcatggggctgggcggcttctatatggcactgaacatgggcggctccttcgagggctccaactgctggatcaacggctacggctggatcgccatcgccctggtcatcttcgccaactggaaccccctgtatgccatcctgggcaccctggtctttggcttcttcaacacccttcagatctactccggctctctggccggcgcattcccggacgctctgggctggctcaacagcatcccctcccacctcttcaaggccctccccttcctgatcaccgctatcgtgctggtggtcacctccatccgcaagcgggagggcagcggacagcccgccgccctgggcctgaactacttccgcgaggagcggtgaacggcctttttccaccatcagcgccctgtcccataggggacagggcgctttctgcgtcccgatgggggcatcggaccctacggggtgcaatcttctcccattgcctgcgtaggggcgcacatcgtgcgcccgccgtcccccgtgagtggccccagttcctgcgtaggggcgggtcccagacccgcccgcctcatagatgcgaagcgggcgaaaggaagccccctcatccgtcacagcatacgccgtgccaccttcccccctccggggggaaggctttgggggcggctggaagccgcccctgcgggatgtcttcggtctttgcgtaggggcgcacatcgtgcgcccgccggtctcccaccggccgcccctattctgccaggacaggcgcgatcccctcgtggggtatgcccgccaattcaacacaccagcggcggcagtacaaacgggggaaccgggtgtggtccaccacccgcgccggacgcgggcgccatgcccaaggcccgcgtctcccgtatcggggggccggggaaagcggactgcgggactcaggcggaacgcatgtggagccgtggtcccgccgggagcgtcacccggcggcgctttgcctactttgccgccgggggcaaagtaggccgccccgcagggcggaatcccttggaggcggagacggtggggcggagggaagccccctcatccgtcacggcatccgccgtgacaccttcccccctgtggggggaaggctttgaggacgcctcccggggccgcccctgtgctgaaaacccagccttgtcccgccagcaccgaactatgacatctgcctgatgtcatagtctcaccagaaatctgttatactgatgccaccatccgccgtcattggtttgataccgccgttctcacactccatttaacattgatggaaagattctcctgctataaaatatgtgagaaagaaggtgagtccatggagagagatatcctgcgcatccgtcagaaacccttgaagggagaggatgggtgccgcaccttctctgtccgcatccgtgaggatatcgtctcccgcatggatctcattgccgcccaaaccgggcggagccgaaacgagcttgtgggcatattcctggaatatgcccttgaccactgtgagatagaggagggcacccgcaatgaatcgtgattaccgcgattacccggccagcatttgggacgccatcggtgatgttgaccaggggatctgctgtgccgctctgggcggtgtggtgtgggattttatgagccatctgaccccggcgcagctcctcgccgccatggacagcgccgcgctggagaccctgcgggccatccgggacatcctggaggacgacacgctggaggacccggagtgtgtccagcgcattgatgccattctctccgccttctatctcaagctgggggcggaggtccaccgccgcgaaatttgaatcgtcccgcgcctctgccctctgcgggaatgaatcccaccgcgcacgaaaatgcgccccggcctgcttagtccagggcgtcagcttgcggaaaaagcctcgcagagttcgcgcccgcaggcgcgaatccagttctgatccgttttccccggcgacatgcgcgtcggggaaaacacctctcaggctgcaagtgtggggtttgtccgcctttggcggacaaaccctgcgcgcagcagactgcatctttctcgaaaaagtggcaaagccactttttcgacagtcttgcgccccggcctgagcaggccggggcgcgtctgtttactttcgggccgcggacagctccttctcctgtctgggctcctccgcctccggcctgcgccgccgcagggccttttccgcctcgcagatggggatgggggccatggccagggccagcaccgtcacccactgggtcaggtccatggggcacacggagaacaccccctgaaggggcggcaggagcagcacagacagctgcatgaccatccccgccaggaacgccttgttcatggccgggttggacagcgccccctgggccagcagggactggtcctcgctgcggacgttgaaggcgtggaacagctggctcagcgtcagggtggcgaaggccatggtgttggccgccgccccctccatgccgggggcgcccaggtggaacagccccagcagataggcccccaaagtcagcccgcccaccatcagtccctgccacgccaggcgcagggagaatccccgggagaacagcccggcggaggggtcccggggcggctggtccatcacgccctcctccaccggctccacgcccagggccagggcgggcagggagtcagtcaccagattcagccacagcagctgcaccggcaccaggggcatctgcccgaagttcaagagggtggccacgaaaatggtgaagatttccccgatgttgcaggagagcagatagtggatggccttgcggatattggagtagatcccccgcccctcctccaccgcctggacgatggtggaaaagttgtcgtctgtgaggatcatctccgccgctcccttggccacgtcggtgccggacagccccatagcgcagccgatgtccgccgccttgagggctggggcgtcgttgacgccgtcccccgtcatggccaccacccgcccctttttctgccaggcccggacgatgcgcatcttgtgctccggcgacacccgggcaaagacagcgaatttttcaatgtcctcctccagcatctcctggggcatgaagtccagctccgggccggtgagggccaggtcccctgggcggcagatgtccagctcccgtgccaccgccatggccgtggcacggtggtccccggtgatcatcaccgggcggatgcccgcctggtggcaccgctccaccgcccccttcacctcccgccggggtgggtcggccatgccgaacagccccaggaaggtaaggtcccgctccaccgtcccgctctccagctttctgggctgcagggacagctcccgccgggccaccccgatgacccgcagggcccggcgggccatgtcctcattggcggcgaggatctgtctccggtccgccggcgacagtgggcctcttgggccggacacgcaccgctccagcagcacgtccggtgcccccttcaccagcaccaggcggccgcccccctccttttcgtggacggtggtcatcagcttgcgcccggagtcgaagggaatctccccggtgcggggcaggctctcggacagctggttccggtccagcccctcccgggcggcggccaccaccagcgccccctcggtggggtcccccgcggataccggggcccccgccttccactccagccgggcgtcgccgcacagggcccccgccagcagggcgtcccgccggtggccccccgccgggacccacagctcccgcaccgtcatccggttctgggtcagggtgcccgtcttgtccgagcagatgacgctggcacagcccagggtctctaccgcgggcagcttcttcacgatggccccccggtccgccatccgccccacccccagggccagcacgatggtgacgatggcgggcaggccctccgggatggcggccaccgccagggagacggcggtgaggaacatgcccagcatgtccttcccctggagcagccccaccccgaacatgacggcgcatacggagaggcacaggaaggagagggagcgtgagatctcccccatcttccgctggaggggggtgggctgggtctctccctccagcagcaggccggcgatgcggcccatctgtgtgtccatgccggtggcggtgaccagggcggtggcccgccccgccgtgaccagtgtgccggagatcaccatgttggtccagtctcccaggggggcgtcctccggcagcggcccacccgccgccttctccacgggcaccgactccccagtcattgcgctctcgtcacagcgcagtcccgccgcctccagcaggcgggcgtccgcaggcaccaggtcccccgcctccagcaggatcacgtcccccggcaccagctccgccgcctccacccggacgggcgcgcccccccgcagggcggtggcgtggggggaggtcatcttccgcagctcctccagggcccggtgggcgtggtcctcctgggagatggagatgatgttgttcaccaccacgatgaccaggatgatggccgcatccagccagtcctccccccggctggccgccagggacagccccgccgcccccagcagcaccaagatcatggggtccttcatctgggccatcacccgggagagcagccccggccgcctggggggctccagctgattcggcccgtaccgggccagccgctcctccgcctgccgccgggtcagtcccccgggccgcgcgtccagttcctgaaaaagatcggcctgcggccggctgtgccagctgtccatgacctcacgctcccttcctttgtaccgctcagtatagaccccggcctgtccattttttgcagaatccagggggctgggacaggctttttcccgacaaggcttgacaagttcctcctacatatgtagaatcatctcagaaattctacatgtgtaggaggggtctttatgtggaagctgacggacagcgagtggaaggtgctggaggccctctgggccggcgggccccagcatctggggcagatcctgggcgccctggcgccggagaccggctggagccgcaccaccgtgcacacctacctcacccggatggccgccaaggggctggtatccatggaccagtcctccccccagcggtacgccgctatccccagccgggagacgtgcgccgcccgggagcggcgggatctggtggaccgggtctatgacggctcggcgggccaactggtggccgcctttgtgaaggacggcagcctctccccccaggagcgggaggagctgcgccgcctgctggacgagatggaggtgtagccgtgttcgatctctggtccttcctccatcagacggcggcggccagcatggccgccctcttcgtgctcgtgctccagcacatcttccgggacaagctctccccccagtggcagtacgcggtctggatggtggtggtgctccggctgatcctgcctgtgggctggctgggccgctctgccatagccgacctgacggggctgggcgaggccctgcggacttgggtcgagctggggctggactccgcctggtcctccccctggaccccctccctgcccctggcgggcatccccatccccccggcgggcggactgccccgctctgtcactgactggctgttcctcctctatctggcgggggtcctcctgtccgccctgtggctggcggcgggcgggctgcggctgcgccgctccctgggggaggccgtgccggtggccggagcccggctggaggccgtcgccgccctggcggagcgcttcggtctgtccatgccccggcgggtggtggagagccgcgccgcctccacccccttcctggtgggggtggtccgtccggtgctggtgctccccatgggctgggccccggaccgcaaggtgatccttcacgagctgatccatttgaaacagcgggacgtggccgccgggtgggtcaccgccctgttccggtgcgtccactggtgcaaccccttcctgtggcgcatctttgaccgcatcgacaaccagcgggagcagcgctgtgaccagctggtgctggagcggctggagggggaggaccgccgggactacggccgggtcctgctgtccatggcggatgacggccggcgccgcttccccggcgccaccaccatggccaacggaggacagaacatcaaggcacgcatccaggccatcacccggttcaaggcctttccccggggaatgggactggtctccgtctgcatggtggtgacgctgaccctctccctggtagtgggccggccggtctccgctgccgatcccctccccggcgctgtccgcctgctgggccccgtgggcagtctctcctacgccctgtcccaccggcccgccaccgtagggggcgccctggacgcatacagcaagggcatctacgcccagtatcacgacgttcaggactgttacgcctaccaggccatgaccctcccccaggagcagctccccgacctggtggaggagtggcggcagacggaccgggcgggctggagcgtgctcccggggaccgatccccgatcggcgtcctaccgcaccggccccatcttccggggactctcctatgatggggaggggggttactggacccagatgtacttcttccgggacgagggcgggccgcgggagggcactgagcgctccatcggctaccgccgccacaccctccacctccagcgccgggaggacggcacctggacggtctcgcccctgtcggtacaaaccggccggctggcctccccctttgagtgggaacagatacggctcacttcttacgacaaccttcccttccccagccaggagccccccgttttcacctggcacggagaggcggatggggtggaattggagctatggcccgaggcagagctccgggtccaagacgcctatatagagggctctgctgtcaaaaagctagatctgaatggcttcggcagctcgatccataccgatgccccagatctggatgcccggtttaccagtgttgtgggcggaatggtgcttcgactcaccaatcataccaaccagcccaaaaccatgaccctggacgtcactcagtactgggatgagggggtctccgtcctgaccggaacggatgccccggaggacggccagcaggaggacccggtgttcggtctgctgtctcaagtccagaacagctgttataccggctatgatgtgtccggtctggaggtggagctggcccccggggaaagccgggttctgtactggggcagccgcggcaaggggtatgccaaccgcatccccgccgcggactgcgtcatggcggactggctggaggccgtctatacggacagccaggggaacgaggtccccatcccactggagcgggaggtgcatctggattgaactcaaaactgatccgcggggtccagtacgccgcctgggcctacttcttcctctatctggacatcaaccttaaccgcttctccctcctccccaatgcggtggggtggtatctgctgagccgggccgtcacccccctggaggaggaacatccagacctgcggctcctgggccccctcaccttccccctgggtctctgggcgctgaagcagtatgccttcctcctcccagcctgggacctgtcccagttctcctggctgctgagctggctggcgctggcggtggagctcaccaccctgtatttccacttccagttcctcacagacctggcagacatcgccgcccgccacgccggagagacgggccgtgacttctcccccgccctgctccgggcccgcacggtggtcaccgtcctctccaccgccgcctccgtcctgttttacctgggggtggacagctccggccccctgagttccttctccatcgcgctgaccctgttcctgctggtggtgctggtggtccagatcctatgcaccaccgttctcctgtttcgcttctcctccgctctccggcgggcaggccccgttttgccggagggccccggtatataaaaacctccgccctgcccccacatgggggcagggcggaggtttttatacgctgtgaagggtctcagttctgcgcgctgccgctggcggcgggggcgctggcggaggcggaggcgtcctcctgggcgctcagctcctccatccgggtgctcaccgcctgccgcagggcggtgaccgtctcatagaaggcgggcacgtccagctggtcaaaggcatcgttggtaacgatctcatgctcgtccagccaaccctgctggagctgggtcatcttctcctgcacaaagtccgcctgatagtcggccggctccacctccaggggaaggcgcaggatgatgtggtagccgtaatcgctctccacgatgtcactgatctcgccgggctccagggccagggacgcctcctcgaactcggggaccatctgacctgcctccacggcctgatagccgtccgggttggtggccagtccggtgtcctcgctgtaatcgttcatcagctggtcgaacagggcggcggggtcgctgctctcccgcagctggcggagcagatcctccgcctgagccttcttctccgccgcggcagcctcgtccaggggctctccggtctccgggtcctgggtcagcagcaggatgtgcttgacggagtacagcttccggtcgttctggatgtaggagagcaggtcggcgtcggtgggcttcatggtgccgttctctccaaaatacttatcctgaagctggccgttcaggtcctcgctctcacacagctgggtgtagagctcaggagtcaggggatactgccacaggtacatggccatcacgtcctcgccccccatggcctcagtcatagtggccagctgatcggcaaaggtgtcctggaagtcctgggacagggtcacgccctcctcctccgctatcccggggatcagggcgtacagggccgcagtcctcagcgcgttgtccaaagtcccctgggtcagggtgacgccggaggcgtcctccgtatcccagggcagctcggtgatgccgaaataggtgctgtaataactgagcatgctgtcggcgctgtacgccacccagtacagcagctcagcggcggtgatgtccacatctcccacctgggccaccacagtgtcacccgggatgccggcggtggtgaggaacacatccgtgacggcgtccaggtccacggtgatcggttcactgctggaggtgctcccggcggcactggaagaagcgccgctcccggagctcccgccgtccttaccgcaggcggtcagggaaaaggccagaatcagggccgcgagggtcagggcccccgcccgtttcatcgatctcataagagcagttcctttctgtttcatccaattcagatctgttccggtccgcagggccggatacagtttgatatcataccacatctgtcttccggtttcaatggagaagggaaaaactccccactctgaaatgcggggcggcttcagccctccgcccccgcgaagtcgtccaccacctgccgtgcggcccgcagggcgtcctccccctttttcagccggaaggtaaagcggggcacctcccccggagtgagcagcagccggttctgataccggtccatggcgcacagggcggaaaactgctccagactgaaccgggccagggtaaagaccagctgcccctgcttctgggcgatgtcggtgatcccggcctccgccgccgcggcgcggagcagggccacggagatcaggttgttcaccgtgcgggggggctcgccataccggtcgatgagctcatccaccaggtcgtccgcctccgcctcgctgcggatggcggcgatgcggcggtacaggtccatccgctgctccggggaggggacgtaccggtcgggcaccgacgccgccacgctcaggtcggcggcacattcggtcttgggaggcaccggctggccctgctcctgaagcaccgcttcctccagcagcttcaagtacatgtcgtagcctaccgacaacaggaagccgctctgctccggccccagcacgttgcccgcaccccggatctccaggtcccgcatggcgatcttgaagccggagccgaactcggcgaactcccggatggcgctcagccgcttggcggccacctcggtgagcaccttgccccggcggtaggtgaggtaggcgtaggcccggcggctggaccgccccacccggccccggatctggtggagctgggccaggcccaggcggtcggcgtcctcgatgatgagggtgttggcgttgggcaggtcgatgcccgtctcgatgatggtggtgcacaccagcacgttcagctccccgtcggtcatccggctcatcacctcgtcgatggcctcctgggtcatcttgccgtgggccacccccaccgccgcatcctcccccagcatggcctggatgcggctggcggtgcggtcgatggtctccacccggttgtggaggtagtacacctgcccgccccgctccagctcccggcgcatggcgtcccccagcaccccccagtcgtgctccagcacataggtctgcaccggctggcggtcggcggggggctcctccagggtggacatgtcccggatgccgctgagggccatgttcagcgtccgggggatgggggtggcggacagggtcagcacatccacctgacggaagttctccttcagcttctccttgtgctggacgccgaagcgctgctcctcgtccaccaccagcagacccaggtccttgaagcgcacgtcccggttgaacaggcggtgggtgccgatgaggatgtccacctcaccgctctccacccgccgcagggtctccttcatctgggcgctggtgcggaagcgggagaccacatcgatggtcaccggatatttggcaaagcgccgcagggcgttgagaaaatgctgccgggcgagcaccgtggtgggcaccagcacagcggcctgcttgccgtccagcacgcatttcatgacggcccggaaggccacctccgtctttccgtagcccacgtcgccgcacagcagccggtccatgggtaccgggcgctccatgtcccgcttgatctcctccacgcagcgcagctggtcctccgtctccgcgtactcgaactcctcctcgaattcccgctgccagggggagtcgggagagaaggcgaagccgggctgccgctgccgctgggcatagagctggatcaggcccttggccagatccttcaccgcctttttggccttgctcttggccttctcccagtcggtgccccccaggcgggagagctttttggtctccgccgcgtcctcgcccccgccgatgtacttgctcaccaggtccagctgggtggcggggacgtagagcacatcggagccggcgtaggcgatcttcacatagtccttctccaccccgtcggcaggcagcttcaccatccccatgtagcggcccacaccgtgatgctcgtggaccaccaggtccccgggggacaggtcggcataggacttcagcttctcccggttggtggccgccttcctgggccggggctttttcagtgccgccccctgtccctcggtgagtaccgccagacgggcctccgggtactccatcccggcggacaggccgcccaccgagaccagggtctcccccggcccagggagggtctggggctggaactccaccgccgcccggaggccctgctcccgcagcagcgtctggagattcagggccctctgttcgctggacaccagcaccagggtgcccaggcccgagcgctggtagtggtccaggtcggagaccgccgtctccaggctggcgccaaaggagggcagctgcttggccgtcaccgacagcaggcagccggggggcaccggataagccgacagagtgaaggagtccagataggccgtcggccagtcggacagccgggcgttgagctccgggaaggtgcaggacagtacggcgcaggagccgtccagctccccccgctccatcagggacttggcatcctcctccagctgccactggtaggtcttggcccgctcccccacccggctgctctcagaaaagagcacacaggcgtccggcggcaggtagtcggccgccgtggccagctggggatagatcagcgccagatagcggtccgtggcggggaagctccgcccctgctccagcgcctcccggtcctgccgcagagtctgggccagctcatgccgccccgccttctccgcccctgcggccagcttctccagccgggctgccagccccgccgtccctccgggcgccagatggggcagcgcctccgccgccggcagcagcaccgcccgctccacgttctccgtccggcgctgggtggcggggtcgaacagccccatagcatccagctcgtctccgaagaactccgcccgcacgggctgctccatccctggggagtagacatccaagatcccgccccgcagggcaaactgtcccacgccttccacctggtcgcaccggctgtacccggcggcggtcagtgtctcagccagctggttcaggtcatagctccccccggtccgcagctccgcccaggcccggtccagctcctccgggggcagggtccgctgaagcagtccctccaccgccgccaccagcaggggcacctcccccgccgccatggcccgcatcagggccagccgccggtgctcccactggcgggagacagtggccgcgttgtgaaagatgtaggaccggggggcgagcaccggcacccgctgccccgtcagggactccagatcccgggccagccgctccccttccccctcgtcggcgcacaccagcaccaccggccggccggtgcgggcgtagaccccggcggcaaagtgggcccggtggaccgccgacagcccggacagggccacgggacagcggccgctgtccatggcggccagcagctggccgaactccggcacattgttcaagatgtcgttcaaaagtttcatagcggccaccaaatagaaaaatatggaaattacaagcgcgacaaagcccccgttcccgactttagggagggggtcattttccaacagtatatcgccttttctccggtccgtcaaggaaattcccggggatttccgcccccggtctccattcaggggcgggtccgggccccctacgggatgccttcggtctctgcgtaggggcgcgctttgcgcgcccgccagccgccccgcagggcggaaccctttgggggccatcctgcggctgggacgggggaatgaagacccctcatccgtcacggcatacgccgtgacaccttccccccgccggggggaaggctttaggggcggctctgaaagccgcccctacgggatgcccttcggtctttgcgcgcccctgcggcacgtcacaggtccgggaatggcaggcagggcccgcctcctgtgtaaaggccggaaccaaaacagcggggaagacctctgtctcccccgcccgggtcagcggttgatctcccggttctccgtccgccccagaagatagtccaccgacacgccgaaatagtccgccaattctatcagctttggaagcctagggtttacttctcccgcctcgattgcctgatagttgcgcaccctgcattttagaaaatctgccatatcctgctggaccagtccccgttcatttctcaaaacctttagtctttctcccagtgatttcaagctggtcacctcttgacacgcaataaaaaaacatgttataataatgggcgtaaaggagtggttcctatgtatgacctgatctccatccttctggactatgtggaggcccttccccccaccccggacatggaccgggtatccgaagagagctttcccttcctgcagcggctgtatcagctgacaggcgaggacgaggcggaccgcatctggggcgcggccatggaggtgggcgcctccgagggccggcagatgctcctcaccgggctggccctgggcctggagctgggacaggagctggaccagctctccctcagccgttgaaccggctcatcccccggtcgataccctcggccaggatgcactccaccgcgtcggcggcccgcttcaccgcctggtcgatggcctttttgtcctccccctggaacttgcccagcacccagtccgccatatcataatccgggtggggcttctcccccacccccacccgcagccggggaaactggtctgtccccaagtggaggatgatgtttttcaggccgttatgacccccggccgagccccccctgcggatacgcagacggcccacagccagggcggtgtcgtcagagaccaccagcacgtggtccggcgccaccttatagaagtccaccgcctggcgcaccgcctccccggacaggttcatgaaggtgacgggcttcatcaccagcaccttctggccggagatggtgaacacgttggtcagcgccttatatttcagcctctggatgggggcgtgctggcgctcgcccagctcgtcagctaccatgaagcccacattgtgccgggtgttttcgtatttctcccccgggttgcccaggcagaccaggacccagtccaccccgccggttccatttccaaacagcatatcggtctcctcaaacagtctgaagaggggcgggtattggctacccgccccctgttttcgcgcccttccggtccccgctctctcttacaggaacagcggggagacggaggtctccatatagatgtggctgatggcctccgcgaacatgtgggccaccgagatgtacttgatcttctcgcacttgacgccgggcttggccgggatggtatccaggaagatgacctcgtccagcacgctgctgttgatgcggtcgatggccggaccggagaggacgccgtggctggcgcaggcggtcacatcctgggcgccgccgatctccatcagggcctgagccgcgtggcacagggagccgcccgtatccaccatatcgtccagcaggatgacgtgcttgccccgcacgtcgccgatgatgttcatgacctcggaggagttggccttctggcggcgcttgtccacgatggccaggggcatgttcagcttctgggcaaaggcccgggcccgggacaccgaccccacatcgggggagaccaccatggtgtcgtcatggcagtccgcgtacttcttggtgaagtggtccacaaagatgggggagcccagcaggttgtccaccgggatgtcgaagaagccctggatctggttggcgtgcaggtccatggtcagcacccggtctgcgccggcctccgcgatcaggttggccaccagcttggctgagatggggtctcggggcttggtcttgcggtcctggcgggcgtagccgaagtaggggatcacagcggtgatccggccggcggaggcccggcgcagggcgtcgatcataatgagcagctccatcagcgcatcgttgacggaaccgctcttgtcgtctttgcggaaggagcaggtggactgcaccacaaagacgtcggagccgcggacggtctcatagatagaggcgaaattctccccgtcggagaaggctcccacctcggagtcgcccagagggatgcccagctcctgacagatgttctgggccagcttggggttggagtttccggtgaataccttgatatccttcccgtgtgcgatcataaacaacttccttccttacgcggaccgccggtacctggccgggtcggtcaccaaatctgcttgctctctgttcctctattgtgacggcagtgccgatcagcacggacatgcgtggggcttctccatcaaactgcacaaatccggcacgttatgcggatatccccaaccattatagcataatagcaagaaagtttcctgggttcaagagaatttttcgagaaattttcgaaatttttccgaaattttttattccagtctctcttttcctgaaaatgtctaaaaatgccccggcagcagacgctgccggggcatgaggaggtgcggagcagatcaggccgcgtcggcctggggggaacccgccagggggaccacgcccagcttctcccgcaggcggcctgggtgatagatgtgggagagctccagccccgcgcagaaggtatccaccaggtccaccagcagggcctccagggaccggggcagtgccccgcccaggggccacatgtgggacaggataatgttgcgctccttatcggagagcttggtcacctgctcggcattccgggctgcggccctggggtggtcgaagcactggctgccggggtgggcggacttgtcccgggggtcatagaggtacaggtcgtggagcaggcccccgcgggcggcggcccgttcatccagacgcagccaccgggctgcccggaaggacaggtaggccacgaacagggagtggtccagggtggtgatccggccgtggtgctgccagcggcccatcatccgcaccggctcgctttccaggagctctcccgtcaggcggcagaactccagcagatgcttgtgcatcggatatcagtcctttcatgggtattttcctccctttcacccagttgggaaaaggggggcggaaatgggatgccgcggcgggcggttctgggccgtccccgcgatatctggctcacggctctgatgagagtgtcgctctgctcccatcatacccggagaccgcgcatttgtcagctggaaaagagagggggcgcctcagcggatctgtcccccgccccggatcacgaacttgaagctgcacagctcggccagccccagggggccccgggcgtggagcttctgggtggagatgcccatctcgcagcccaggccaaactcccccccgtcggtgaagcgggtggaggcgttccagtacaccgccgctgagtccaccgcggccaggaagcgccgggccgcctccccgtcctctgtcacgatggcctccgagtggccggtggagtgggctgcgatgtggcggatggcctcctccgtcccgtccaccacccggacagccaggatatagtccaaaaactcagtgtcgaagtcctccggacccgcgggcgtgccggggatgatcccggccgccgtcccgtccaggcgcagctccaccggccgctccccccgggctgccctggcatccgtcagccgctcccgcatccggggcagaaagaccggggccgcctcccggtggaccaggcacacctcggcggcgttgcacacgctgggccggctgcacttggcgttctccaggatgtccagcgccatgtccaggtccgccgcccggtccacatagacgtggcagatgccggtgcccgtctcgatgacggggacggtggcattgtccacacaggcccggatcagccccgcgcccccccgggggatgagcaggtccacgtatccgctggcggtcatcagctcgtgtgcggaggcccgggtggtgtcctccaccagacacagggcctcctggggcagtccggcccgggagaggccccggcacagggcggagacgatggccgcggcggagcggtgggcctccttcccgcagcggagcacacaggcggagcccgccttcagggccagggctgcggcgtcgctggtgacattgggccggctctcatagatgatggcgatgacccccattgggacggcggtcttctcgatcaccagcccgttgggccgctccacccggctgaggacagcccccaccgggtcagggagggccgccacctcccggatccccttcgccatgccggcgatccggtccgggctgagggccagccggtccagcatcacctcggagatgcggccccgggccccctccagatccagggcgttggccgccaggatgggggccatgtccgcctccagctcctccgccatggccagcagggcccggtccttggtctgtgtatccgccagagccatggcccctctggcctgtctggcacgcgcaagcagttcttgtgtggtcatcccttccgcctccttgtggtccttcgcctttgagccccgtcaggcccgccggcccaggaaccgggtccccacctgcttcccctccacgatatcatagagcagctggggctggtccccgttggtgatgatcatgtcgcagccctggccggtcaccatgcgggcggcccgcagcttggtggccatgccccccgtgcccaggccggagccagccccgccggccagcgcctcgatgtcggcagtgatctcctccaccaccgggatcagccgggcacccgggtccttgcggggatctgcggtgtagagcccctggatatcgctgagcaggaccagcaggtccgctttcaccgtgcaggccaccacggcccccagggtatcgttgtcccctaccttgatctcagcggtggccacggtgtcgttctcgttgatgatcggcagggcgcccagctccagcaggcggaagatggtgttctggaagttctccctccggtcactgtggtcgatgtcctccccagtgaggaggatctgggccacagtgtggttgtattgggtgaacagccggtcgtaggtgtacatcagctcgcactgtcccacggcggcggccgcctgcttgccgggcatgtcagtgggccggcagggcagattcagcttgcccacccccatgccgatggcgccggaggacaccaggatgatctggtgtcctgcattcttcaggtcggagagcaccttgaccagctcctccacatggcggatgttcagccgccccgtggcatgcgccagagtggaggtgcccaccttgaccacgatctccatagcatcaaacccctttattcagctcgggaaccggaggacagggccgttcccctgtcctccctggctccgcctgccccttattttttccccaattcctgcgtcttttcataggcggccagcaccgcgtccatggcggcggcccgcagaccgcccttttccagcgcccgcaccccttggatggtgctgcccccgggggagcacaccgcgtccttcagggcaccggggtgagcgccggtctccagcaccatccgggccgacccggccagcatctgggcggcgtaggccagcgccttgtcccggggcaggccgcaggccaccccgccgtccgccagggcctccaggaacaggtaggcaaaagcggggccgcagccggacacgcagctggctgcgtctatcagcccctcaggcacctgatccaccagcccggcgggggccatcaggtttcggaaggaggccatatcctcctccgtggtccccaggccgcagaactggagcaccccctcgccgatggccgcgggggtgttgggcatcacccggatcaccgggcagtccacccccgccatctcccggatccgggcacaggtcaggccggcggccatggtcaccagcacaaagcagtcctcccgctccttcagcacaggggtaagagaggccagcatctcccccatcacctggggcttcactcccagaaagatcagccggcaggcgcgggcaacctcttcattggtacctgcggcgcagcccagctcttcggccagggcttccgccttggcgggggtgcggttggccagcagcacctgctgggggggcacagttttacagacagcccgggccagagcagcgcccatgttccccgttccgataaatccgacagtcgcagtcatgtgtgggagcctccttcttctgatgctcttttcgcctatactatatcacggccgctcgcctttttcaaacggaaacagattaagaaatggtaaatcttctccctttttgcgtggagatctgacggtcctctctccccctgagataaatcctaagaaaatcttaaggatttcttgcttgatttttcggtcccgtccgcatagactaactgtactaatacagtgaatacagtttgaagggaggcggcagtatgctgaatctggactaccgggatgcccggcccatctacgagcaggtgcgggacaatctgcgccggctgatggtgagcggcgccatccaggagggggaaaagctcccctctgtgcggtccctggccagcaatcttgccatcaaccccaacaccatccagcgggcctatgagtccctggaggcggagggctatgtctattctatccctgggaagggcagcttcgcggccccccgcaccggggtggatgaggagcggcgggaccggctgctggggcagttcgacagtctgacagccgagctgctgtacctgggggtcacgcgggatcggctgatcgcccgcatccgggaaaaagggggagaggtccaatgatcaaggtaaacaacgtcgtcaagaccttcgacggcttccgcgccctggatgggctcaccatggaggtggagaagggctccatctatgggctggtgggccctaacggcgcgggaaagtccaccatcctgcggcacatcaccggcatctaccgccccgactcgggcaccatcacggtggacggggcgccggtgtacgaaaatccggcggtgaagtcccgggtggccttcatccccgacgacctgtactactttctgtccgcctccacccgggacatgatgaagttttaccgggggctgtatcccgcctttgatgacaagcgctatcaggtgctgaaggaggccttcccggcagtagacgagaaacagcccatccgccgcctgtccaaggggatgcagaagcagtccgccttttggctggctctgtgctgcaaccccgacctgctggtcttggacgagccggtagacggcctggacccggtgatgcggcgtcaggtctggtccctgctcatgggggacgtggcccagcgggggaccacggtgctggtctcctcccacaatctgcgggaactggaagacgtgtgcgaccacgtgggcatcctcagccggggcaaggtgctcctgcagcgctccctcaccgatcttcaggacaacgtggtcaagatgcagatcgtatttcaggagccggagatgcccaagctgccggaggacctggacctgctccatgtcacccaggtgggccgcatccacaccctgatcgtccggggcagctccgacgtcatcaaaagccggctcgccgcgttccagcccatcctgatggaggccctgcctctgacgctggaggagatctttatctatgaactgggaggtgaggactatgcggtccgtgacatcatgctttaattccaccctctaccgcaaaaacctcagccgcttctggcccatctgggccctgtactcggtgatctggctgtttgccctgcccctcaatctgctcaccacgatccagcgggggcagaactgggctctggaggaccttgcgcacagcctggactatttttcccgggtctcggtgggctactccctgaacttgggcacggtgctggccgtcatctttggcctgctggccgctatggcggtgttcagctatctggatgccagccgctccgcctgcatgatgcacgccctgcccctgcggcgggaggctctgtttttcaccaactatctgtccgggctcagcttcctgctgctgcccaacgccgccatctttggcctcaccctggccggcgaggctgtggggaactgtctggatctgaaggcgctggccatctggctgctggtccagtccgcctcctgcctcttcttctactcctttgccgtcttctgtgccatgttcaccggccatctgctggccctgcctgtcttctacggggtgctgaactgcctggcggctatcatcagcgcgctgatggactcggtgctctacctgtttctctacggctacaacggcctgagcggcaccacccagcaggctgtggcctggctcacccctctggagaaactgggcggtgctgtatcctggacccaggctgcggacagcggggcctatcagcttgcccagcccgccgtggtggcggtctacgccggtgtgggggtggccctgtctgcggccgccctgttgatctaccgcgcccgccagatggagtcggcgggagacgtggtctccgtgcgggtggtccgccccatcttcaagtacggggtggccgtctgcgccggtctctccggcggcacctttacctactatgtgctgttcggagacggccagctctccctggtgctatccatcctcttctgggctgcagtgggctattttctggcggagatgctgctgcgcaagtccttccgcgtcttctccgcctggccgggctgcctggtcctgctggcgctgctctccgccctgttcctgtgcatccggctggatctcaccggctatcaggactacatccccgcctccggcgaggtgagccaggtgactgtggatctggagggcagcacctatcccagcgacggcttcggcgggagcgtccagatcaccgacccggagcaggtcgcccagatcaccgccctccaccaggccatcgtagctgcccgctccagggaggatagcatctatgacgactccttctacatctccctctcctacaccctgtccaacggacagagcatccgccgctactaccacggcgttccgctgtaccgggcggagcaggggatggagggcaccgtcacatgggctctggatcagctggtctctgaccggagctttgtccgggccggctatggacttgaccagtccgcggactggagcctgacggaggcgtacgtctacgatctctgggacatccagacccagagccacgagtccgcctccctctccgccgcccaggcggagcagctgtggcaggccgtgctgaccgatttcgacgcgggcaccatcggcacccgctacctttttgaggaccaggaccgcctggagaacacctgtgaggctgacctggacttcagcttctacctgacggagcaggacagcatggtgcaccggggcggctctgtgaccatcaccctcaccccccaggcctcccacaccctggccgttctggaggagctgggcgttctcaccgacacccgcatcgcccgcacccatgcccaagccgatcgctggtacgccatgacggatggagctgaggacacttcttccctctacaccgcctccccctgatggacccacacagtcaaacatgccccgcccgctcccattggagcgggcggggcatgtttcttttttatggctgggcctccatggtctgttccacgatatccctcatgatctcccctgtcatggcgctctccacatagccgtagagattgccctccccgtcgatcatccaggtggtggggtaggcccggatgccgtactgataggtgagctggtactccgtgtccatcactgtggggaaggtatagccgttctcttccagaaagatggcgatctcctcctgggtcccctcctgccccagcccaggggcggccactcccagtaccaccaggtccccctggttcccgccatactcctcatacagcgcctggatatccggcatttccccccggcaggggccgcaccaggtggcccagaaattgagaaaaatggtcttgcccttgtaatcggacagactgtgctcctccccgtactggtccaccagggtgaagtcaggggcagggaccaccggcggctccgacgcaccgttgtctgcatctgtggaggcggacggctcctccccgctgccgacgctctggctctgaggcacggcggagccggtctgggacagatattcggtgaagccgttcataaagccggtaaaggtcatcacccccatcaggatcagcagagccgcccccgccttccccgtccagcgcaccacctgctggtgccgcttgaagaaggacagcaccccgccggtgaacagccccaccgctaggaagggcagcacaaagcccagggtgtacaccccgatgagcagcgccgctgccggggccgaagccgaggatgaggccatcaggagcacgctccccagcaccggccctacacagggggtccaggcgaaactgaaggtaaagcccaggaccagggccaccagcggccccatggtccggccgcccagccggaagggcagcctgtgctcccgctccagcgccatggaatgtccaaacacccccagctggtacagcccgaacagcaccatgataatgccgctgatccgggcaaaccacagccggttatcgctgaaaaactgccccaaagcggtgaagccgaagcccagcaggaaaaaggtggcgctgatccccagcacaaaaaacagggtgttccacatcacccgccccctggggtagcggatggtgccgtccgcctccaccgtcttggccccgcctgccagatagcccacatataaggggaccagaggcaggacgcagggggagaagaagctgaggatgccctgtatgaaaaccgtcagcgccggaacgctgatctccagatcaaaccccataaaaaacctccattcgcactgttctctgcggcgggatcatccgccgccggggcagggtccgccggagagcttccggtccacctgttccactgtgatctcctccagccgggccatgcaccggccgtccaggtcatcaaaaagggcatccatcacctgagccatgccggtggccaccagacacttcacctcctggctgccgctgtgccaggaggtggagacgaagcgcacctccagcgcccgggccacctgggccagggacacctcccccgcccccttggcaaagcggtagcctccgccggagctgccctccttggtctccaccaggccgtcctttttcatacgggcgagcaccttccgcacccgggcggggttagtgcagatgttccgggccagctcctcgctggacaggacgcaccctcttcggttgagatagaccagagcgtggaccgccacgcagaaatcgctgttcataatggttctcctcccagggagctgttttctgtaactttatcagatacagaagaggctgtcaagagggtgttcgtcccaccatcagggacaggccctgccaatcctgccgccagcagcacacccggcccatcaccaggaaactggccagggacctgcggagcaggcggtcgccagggacggacaggcggccggcacgcaagcgtgccggccgcccaaacggtcctgcgaatcctcccggctcactccagggtcaggtccccctcccggatccagccgatccgacggaaaaacagcccgaacagccaagcgaggacggcgggcagtacaaagcagatcagcgccatggccagccagtccatgccggtgatggcagccttggcccccgtggccacatcgttcacccagccggcatagactccgatggggcccaccataccgcaggtccccattccagccgccacacccccggcggggtcattcatctcaaactggaacacacaggtggccagggggccggtgaccgcggaggcgaggatggcggggagccagatccggggattgcggacgatgttgcccatctggagcatggaggtgcccagcccctgggagatcaggccgctccagcggttctcccggaaggacaggacggcgaagcccaccatgttggcgcagcaccccgccactgcggccccgccggccaggccggtcagcccgatggcggcgcagatggcggcagaggagatgggcagggtcagggccacgccgatgaccaccgacaccaggatgcccatccagaagggctggagcacagtggcccacttgacgaagtcccccaccgcggaggccgctgtgccgatggccggggcccaccaggccgacagggccacccccgccaggatggtcaccagaggggtgaccaggatgtcgatcttggtctccttagacaccgccttgcccagctccgcggcgatgaccgcgataaacagcaccgccagagggcctccggcgccgctgcccccggacagggtgacgctgcccagggcattggccgcatagcccaccgtgaccagggaaaagaggaccagagggggggccttcagggcgtagccgatggccaccgccatagccgccccgctcatggccgaggcgtatccccccacttcgatgaggaactccatccccagctgctggcccagcgtcttgacgatggtgccgatgagcagggagcagaacaggccctgggccatggcccccagggcgtcgatgccataccgcttggctgagatctcaatgtttttgcgctttaaaaatgcgcggagcttttccatttctctcaccttttttcgtgatggtcccgcacctgccggcaaaaaggccatacaggtgtcaagacacttgtatggcctattatagcggctctgtcctgtttgtcaacgaaaacttttccctccggcagtcaagccccgcccggccgcagctcaccacagccgctccttcgaatcatcccggcgtccccatcctccaggtcagggccgccccccgggcagccttggtcaggccgatcaccttttccagccggggaaaaaaggtatcctgggccagctccgccagcttctcttccttctcggcgcgctcctcctctgtatccgtccagtccgccccggtattcatcggctccgagtaccaatctgtgtacatggagtccggataggagtaactctccaccaggtgcagcccctccctccccggcccgggcagaatgagcaggccgtccttgggggaggcaagcagggcattgcgcagttccaggtcccgcagcaccagcttggtaaaggaccggtccgtggtggtgatggtccggccccgggtcacctccgggcagccatagtcctcgtggaggtccggtccggagggcagcttctccagtccccggtccaggacgcccagcaccgtgttgaggccggtggacatggcacttttggggcggatgcgcagctcatagtcccgctccagatggatcgccagccggacgcggatggaggtcgtagtgtaccggccattgctctcccccaccgtccggatgatgagcggttcgtcccggtagctcagcaccagctccccgtcccagtctgctgcccggctgcccataaatacgccccccttctccttttgataggcgtaaagcatctcgttccagctcataagtccgctcctttcccgctcccgccgggtctcatgcccgccggaactgcttctccaggtcctttcgggtcagctcgatggccaccggccggccgtgggggcagtatttgacctctccccgcatgacggctcccgccaccttctccagctcctggggactggtgcgccagccccccttgatggccgccttgcaggccatggtgtggagcagctcgtcccgggcggcggaggggtccgcccgcccggtggtgagcagcctgcccccgatctccagcagggtgtcctcgatgtcccccgggtccacgtcaaagggggcctgccgcaccaccagcgcccccccgccgaagtcctcggcgtagaagccgaactcctccagcagcggcaggttggccagcagggcggccccctcctccgccgggggatggagggtgaccggggtgagcagggtctgcaccatgggggtgtagccctccgccttcatgcggtcgaagttcatccgctcgtgggcagcgtgcttgtcgataaacaggatggtgtccccctgttccacgatgatgtaggtgttcagcacctccccggcgatgcgccagggggctgcctctccctcaggctcaggctccgccggggcggagatctggggcgcggacccctcctccagggccggagccgggcccgggtctggtgcgggcgtctccgccggcgcgggggcggggcgctccgtccgggtcccggccaggaggtcgaagtcctccggcgccatccggtcgtggcaggtcatcccgccctgggcttcaccggggcaggcgggggccggggcctccccggtcttccactccccgggggcggtcatttctccagagatcggagccctgggatggggaggctccgccggggcgggctggggtgtgcgctcccgctgctggggcgagaggaaagaggcggcggagggcatccgggacaggccgggcacctcccgacggccgtaggtcacgtcgtggaggggcagctccccggcggacagcctggtctggttgggggtcacggtgtcgtgggcccggggcttctccagcgccacggcggggcggacatggtcccgctccagggcggagaggaccgcgtggtacaccgcgctgaacaccccccgctcgctgccgaacttcacctccgtcttggccgggtgcacattcacgtccaccgcgctgagcctggtggtcagatggaggacacagccgggaaatttgcccaccatcttctggttctggtaggcctcctccagggcggccatcatcagccgggacttcacctgccgcccgttaacgaagaagaactgccagttccggctggcccggcagcaggagggctgggagacgaagccggacacggacatgccctcgtccgagctgtccacctgggtgaagcccagggccagatcccggcccagcaccgcgtagacggcggagcgcagctgtccgtccccgggggtggccagctcctgctttccgtcccggaggaatttcactgccacctccgggtgggacagggccacccgctggaccacgccgaagacggcggccccctcggcggcgtcctttttcatgaacttcagccgggcgggggtgttgtagaacaggtcccgcaccaccatggtggtgcccagggggcagcccgcctgctccaccggcccggccacgcccccctccagggacagggaggcccccagcggggcatcctgggtgcggctcatcacgtcgatgcgggagacggcggaaatggcggccagtgcctccccccggaaccccagggtgccgatggcctccaggtcatactccgtgcgcagcttgctggtggcgtggcggaggaaggcggtcttcatctggggggccgggatgccgcagccgtcatcggtgacccggaggaaagtgaggccgccgtgggcgatctccacggtcaccgatctcgcccccgcgtctatggcgttttccatcagctccttggccacgctggccggccgctccaccacctcgccggcggcgatcaggtcggcaacgtggggatctaacacttggatctcaggcatagagcacctccagaaattcaaagctccgctcctgcgggccgtttttggtcataatagtcagaatacagatcccgggacggggccgggcctcccccgccccttatcccataaggtccagccggacagaatccgggtccacaaaggcccgccccggccggtccgggtccagccaaacgaggacctccgccccctcctggggctccccccacagcaggccggtggacacggtatagtcccggccgccccaggtgtacccgcacaccgcgctccagggcgagttccggcccgggacattgacaaaggactgggtgttccaggtcacgaagatgtggtggcggaccgagcggacggtgccggagaccgccgtgccctcccgccgcagccgcgcctggctccgccgccgggccaggcaggccagggcgcacccgccccccgccgccagcagggcggcccctatgggcaggaaggcccagtcgggccccgcgccccccaccgggatgtcccacagcaggacggccccgccgaacaggaggaaaaacgcccccatcagtcccagcacccaggcgcacagctccgcccgagaatttggacgccccatgccgctcacctcctctttcatccgggcctctccgccccgcctcagctctcctgcaggtcctgcttcagctccgccagcaggttgagggcctcgatgggggacaggatgttcacatcggtcatccggagctttttcagcaccgtctggctgcccaggtccatcagggagacctgctccccgtccgccggaagggccggtccccctgcggggaggacgccgctccccgactccagctcctccaggatggtccgggcccgccgaatgacccggtcgggcaccccggccagcttggccacctcgatgccgtagctctggtccgcgcccccccggacgatcttccgcaggaagatcaggtcgttcccccgcttcttggcggcgatgttgtagttcttcaccccggggatctccccctccagggcggtgagctcgtggtagtgggtggcgaacagggtcttggcccccagccgcttccggtcggcgcagtactccagcaccgcccgggcgatggccatgccgtcataggtggaggtcccccggccgatctcgtccaggatgagcagggagcgggcggtggcgttcttcagcagtccggccacctcgttcatctccaccatgaaggtggactgtccggaggagaggtcgtcgctggccccgatgcgggtgaacacccggtccaccacgccgatgcgggcggagcgggcggggacgaaggagcccatctgggccatgaggacgatgagggccacctggcgcatgtaggtggacttgcccgccatgttggggccggtgatgatggcgcacaggtcctctccgctgtccatgtgggtgtcgttggggacaaagggggtgccggcggggagcaccttctccaccaccgggtggcgcccctcggagatgctcagggagtcggagccgtccacctggggcatgcagtagccgttgacggcggccaccaccgcgaaggaggtgagcacatccacctgggccacggcggcggcagccttctggatctgggccacgtgggcgcaggtctgctccttcagctggcagaagagctggtactccagggccaccaccttgtcctgggcggagaggatggtgtgctccaggtccttcagctcctggctgatgtaccgctcggcgttgacggtggtctgcttccgggcccagtcggggggcaccagcccggtctgggacttggccacctcgatgtagtagccgaacaccttgttgtagctcaccttcatgttcttgatgccggtctgctccttggtccgggtctccaggtcggccagcatctctgccccgtggtcgatcacgttgcgcaggcggtccacctcctcgctgtaccccggacggatgaacttgccctcccgcacggagaaggggggctcgtccaccagggcggagctgagcagcgcccgcagctggggcaggtcgtccatctcccggcgcagggactggatcagggcggaggggcagccctccagcagctcccgcagccggggcagcctgcccagtccggcggacagggcggccaggtcccggcccccggcggttccgtacaccaccctgccgatcaggcgctccaggtcggtgatctccttcaggcagagcaccacctcctcccgggtgatgatgtcctccaccagatcgctcaccgcctgctgccggcggttgatctgcaccggggagaggagggggcgctccatccatccccggatcagccgccgccccatggcggtgcgtgtcttgtccagcacccacagcagggagcccttcttctccttgccccgcagggtctcggtgagctccagggtctgccgggcgttcaggtccagctccatgaactggcccgcggtgtagcaggtgagggcggcgatgtggctcaggtcggtcttctgggtctcgtacaggtaggagagcagccccccggcgcactgcacacaggcctggtcctccgggggcaggctgtccagcccggtgcggaactgcttttgtaccaggggcagggcggcctcatagcggaagcgggcctcccccccgttctcacagcggcagtccagccgctcccgcaggaactggggcaggccctccaggctccaggccccgtcggagagcaccgcctcccggggagagaagcggcccagctcgtttttcaggtggtccatggcctccgcccccgccggaaaggaggtgacatagaactcgccggtagagatgtcgcacaggcacagccccagcgcccgggagtcggcgtacaccccgccgatgtagttgtttttcccctcctccagcatggaggagtcgatgagggtgccgggggtgatgatgcggatgatgtcccggtccaccagccccttggccagggccgggtcctcggtctgctcgcagatggccaccttgtagcccttggcgatgaggcgggcgatgtagctctcgcaggagtggtagggcacgccgcacatgggggtgcgctcctccgggggcttgttccggtcccgggtggtgagcgtcaggtccagctcccgggagaccagcttggcgtcctcgttgaacatctcataaaaatcccccagccggaagaagaggatggagtcgggataccgctccttcatctccaggtattggcgcatcatgggggtgatctcagccatatcggcaccgcctttcggtaaaataaaagtaaaaagtgcaaaatcctgtggaaagtgtggaaaagtacaacgaaacagacaggaggcgcactaaccgccagcgcgcctcccgggggtcagctctcctccggccccccctggtcgctccgtcccgccaggtagtccagggtgaccccgtaaaaatccgccatccggatcagggtggacagttggggttcctgctgaccgtgttcatacctctgataggtgcggaggggcacatccagcgcctttgccgcatctttctgcaacagtttcttggtctctttcagttcctgaagccgcgttgaaaacgtcgccatttacacacctcgtattgacgcgccatttttggcatgttataatcaaaatacgataacccgcagaagggagcgctattgtttatgacttctttttgggaccacttatatcaatacgcccaggaacatctggtcgtccgctatctccaggaggagcccaccggctacggccggctctccatccagacggacgcccgccggcgggggctggaggacctgctgcggggccccgccgcccgctccttccgccgcctctgggaggagcagcaggagctgcacagcctggaggagcaggccctcttccgggccgggctgtccatgggcctggccctgggcggccgggtccgggacttggagtagccccgccgcccgtccctctgcggggcccttggggcgggggctcccccctcactccgccagctccccgaacagggaccaggtgttggcgtcggtgatccgcacctgccggaactggccgatcagctccgccgggccgtccagccgcaccagccggttgcccggcgtgcgggcggccaggggataccgggcgtccccgctgtccccgtcgatcaggcagcgcagggtcttccccacataggccgcgtgcttctccgcggagatctggttctggaggtccaccaggcgctggaagttggcctgcttctgctggtggggcatggggtcgtccatctgggcggcgggggtccccacccggggggagaagataaaggtgaacagggcgtcgaaccgcacctgctccagcagggacagggtctcctcaaactcctccgtagtctctccgggaaagcccacgatcacgtcggaggtgagcacgatgtccgggatgagctccttcagccgccgcacctcgtccaggtactgcgcccggtcatagtggcggttcatggcccggagcacccggtcattgcccgcctggaagggcaggtggagcaccggggccaccttcccgcaccgggccatggtctcgaacagcttctgggtggcgtccttggggtgggaggtcataaagcggatcaggaagtccccgggcacggcgttcacccgctccagcaggtctgcgaagtccaggggctcctccaggtccttgccgtaggagttcacgttctggcccagcagggtgatgtcccggtacccctccgccgccagctgctccacctcggccaggatgtcctccggcctgcgggagcgctcccggccccgcacatagggcacgatgcagtaggagcagaagttgttgcacccgtacatgatggacacccaggcctttacccggtcctgccgcaccaccgggatgccctcggagatggagcccgcctcctccgccacctggaacacccgcccccgctgggtgagcagggtgtggatgaactcgggaaagcgccagagggcgtggggcccgaacaccaggtccacgtggcggaaggactgcttgatcttctccgccacatgggcctcctgggccatgcagccgcacacgcagatgatctgctccgggtggcggcgcttcacgtggaccagggcgcccaggttgcccagcacccgctgctctgcgtgctcccggatggcgcaggtattgagcacgatgatctgggcctgctcctcgtcctgggtgaagccgtagcccatctcccggagatagccccggatgcgctcggagtccgcctcgttctgctggcagccgtaggtgtccacaaaggccaggggctgggcgggccgggcggcgctgagggccgcgacctcccggcagtactggagctggcgggagatgtcctccggggaaattcgggtggtctgctgtctcatagatcgcaacctcctgagggggatttgatggtcgtccggcccctcctgctgcatggagacaccgatcgaataatcataccatttttcccgaaaaagcacaaggccggacttttgcttttcgccgcttttccacccggtccccgcagggcgcggctctccgcccctccctggaaaaatgcgggccccctcgcggttttccgttgcgtttctctcaaaagggtgatagaatgaatcgttaaatggttacactggagggagacgtatctctctccttcccaacagagagaaaaagggggctgtgccatgcgggtgctggtcattgagaaggcggccgtaaagcagaacatcagggtggtgaagcgccgtgccggaggggccgccgtctacggcgtcctctcgggagacgccgggggcgccggcatcgccgagatggccgagctgctccgggccgagggcatcggccgcttcgccgtcagcgaggcggaggaggccgaggcgctgcggaaggccggctttgtggacgaggagatcctcatgctccgctccaccaccgaccgggaggtgctggagcggctggtggacctgaacgtggtgtgcaccatctcctccgtggacacgggcctggccctcaacgccctggcggagaaccgctccaccgtggccgaggcccacatccaggtggacaccggcatgggcttcggcggcttcctggtgggggagccggagaagatcctgctggcctaccgctccctgcccaacgtggccctgtccggcatttacacccagatccacgccgccccagccggccaggaggcggagcaccagctccagcagttccagcgggtgctggacgccatccacgccgccggctttgagaccggcaccgtccacgccgcggggtcctacgccctgatgcactgcgatcttgcccgcatggacgcggtgcgggcgggctcggtcctgctgggccgctgccgccgcaccaaagacgacgggctctccaccgtgggccacggggaggccggcatcgccgagatgcgctggctgcccaaggggcacaccgtgggtgcggaaaagaccgccgttttgaaagcgcccacccgggtagcggtggtccctgtgggctatcagcacggcttcggggtggagcggccccgtcccgccggcctgctgggcaccctgggccgctggcggcggggcaggcggctttatgtccgggtgaacggccagcgggcccgggtcatcggctctgtgggcgtgagcgagaccctggtggatgtcaccgatctgaagtgctccgccggagatgtggtctccttcgacctggaccccatgtacgcccgggactgtgtccgccagtaccggtgatcctccctgcgatttcaagaaaaaggtgtttgctatgtccagaacggtgtcttttcagccgctgctcttcggcggcgatatcaatgtttacagtgtggcccgtgcctttcacgaggcctatggggtgaagagcgtggccttcggcaagttccacaccttcccctgtgccttcagctccatcatcgactaccgcacctgccccgacaatgaggaccccgccgtcttcctctccaatgtagagaaggtggccctggagttctcccacaagaccgtcatcgtcctgggctgcggggacagctatgtgcagctgtgcgcccacctgaaggaccagtttccccgaaacgtggtggccccctacatcgacggcgccctgctggaccgcctcatcaacaaggagcacttctacgagctgtgcgaccagcacggcatcgaccacccggccacctttatctacgacggctccatgggccacgacttcaccctgcccttcggccccccctatgtggccaagccggccgacagcgtggcctactgggagcacgaattcgagggggtgaagaaggtcttcatctgtcagacctgggaggagctgctccatgctctggacctggtgtacgcctccggctaccccgaccatatggtgatccaggagttcatccccggagacgacacctacatgcgggtgatgaccaactactccgaccgcagcggccaggtgaagctgatgtgcctgggccatgtgctgctggaggagcactccccccacggcatcggcaaccacgccgtcatcatcaccgagtacgacgaggccctttccctgaagatcaaacagctgctggaggagctgcattacaccggcttctccaactttgacatcaagtacgacagccgggacggcaagtacaagctcttcgagatcaactgccgccaggggcgcagcaattactacgtcactggcgcgggatacaacatcgccaagctgctggtggaggaccggatcgaacaccgggagctgcccttcgtcatcaccaaaaaccacgccctgtggcggatggttcccaaaaaggtggccttcaaattcatccccaaggcatatcacccccagatgaaggccctgatccgggcgggggcgtccacccacagcctggagtaccaccgggactataccccggcccgcatctggcgggtatggaagacccacatcggcaacatggtccgctttgaccgccacaacaaggtcccggagaactgagcagactggagggaagccatgtcaactgtcaagacccgcggcgccaagggcgccagagagccccgggagcccaagctgggcgtgctgggggggatggggccccaggccacccaggtgttctatcagtacgtgctggaccggacagaggcctcctgcgaccaggagcatctgcccgccctgatcctgtctgacaccggggtcccggaccggaccgcctccatcctcaccgggaacaccgagcctatgtaccagcgcctgctggccgacgcccgcctgctggaggagtgcggctgcaccgtcatcgccatcccctgcaacacctcccactacttcgtggaccgcatccagcaggagatcggcatccccatcctccacatgatccgggagaccgcccggaccttggtggcccaggggaagcgccgccccgccatccttgccaccgacggcaccatccgcaccggcctgtatcagaaggagtgcgccgccttcggcctggaggccgcccctccggagcccgctgtccagcgtctggtcatgtccatcatctacgaggagatcaaacggggggagcggggcagccgggagaaatttgcccagatcgaccgcgctctggcctccatgggctgtgactgcgccattctgggctgcaccgagctgtccgtcttccgcagctaccacagcctgccccccttctacgtggacgccatggaggtgctggccgagctggccgtcgtccgctgcggcaaacagctgcgcaccatctaagaaaacatctccggggcggtgcctgcccacgcccgccgttggaacgtactccgcaaattgaaaatgggggtggcgcccccatccacacatgacaacaccaggaggtttgctctatggatctcacgccccacaccctgggcgaatactgcgccctgctggagccccagctggccgctcctctgcccgaggggctggacctgtcccagtccgtcgccctggtctcctgcgacagccaggaggtggtccccggcactctctttctgtgcaagggcgcccacttcaaggaggcctatctgtcccaggccgcccagcggggcgcggtggcctatgtgagccagaccccctaccctgccgtggatctgccctgcatcctggtgtccgacatgcgccaggtgatggcccccctggccgaccggtactacggccatccctccgggctcctgtcggtcatcggcatcaccggcaccaagggcaagtcctccaccgcctattatctgaagtatatcctggatgagtatctggcggagcagggcgggccggagagcggcatcatctcctccatcgacacctacgacggctcggagcgcttcgagtcccacctcaccacgccggagcccctggatctccagcggcactttgcccacgcggtggcggccggcatcccctacctcaccatggaggtgtccagccaggcgctgaagtaccaccgcaccctgtgcacccgcttcgccgccgcctgcttcctgaacatcggcctggaccacatctcccccatcgagcaccccgactttgaggactacttctcctccaagctgcggatcttcgcccaggcggaggtggggtgcgtcaatctggactgcgaacacgccggccgggtgctggtcgccgcccaggcgggcagccgccaggtcatcaccttctcccagaaggacccggaggcggacatctatgcctcccaggtacgcaagcggggcaacgacatcctgttccgggtgcgttcccgccgcttttcccgggagttccggctgaccatgcccggcctgttcaacgtggagaacgccctggccgccatcgcggtgtgcgaggggctgaacatcccggagcgggccgtctatgtggggctgatgaaggcccgggtccccggccgcatggaggtgtacaccaatgcggacagccacatcgtggccatcgtggactacgcccacaaccgcatgtccttcgagaccctgttccgctccgttcaaacggagtaccccggccgccgggtggtcaccgtgttcggctgtccggggaaaaaggccctggaccgccggcgggacctgggggagatctccggccgctgctccgacctggtggtgctgacggaggaggactccggggaggaggacaccctctccatctgccgggagatcgcctcctatgtggaggcccagggctgcgactactccatcgagcccaaccggggggaggccatccgccaggcggtgctgggctgccgggagccctccgtcctcctcatcaccggcaagggggcggagacccgccagaagcggggcaccgagtatatcgacaccccctctgacgtggactatgtccagtcctttcttcaggagtacgacgtgcgccacggcctggacggcatggagaaggtgcgctccctgctgtccattctgcccatcctcaagcgggacgagggccggaccgttgtggtgaaatacggcggctccgccctgggggcggaggcggccaccgacaccaccctccaggacgtggccgccctgcgcatggtgggcgtccgggtggtgctggtccacggcggcggcaagcacatcaccgccctgctggacaagctccaggtgcccacccgtttcgagaacggctaccgctataccgaccaggcggtgctggagacggcggaaatggccctctccgcccaggtaaacaaggccatcgtctcccgtctgagccagctggaggtgtctgccgtaggcctgtccggcaaggacggcggcctgctcaccgctgtggagaaggacccggccctgggccgggtggggtccatcacccgggtggagccccgtatccttcagaccctgctggacggggacttcctgccggtggtctcccccatcgccgcgggggaggacggcggcggcttcaactgcaatgccgacgacgcggcccgggcggtggcggcggctctgggggcggacaagctgatcttcctcaccgacaccgccggggtgcttatcgacagccacaacagcaagactgccgtcccccacatggatgtgaagcgggcggaggagctgatcgacaccgggctcattgccggaggcatggtgcccaaggtgcggggctgtatccaggccatccgcgccggggtgggcgaggtgtccatcctggacggccgggtggagcacgccctgctgctggagatgctcaaccagcgggtccaggggaccaccatcaccggctgacccccgttcaaaagaaaacggggctgtcttttccgctttttccacaagctgaaacggcgcccccgcctgtggcgggggcgccgtctatttcaattttcaaggtccggctggcgggtggaggtccgccggccgggccggttttcattggctctgtgctctctttacaggatcgcgtccaggatcacgtcttccagctggagggggtccagctggccccggttgcaccgatcggccagccggtccatctctccccggtcaatggagacgtcccggtactgcgctaccggcggcgcgtctttcctgtcccgccgatagcagtcgatcccgtacacctgccgtgcccctgcctcctgaaaggtcatctggcactcattcgggcggtagagatactgcatgagtccctctcacctcgcttttcaacacatctaaactgatatttgattcgctggcgatatggatcaccgtggacagcttggggttgacccggccggcctccatgtccagatagtgccggggggacaccccgcaccgctcggccgcttcctcctgggtcagctcgttctccctcctccaggtgtacaggagcctggaaaagcgccatttcagcgccatcagctccccgccggtctgaaggatcagcccgtcctccggcccgcacccgtctgccacagaagcagcacagacaggaccagaacggtctgtccgctccacctccgtgttaccagcggggcgagtccgctccatatggtgtaccatccgtcatcttttggccgtcacctcgttggtgtagacggagcggaggtccccgccgccgttccgctcggcgtacacaccaaccagggcacggtagtcccgtccgatgaccgtatcctcaaaatcgaaggtcccgtagtatgccggagtatcctgctcgtacatctccagctcttccttcgtatattttttcagtgtcgtccaggtctttcctccgtcatcggactcctgaacggtgatatagctgacccccacctcgtcggaggtgcggaccgcctccacatccgcgtggatgcggaccacgccgtcgctcttcgcggtggcccacacactgtatatggccaaatagtcgctggcacgggcaaaggcggtggtcatcagcagtccggccagcatggcacaggccagcagcacggcgcagccgcgggaaatcttctttttcatcggttctctttcctctctgttctcttttctaagtatagatggagtcgatcatctgctccagctcctcctccgtcacatctcctataattgacactatattgagcccattggtccatgatgcggtataaattgctctgttttgagcaagagaatgttccacaccgcctctaatgtattttacatcctgctgtccgttctctttctcaacggatattctatccaactcttccttcgagttgtagtttctgaccgtaacttgtacagctttttcttcacattgatatactgccataatccttataaaatcagggtctacatcaatgtcaatcctctcagtctcaaacccctccggcacccacttgggcgccagcggctcggtgatgccatacgcatccagcgcctcctgcagagaggtgaactccagctcctccaggggcggctgggcagaggtctggccggactggctggccccgggggggacgatctgaagcgtgccctgggtcagatggaccacggactcccacagcctggaactgccggccatgctccccaggccaaagaggacggcgaccacggcggcagcgatcagtgtgcgcggaaaatggcggaaacggcggaggccggcaggacgggacactgccgcttgggccgccggctcctccggcggcgtggacctgctttcctcgccggcgcgctcctccaggaaccgctggagggatgcctccgggtccagttccaggcccaggggctccttctcctccaggacgtccagatagaggcggatcagctccgggtcacagctctgatccgtcatctcctccatccgcgcgtccaattcctccaggatctcgccggcagataaattttccagatgccgctggattaaaaccaagtccccactccccccgtccggcggggcgactcgcttttccgacatctcgacacctccttactttttatatccttaaaaaacttcatttcgttacaggttccccaaagtttcttcaaattttttcagcttctccctcagacgaaacaggcgcacccggcactggatctccgtcatgcccatcttttccgcgatctcctgatagcggtagccctccagccggaggcgcacgatccgccggtccgcccgggatgtgtcgggcggaaggtagtcactcagatacagcctccgctccacaggtgccgcaggcgggtgggccagctcgtccagcggcaccgtgcggaccttctccatgtcctcccgcatcttcttgagtttgatcttcagggcctcccagagccagcccctgggatttggatggtgcttcacccgctgtccctgctcccagttcttccaacattccgcgaatgtgtcctgcgccacgtcctccgccaggccgatatcgcccagcctgcgcgcggagtaggccgtcatttgctccaacatctccaggtaaatcctggaaaacagcggatcacagtcaaaatccgacactttttaccctcccttcacacaattggcggggtccatcatatcatacctccccgcgcttttcaatgactcgggccggaaacagccccatccacataaaatcgccgttttcccttgtaaattagcggaaaagcatctataatggacaaaagaatacccgggacgcccgcggcgccctggagtcacagaaaatggagaggatcacctatgaaccgcaccaccatcgccgccatcttcgccgaccaggacaagctgggcggaaagacggtcaccgtctgcggctgggcccggaccatccgggacatgaagaccttcggctttatcgaactgaatgacggctcctgcttcaaaaatcttcaggtcgtcatggacgccaacatgctggacaactacaaggacatcgccggccagaacgtgggggccgccctcatcatcaccggcaccgtggtcctgaccccccaggccaagcagcctctggaggtcaaggcccagaccatcgctgtggagggagcctccacccccgactacccccttcagaaaaagcgccacactgtggagtatctgcgcaccatccagcacctgcggcccaggaccaacctgttctccgccgccttccgggtgcgctccgtggccgctcacgccatccactgcttcttccaggaccggggcttcgtctatgtccacacccccatcatcaccgccagcgactgcgaaggggcgggcgagatgttccaggtgaccaccctggacctgaacaacgtgcccaaaaatcccgacggcaccgtggactatacccaggacttcttcagcaagcgggccagcctcaccgtctccggccagctcaactgcgagaacttcgccatggccttcggcaacgtgtacaccttcggccccaccttccgggcggaaaactccaacacccagcgccacgccgccgagttctggatgatcgagccggagatggcctttgccgatctgaacgactacatggacaccgcggaagccatgatcaagtatatcatccgcaccgtgatggagaagtgccccgatgagatgaacttcttcaactcctttgtggacaagggcctcaaggagcggctggagcacgtagcctcctctgacttcgcccgggtgagttacaccgaggcagtggagcttctgaagcagaataatgacaaattcgactacaaggtggagtggggcgccgacctccagaccgagcacgagcgctatctgacggagcaggtgtaccagcgccccgtctttgtcaccgattaccccaaggagatcaaggccttctatatgcgccagaacgacgacggaaagaccgtggctgcggcggactgcctggtccccggcattggtgagatcatcggcggctcccagcgtgaggagcggctggatgtgctggaggcccgcatccaggagctgggcatgaatccggaggactactggtggtactgtgatctgcggcggtacggctcctgccggcacgccggcttcggcctgggcttcgagcggatggtcatgtacctcaccggcatcagcaatatccgggacgtggagctgcacccgagaacggtgggcaacgcggaattctgatcgacccgttttgaccgggaccgcccccgcaggggcggtcccgtcctttttgtctggagccttttactccgccagccgcttttcgtatttcttgagcaggtcctcgatggcctcatcgagcagtctggatttggggatccgggtcttttgagcaaggatatcaaaatccttcatcagctcatttttcagggaagaggtgaaccgggtccggttcaccaaaattgcctcagccatgctgcgcctcctgcaccattttattctgcgccccattccgctctgcgctcccggggcgaagtctccctctgccggtcccccttggcaggggcctcaaaggggcggggttctctctgccttatagtatatagacagcggagggaaaaaacaaggactgaaatcaccaattagcgacacaaaataactctttgtcaacaggggccggcggaaaaaggcgtcggtactgtcaaaagagtgactgtgccgctttttggaaaaagcaccagtctgccgtgcgcagagtttgtgcgcctgcggcggacaaaccccacacttacagcctgagaaacgttttccccagcgcacatgccgccggggaaaacagatcaggtcttaatccgcgcctgcgggtgcggactttgggaggctttttccataagctgaggcgccgcggtctccctgacgggagaccgcggcgccctgcacagttggaagggggatcaggatgaggaaatcgg

SEQ ID NO: 13575 - DNA, 551 bp, Unknown
  gut microbiota DNA sequence
ataaaaggacgcgatctgtgacatggtggttccccctaaatgttattcgcttccatcagcccttcggcctgcaaccggatcacatagaaagcccgcacccagtccagttcctgctccatggagtcctccaaagccagcaggcggcgcttgccaagcctgcgatccagaagggcaaagatacggacaaggggattctcgctgacaaggcttttctcgatgctctggttgtcaaagatcccaaacgcctcatagaacaccttttggtcaaaggtgccctgctccagcgcataggcatgagcctgattgatggcctcttttgcggagtcgtgatctttcagcgtggtggagcgcaagtgatgaaatttcgtccacacattttcaaaataggtgtagtagttgctccgcagcacttccacgccgtccacacgaatggcggcccggccctcatggtcggcgcttttgctgtaactggtggcaaaatactggatgtggccccggagtgccgggcacaggtagtcattctccaatttgttccggattccactccaagt

SEQ ID NO: 13576 - DNA, 3662 bp, Unknown
  gut microbiota DNA sequence
ccccttattatatataatgaaagaaaagcaccggctgagctggtgcttttgatggagctctggggaggagctatctgcgggcaggatgctcattcccctccgtttgcctgaccggccggacaaaggcgcgcctaacaatacaaaaagcgcagggacatccaatgtccctgcgcctgagtacggatggaggccgggcggtgccctctgttttctacctcgcgccacatgtgatcggcctgttccagatgccgggggtcatgtcctggagcggaaggcgaaaaagcgctgtccgaagtagttgagcaggacgaacagcccggagcccgccagcatggtcaggttgccctgaagctgggggctgagggcagtgccgctcagcagggctcccatggcgggcttggccaggccgtaggctagcagccagcatactgtgatattggccgcgaagcggagcaccacgccggggcccttctcccggctgcggaaggtgaagtgcttgttgagaaagaagctgaccacgctgcccaccagatagttggcggcggaggagatccagtagcccgggtctccccagaggtggaggccggccaggttgtaaaggccgaacatgacaccatatcccaccagggtgttcactaccccgaccaggaggaagcggaaaagggtgggatcaaagatctttttcagcatggcgcgcctccccgcaggtgtcggacaggatataccggggcctgtctttcacctcctcatagatcttggcgatatagtagccgatgatgcccagacagatcatgaggatgctgccgatgaacaggatcagtatgatgacggtggtgaagccctccagggcctgcccggtgaacttctgccatagggagtggacgctgagcaccaccgaggcgatcagtaccagcacccccagaaaggtgaccagttggaggggggcggtggagaaggcggccagattggtgagggcataccggaacaggctgcgcagggaccacttggagcggcccgcctcccgctcccgcacctggaactccacctgagcggtggaaaagccgatccaggaggacagggcccggaagaaggcgtttttctcccgcatggccagcagcacatccaccgcccgccggtccagcagcttgaagtcggaggcccgggacatgtccagcccggtgctcccgctcatggcccggtagaaacaccggaccgccagggtgtgcagggggctctcctttccgcggctcaccttgacgccttccacgacctggtagccctgctgccacaggcggtacatgtccacgatcttttccggcgggtgctggaggtcgcagtccagcaccacacagcaagccccacgggcctgggccaggccggcaaaaatggcagcctccttgccgaagttgcgggagaagcgcaccccccgtacctggggcagggcgcggctcttctcctggatgcgcgcccaggtcctgtcccgggagccgtcgtccacaaagatcagctcatgggggatctgggcctgctccagcagggcggagatgacatcagctgcccggggagccatctcctcctcgttgaaggcggggaggaccacggagagcagtccggagtcagtgggagcagaattgggcatgggacagttcatctcctgttctcataggcgatctcaaagtcggattttggggtgtattcctcctgcaccttcacgaccaggcagccgtcgatgatctggacgctgccgtcgtcggggtagcggggcatggcggcgaattccggccgctccgccatggccataaggtcggcctcggcgggctcctcgatagggaggttcagccagtcccggaggtagtagtagatgtgcttgttcaggggagccacggtgtccagggggacgctgtaatggtccacctgggcaaagccctccacgctgttgtggacccggtcggtggggaaagagccgatgagatagaccggcatcccgtgggtgtagccggggcagctctcgatgcgggaggccagccgggtggcgtagctgagggtggcgcggtgggcttgggcggaggcggtgtagagccggttgttggtgttcagggagaacagcagcagcaggaccagccacagggcggcgcagggggccgcacggcggcggagcacggcggcgccggcaccggcggcggggagggcccggtcagccagcagcaccaccgccagatagaccagcacaaaggcgtatttcatcaggggggtgggggcggaccaggggctgaggatctggccgaagttgatgcccagggggagcagggccagcatggccagcccgcccagggggcgccagcgcgcccgccagagcccctcctgccccatgcacagcaggaagcagcccccgcccagcgccagcgcggccagatccagcacggccatccagccggaggtgaaggtgttggcggagccgggcaggaagaagaaagccgccacctgcttgtaggtgtccagcagcagcccggggaggcgggagaagggatagccggagctggcggcatccatccccagataggacagcagctccaggtccttcacctgaagaaagaccagtaggatgccgtagtagaggacggcccccgcagccaggaacagcatcagccgcacccccaggcgcagggtggcggagaaggaggcggacgggtccagggtctcccggaaaatgaccagcagggacaggccgatggccaccgtcacataggcctgataggtgcccatggagcaggccaggagcagacagcctgccagccagtgccaccggccccttctggccagggagacggagaggaccgccaaaaaaatggcgaagcagtaggcggaggcggtgaacagatagagaaaggtgtagcccacggcgggaaaggcggccatcagcgccccggacagggcggagagggcacggctgcggatgcccagcagagagacggccagggcggcggccagggcgaggaagagcacggagaagaggccgatgaccgccggcatctgggtgaagccgttgaaataggaggcgaagtggagaaaccaccggccggagacggtcatctgctgggggtcgaagatgcggctgagaccgtcggagttggggatgatgttggtaaagacgtagaggtggaccagatagcccgacagaaaacagccgaaaaaggccgccttctgcgggggggagatccgggtccacagggctttgagcttgtcgtccagcatgtcgcaggtgcctccagggcggccggagccgcggatttgagaaagaaaagggaaaatcatagaacatcatatcataattttcacatcctgtaaactccggggcggaaagggtgcttttccccggaggccggggagagggcgttctgccggagcggcggaactaagggcgggggagaggtatcctttttgtgccccggatacccggcgagagagcagaatagagtggaaacgtgttgcccggcggggacgggtatggtacaatcaagaaaaagataaggtgtccggtggccgatggcgccggatacccggcggcgccctcaaaaaatgtccggcgagatccgagaaaaaacggatttttccttgaaaagaggggcagggatacgatataatataaagaacgcctttttgag

SEQ ID NO: 13577 - DNA, 266 bp, Unknown
  gut microbiota DNA sequence
aatcggtgttctcgttggtcttgtagaccaggtcgaagttcttgtagcccagggtatcggtgtagtagaaggtcagggagtagatgatacccttattctcgttgtagtacacgcccagcagttcgttgtactgaacgggcacggccttggtcagggcgttgaacaccagctcagccacgttgtcgcgggtcaggccctcgttggcggtgagcttcaggtcgccatacaggcccagagcggtgcccttggcggtggcggccagcatc

SEQ ID NO: 13578 - DNA, 342 bp, Unknown
  gut microbiota DNA sequence
cccagagcggtgcccttggcggtggcggccagcatccagttgtcgccgaagtcagcggcgttctggaaatagcccagggcgcggcacagcatcagcacggcctgcgcggtggtcacggtggcgttggggtcaaacttgccctcgcccacgccggccacgatgcccaggctggagcacaggttcacatagccctgcgcccaggcggggacgtcggtgaacacattggtctccgcgaactggttgacgttcacgccagcgccgtacagcatggtgctgatgatgaccgccatctcggcgcgggtgactacgttctcggggccgaaggacccgtcctcgtagccg

SEQ ID NO: 13579 - DNA, 17835 bp, Unknown
  gut microbiota DNA sequence
cggctacgaggacgggtccttcggccccgagaacgtagtcacccgcgccgagatggcggtcatcatcaccaccatgctctacggcgctgggttcaacgtgactcagttcgctgaaaccagcgtgttcaccgacgtccccgcctgggcggagggctacgtgaacctgtgctccagcctgggcatcgtggccggcgtgggcgacggcaagttcgaccccaacgccaccgtaaccaccgcgcaggccgtgctgatgctgtgccgcgccctgggctacttccagaacgccgctgacttcggcgacaactggatgctggccgccactgccaagggcaccgctctgggcctgtacggcgacctgaagctgaccgccaacgagggcctgacccgcgacaacgtggccgagctggtgttcaacgccctgaccaaggccgtgcctgtccagtacaacgagctgctgggcgtgtactacaacgagaacaagggcatcgtgtactccctgaccttctactacaccgataccctgggctacaagaactttgacctggtctacaagaccggtgaggagaccacttatggccgtcccgccaccacctggggcaccggttcttatcgggtgcagaccaacaccaccgccggcaacgacaactacggcctcaatgaggacggcagcctgatccccggtcaggtgaagatgctcgcctccgacgagatcatcaccatcgccgatgagcctgattacgtctataccggcgccaccgaggagaaggccctgtacaaggatctgggccgcggcatcatcacttcctatgcctggactgtctacgtggatggccatctggataccgttgactatgacaagaatgacgatggagattatgatgatgtcgatgagtcctatgtgactcgccccggcaacaattccagcgactacatctacaccgacagcggcatggtgaccgagatctacgttgactccgccaatgagaccgtcactgtggtctgctactacaactacatcggccaagtcagccgcgtccgtgacgatgccgacggcaagtatgtccagctgaccaacatcacctatgacggcggcagctacgatgacatcaactctgctctgaccgacgtgggtactgagctggatactaaattctacaccgatgcctttgcggaggacgcttatgtggtgttcaccgtggattgtgacgaccgtgacggcagcgactacgacgctcacgtcgccaccatggccgctcctgagaccgctgacggcaccgtgaaggctgtcagccaggaccccaagtatgacaccggcaactatatcgagctggactccaccaagtacgtgtacagcgaggtctctgccaaggatctggacaacaatgacatgactgccgaccccgctctggagactgagtaccgtctgtacctggatcccaacggcttcgtggtgggcttcgccgctctggaggacgtgtctaagaactacgtctatgtgatcgacgccagcgagtccaccggcgacgtagaggccaaggtcctgttccccgacggcaccgtggccaagatcgacgtggacggcaccattgagaagttcaacggcaccggcagtgcttccactgacttcgaggtcaagaacgacaccgacgccgacaagctggagggagtcgtttttgcctacgagaagaacagcaaggatgtctatacccttaccttcgagaccgctgaccaggctgttgtcaatatcgagaccgacaaggccagcatctacaccaccagcgtggacgatcaggacaccactgtctacacggtggacctgaacactgtgtttgccgacctggatgacaaggtggcctacaccggctatgaggaagtgcccaactatgacggcgccaccatcatggtggtggaccacaacggcaacggcatggaggacatcgtcttcatcgttgaccagggcaccaagtacggcgaggattccacttacttctatgtggccggcgccaccgactacaagactgttaagatcgacggcacccagtacacctaccgcaccgtctatgtggacggcgagaagatcgacaagggttctgaggagcccttcgtgatcaaggccagcgaggataccatcgcgaccaccggtatcggcctgtacaaggtcgtgaaggtggacgatcagggccgcgtgctggagtacaccaaggtggacactgctgacaacaagtacctgcccatcgaggaggtcggcaagaactccgttgtcacaaaccagaccgccgatgacaacaagtccggaaagtggacttggaacagcgacaccatctgggtccacatctataacaatggcaagaaggtggagtccggcgccaagagcgacatcattttcgagaagactcctgttgccggcgatgagatcacctatgtctacatcgccaagaacgacaagcagctggctgagctgatttatgtcatcgacggcgagttcaccgctactgtgtatgatgatgacgctaaggcctccgagcgtgtcggcaacatcaacgctttcctggctaccaatggctacacctccgctgatttgaccactctgaaaactgagatggagggttacctgaccaaggacatctccgccgctgtgaaggccgacgtcgaggctgtgatcaaggccctggccgatgcccagaccgctctgaccgctaatcagaccgccgccaagactgagctgaactcctacaaggagactgctctgaacacctatgaggataagctgaccggaaccgaggtccgtgagatcgaggcgatcgtgtctgctgccaacgccgatatcgatgcggcggccaagaacgccattgacggcatcgtgactcaggcgaagtctgatatcgatgggaagaccaccggtgctgctggtgcgctggccgacgagaagaaggtcaaggacgccaaggctgccctgggcgatgtgactctgtcccccgttgcctctacctccgctcctgacgccgatgcgatcaaggccaagctgcccgctgccgctgatggtgtaacctatgcggtttctgctcccagctggggttccatcaccgccggtgaggaggatacctttaccgccactgtgactgtgaccatcactgctggtgaggctcaggacacgaaggagatccaggcttcctatgtggctaccgattacaagaccgtgaaggacgctgtggacggaatcggcaaggctgtgagtgtggaggtttcttcttctggcatcgatgctaatgcggctgagactgctttgaagagtgctctggagagcaaatatacgggaactactattaccgctgatattgctggcaatgtgaccggtagcgaaggcgatgtagttaccaagagcgcttccattactgtggctgttgggtctgtcaattatacgatcgatggtgtggtcgtcacaattactctgactgcctgatttcgcctgataagatcacaagttaattttgccgccccccggtgacccggggggcggtccccttttctgccgctccgcagacgccgttgcctaccgctgaagcccatacagaatgaagctgccgcctttgttcatgggttcggagcagaacagccggatggcactcaaatcctcaaactccgctccagaggccaggccgacgcttccgaacccccaaaagctgtttctgtcccggctgcaaccctgccccaggacccccgtcccaacgcttccaagggaaaagaactcgacctcccccgcggccgtctcccgaaaggagctggacccctccagactgtctcccagccggatatctcctcggccgggactgctttggcagtgatagacggcccccgtcaccctgttgagctggacccgaagtgaggtgacggatggcgcactgatggtatagaccagccgcaggcgtgcatattgttctgccggtatcctggacagatccagatccaatgaggatgcagaagcggccagtgtccagctccccagccttacccagcataggctttcggacagatgatggacttctgctcccaaggcggccagctccgtcttgtcggcctttccactctccaggtcggagatgcgcccctccgccgccgagagggcggtcttgtcagccttctgctccaccacgttggacaggctgtccactgcagatctgtcggccttctggcccacctgctccgccagggcgcggagcgccccgtccaccctggcgttgtcggagttgaagtccacccgctccaccttgtccgcggcctcccactgggagagcccataatactgagtctgtccgcttgccataaaaaatccctcctgtcctgactgggcccggcagatccggacccgctcaaaaccggagggaaaagctgttttgtgagacgtttcaatacaaattatggaagcaaagcggaactgcgcccatttctgccccacctgtgcggaagccccggtattgagagaggcggcccgatggcggcagcgcgccttctccttctccctgcggctcccatttcacccgtgcagggcggactcctgtcccatggcggtgaagaaggggacgccgagatggctgtaaaaggccagatagatgatgatatccctgggcgcgtggatgtcaccgatctcagcgccgatgtacttgatcaccgatccggatgtcccagcactggttggacagacgcccaatgcttttcgagatggtttttactgaagacttattataccttaagacctcatcatgcagtctacatcatacgcaaagtaccagactgtaagtaaacgagagcttcatctccggctttcctccaagcatctcttgtaccaaatataaaaataccggctgtcctggtaaagctcagggcagccggtatttttttaatgcgcagtgccagaccgttcccggcaggcctccgtacaaaaactcagcggaaaatttctggactaatctccgaagcggctttctacatctgcccacaggctgcaatgagagacttatcatcaaaactcatgaccttatgagaggcaggaggccaagcctgtttcatcaccgctcataggcggcaattcgatctatctttggctgagatgcgcacccgggaataaactcggaggagagaaaggtctcggccagtctttccatcagccggattccaatggtaaaggcaccaaagcaggcaatatttgcgttgttgctcttcctggcacgctcggcggagtacacgtcggtgatcagcgcggcataggcgccttttactttatttgccgcaatagacacaccaagccccgtaccacaaatcagaattccgcggtcatactcttttctggaaacagcttcggcaacttttattgcaacatttgcataaatcggatcatcgctcccaaagtcagtaagcaaaaatcctttttgccccaagtattgcatcagggcggctttcgcagacgccgcatttgggtcacagccaaccgcaattttcagcatcgccatattcctttcctgtatgtcagttctccagtacggacttcattccatctgccatggcctgcaggagaatgcagcaggaggtggctccggcgtccagcacaccgcgggaacgctctcccagccgtgccgccctcccatacttcgccgtcaggcctttcgtagactgctttccctgctccgcgacctgcttcatctcctccaatgctgcagaaaaatccgtttggacatttgctgcttcacggacatattggcagacaggataaagcgtatcgacgagagtcttgtcaccgggacgggcgtcaacaatctcataaagcccatccaggccggagcggagcatttcactgaatgtttccagcgtaatatcctcaacatcttctatgacagaggacatttccatgaaaatggtgccgtatatcggccccatggacccgccgattttattcagcagaacagatcccagatcgaacagtccgtctgaaagcgaagtgtcttgatcccccagctgttcttcgtacaaggtaaatcccttgttcatgttcatgccgtggtcgccgtcgccgattagtccgtccacatctcccagcagctgcttgttttgctgtatagcgtggaccattgccaataaaataccacgaccgtttttgttttttaccaccgacatttctgttccctcaattctgtttgaaacccatcgtccaggcatccatatccatcaattctttcagctcctcatccagcttcataacagtcaccgtagctcccatcatgtccagtgaggtaaagaaattcccagcataatggcgatagatccgaatccccttctcctccaggatggattcgatctcatgatagaggacatagacctccatcaaaggtgtagcccctaagccggacaccagtacggcaacctcgtccccactctggaagggataatcaggcagcacgatgtcgagcatgcgcttggccatctgcttcgcgctttcgatcggacaaacttcaatgcccggttccccatggtgcccgatcccgacctccatggtgccctctttgatctcgaaattcggatgccccactgcgggaagagtacatggggtcaggccgatcccaacgcttctgcagtggtcgatcgccttctgtgccgcggagatgacctcatctaatgtaccgccctttgccgccttagctcctgcgcatttccacataaaaatctcgcccgcaacgccacggcgcttttcccgctgatcttttggcgcagatgccacatcatcgtttgcgaccacagtctttacggtcagcccttcacgtttggccatcttgaccgccatttttacattcatgttgtcgccggagtagtttccgtacaggcaggcgataccccggccgccgtcagcggcgcggaaagcctccaggaaagccagcgctgccggggaggaacatatctcccccaccgcagcagcatcacacatattttttccgacataaccgataaaggccggtttatgcccagagccgccccccgtaacgatcccaaccttatccgcgatgggcgcatccactgcagctacaacgcctcttggattttcttctccggttttgaccaattttacgatatcactatggcattttacgaagccggcaagcatttcatcaacaatatcgtccggattgttcatgattcgttgcataatttatcctccccttgtgttcaatcatcagcagaaagtctgtcccccgtgcacagtcattgccccgcggcaaaaatcgcagcagattacatcttcaccatagaatcaagcgcctcttgcacccagcggacacgggcatgatccacggtttccagcaatgagcagtccgcggctacaatcaatccgtcggcccccgcctcccggacgatctcctttgtgtgctctataacggccttacgatctgccagatagatcgggctgccttctttgttattgaaaccgcccatgaccgcctttttctttgtgaaatatttgcgtccatcctgcagggataatttatcggtatggacatcccaatgcattgccgcacagggaaagtccttccaattttccagcctattgggcactccccaatatccgcacagatgaatgatgttatacggagagagacgatttgcctcctgcaccagtgacaggtcatagggccggagcagttcatgatagcacgctccggtaaagccgttcaaatcattattctgcatcggcagaaacatgccggtcacaccagcgtctgagatcagccggtgcataaactccattttgaactcgttcaccctggttatcgcctcaaacagggcgggctcgcgccgttccaaatggtcatagaccagttcatcgctcgtagaactcctcagtgtggacaccggattgaaaacattgtaaaaaacagccgtttcatcctgaattgcttcccgaagccgcttgatatgggtaagctgatcctgtacaaacggatcatccatactcggcagcgcaatgtgcctccagtcacatgggcgctggacattcaggtcgggaagagctacaaagccatcacacatcatttttataaagtcttcgccagtctcccgataaaaacggacatgtgaatccacaaagttttccttttccatatcggcccccacaaagtggtgccagaacaccataggcggacggtccaccggcaaaccctgcaatgcccgaagggtccgttccttacggtccattttctctacctccttgtatcagaccagcaccgtttgtgagctgtccctgcggaaacagcatagagattgggaatgactgtacctgccggagcgggatatctgcgcttccgacaggcacagccaaaggatcacacacaagagctatgttgtgaatccttctgtgcttccgacggacaatacataggatttgtgggactgaccttgcagacctttctcttccacactttcaggaaaaagatagaagcgacccagaggagaccgtaaaccacaaccacgcccaggtaagaccattccgcaccggtcgacaacagtacaggtcccaaggaaagcgcggtaatttccaccacatgttcaaagggagtcaagatcgcagtatcgctcagagcggtgctccggttattcggatcgactacgcgcagcagacagaagcccgtagcaaacgtgcccgtggcataaccccagttgaacaatccgcgttcaaaccaatccttgccgatcagatgggggccgcagaaccagaaccacactaccatccagacagtaaaggccagcatcagcagcaggaagggggccgcatatttgatgatgacgtccacctggaccatcgccaggctgaataccaccacatagtcagagatcagattgccgaatccgttgatcaccttagggtccaccgagtcgttgaccttcgtcgcctggaaaacatagtacaaaatcaaggacacaaaaaatgcgatcgaaaattcagggagctcgatccccagcgctttgctgccgtaaatcgtaatgatatgtgccagcccggtggggatcatgataagggccaagtgccacgccaagggctccaacgtaatggaggcgatcgtctcctcaccaatggagccgcgcttgcccttggggataattccggtaaggagctcccggctgatcgtatctgtattctcgatataagatgtatatcccctttttgtcgccagcttggtcatgataatgccgccgatcagccccaaaagcatgccgtaggcagccgctgtgatacccagtccagtaaaatcagagaatccatacttatccagcacctggccggccgcaatggctgggccggtaccgccaaggaaggagacggggatcagccacccaaatgcaggatgcaggtcaccgccggtatgcagacgggagagaagaagtatggaaaggatcatgggaacggaaaactgtacagcccagttgatctggcgatagacacagtaaccggcaatatccttggcccgttttttcccttcgccctttttgatccccagtccctggaggccaatggtggcaaaaaggactgtgatcagtgcaccggcatagtccccgcacagactggtcaggggaacgatcttcaggccataaggtccaactacccaggcaataaaaccagcgatcaggctgaccgggataaagaagttctggagtattttaacatgctcacgaatgatctttgccacgaagagaataacggatacccaaaagaagtccataattactgagtaaaaatccacagtagtccctccctttcgatcaataattttttatagatccatcccttttctgtgtacttcaggccgagaagatgcggcactttcaatctctagtggctgggcagccggaagcggtcataccgcaggccggacaaatcggcggcaggcgcctctcccacagccatctgggccagcacatatcccgccgcagggccgatcccgaagccatgtccggtgaatgcacagcccacatagaggccctcgacctcttccaccggcgaaatgacaggggagccgtcccagcacatatccagctgtccgctccaggagcggattactttcacgcccttcaaagtgggcatatattccaggaaaaagcgtgcgatccgtggtgctgaaaaggagaatgtaacctccctcgggtaagtggcgtcatatatctcgtagttgctgtcgccgccgatcacccaagttccgttgcgctgctgctgggcatagaagcagccatccgcggcggagataaacttgtcggtcacggctggaatgggctctgtgacgaacgcctcggtcagctgaggcagcatagggacatccagccccacggtgcgcatgatctttctggagccaaatcccgcacacaggatgacgctgtctgcctcatagatcccgtcgtctgtatgtaccctgcggatccttccagccaccttttccagcttgaggaccttgatattggtgataaactgtgcgcccaattcccttgcccgcttatacagagcaagggtggtgcgcatcgggtttgcatgaccgtctgtgggacaataggtggcatattggacctccggcgatacatcagggatcaactcccggatatcctggccgtagaccatccttacatccagccccaaggagctgttctgccgcaccagctcttccagcgcctcccgatccttctctgttttaccaaggcgcatattgccgttctggatatactcaatatcctctcccagttcttcacccagagtgggccagatatgttttaccccaaacatggccaaaggaagctcacggttgtcacgtccagactgtctggctccgctgccattgcgcccggatgcgccgcaggcaacttccctgcgctccagaactgttacctttacccctcgctttgccagataataggcggcggcgcatccgacgacgccggctccaatgacaatgacatcactggccttattcatctctgccacctcccagaaattttggataaaatgtatcgtttccatagacacccatggggaccggacgcacaggcgaccgggcagtgatcacatccgtttcggtgggagaaatgcccagttcctgtgcaatgatggcccgaacggtcttgttgcagctctgtccctggcacaaccccatgccggcccgaaggaagcgcttgacttcattcatcgtgtacatgccggcgtggaccgcccggcgaatttcgcctcttgtgatctcttcacagcggcaaataacgacatcatcatcgggacgaggctcaaattctcccagatgataggtctcatcagaaatggaactcatagaattattttccctcctcaaatgcgtttccggtatcatctggcgcttccgctttccctggcaaaaaatcgtgcctttcctgtcatgttggccggcaccttcatcgtcaagatcggggtgcggtcatagggagccgtaattttcacatccactatctcggccggacagaccggcttgccgcttcggtccaatgcggtgcccttttctccctttgccggcagcgggcggaattcgtaaggcagcgaaacggccccgtatcctggctccaagtcctcgtttacaaggaaaatagcttggccgggacatgcactgacacacaggccgcaattgatacattcaacttccggatgcacaacaggcaggttcgtgatccggtcgcccaccgtgatacaacgcttggggcaaacatcctggcatgggttgcacgggatattctgtgtacactctacgaccggatggaagccgctccccccggcctcgcagcccgggaagtttgagatctcatcttcctctaaataccccttagccagcaggctggccgacagagggatcccttcgtcagtcgccgtgatcttggggttccccttattggcccctgcaaacattccctgacgcagctgatccagcgaggattggtataatgtgtaaagcctgtcgtgctcctcctggctgatgtagccggcccggagggcagcggcagccccggcgatgcgcccggaaatcatggccgagctggcctcctcgatacccgtcacatctcctgcggcaaaaatgccggaaacactggtctctccaaattgattcactacaggatgaacgccgcctttttgggggtcatctgacaatcggcatccagctgtcatggccagctgatacatcggagacaggcctaccgccacacagatggtgtctacatcaaactccttttctgttccagggaccggcttccacgtcttgtcgacctgcgcgatcactgcttttctgacgtggtcctctccttcggcacgcagaatggtatgtccgaggtagaacgggacgccggtgcgggctaattttgccgcgtggacgccgtatccgccgacccgaggcgccgcatcgaccacagcaaccagttcacagcccgcctgcatcagctgcaggcccaccaccagtccaacatttccggaccccatcatcagcacacgcttgccaggcatgactccgtgaaggttcatctgtgtctgcgcggaaccagcccccatgactcccggcagtgtccagccagggaaagccaaggtgttttcggatgctcccgtggcgataataatgttatccgccttacaggtgtagacctcgtctcctttcataatggagatgtctttatggggaaaaattcccattactgcggcgtccagaacgaccttcgcgcccacttcctccgcctgctttaccagttgagcgccgatgtcgaccccgcggatgcgggccttatgctcctttgatccaaagaatttatggatctgcttaaacagctgaccaccgggcctggcattctcatcaaagacgatggtgtccagtccctttgaggccgcctcaatggcagcggacagtccggccggacctgcgccaatgaccacaagatcatatcgcttcattcatcttcctccttttttgtggagacgccgtactgagtctgaactttcattccttccttcagcgcagtcatgcaggtacggacattgggaactccgtccacaaccatgacgcaatcggtgcatcggccgatggagcagtacaggccgcggggcttatgcagcttggtggtatagcgatgtatctctacaccgttggatttcagcgccatggcaatgggctctccctcatatccctccatgggctttccgtcgtactcaaaggtcaccagccgtccctttgggaattcattaataattggatgttccgtcactctcatgaaaattccctcctcaatttcagcaggtccgatcactcgcccatgacttcgcagtcaatattcagcatactgcagatcgttttcaaatcttctatgtgatccccatatacggcatggcagtgattggcatcaaagtcctccaggaaaatgttgtggtcaaagggcagcttggcaaacacatggggccactccatggtcgtctcggccattttttcttccggaagtgtaacgaattccgcggggatcaaggtcatgcggtattttccttctttgcggttcagacgggcgattgtggcctttccaggatgggtcatgcagttcacatggcagccgcccccggcatatatgttaagcgccggatagagggacacttgcttgagattctccctgtaatcatcactggctcctgcatagtaggtggactgagagccgcagttgcagaaaaccatgacatcatggtctgcgtcatagtggcgcacatccataaaaatgaccggatcgtgggtcagcagcttcaggatctgcatggtaagggctgcgtcacagtccgcctcacaggcatataccaccggctccttcgggccgtcccaatcgtaagggtcgttgcagaacgcagcgctgatacactgagtgcaatagtgccggctcatctcatagtgacatttgaccccgacaaaatcatagtgatgctctcgtatgatctgctttatggcctcataatgccgaatttgaagctggagcttttcaggcgtaagctgccggccgtcataatgaatttttttcacatgctcttccagccaggccatggctttatccacctgttcctgagggatcgtctcgccaatgcgcagaatttcggattgatccaaatgctcaatatcgacgccgaattgtttctgccagtcctgcatactgaccactgcgctgtacatcccaaggctccgtccaccgatcagtccgtatttctgtccgttgagctgggtcacaacggctccgcacctggcatacgccagcagcttgttcaggaccgcgggttcgtggaagtctccggccacacgataatgctttatgccaagatggttgagtgcaccgccggccgcaagcattgcgaccatcccgggccaatcgggattcaaatttgcggcaaggacaaaggggcctttcccgtttcgggccgcaatggccgaaaaattggggaaggcgaacacgccataggagaatactgtaatatccacaccacggctgcgcagcagctcggcctgttctttggcatcccgctctgaggccacaagtttgtccgctacgatgacctctacctggccgctcccgcgcagcgcctcctctatgacatccacctgtttttgaacaatatccttgagttcctcatggacctctgggtcaccgtcagagaatccaataattccgacaataggttttctcaacataaccattacctccgtccgcctctatatttcaaatatgaaatgctattatcatatttgatttatttaattatattactgttatcctgtttgtcaataatttacgaaagatttttttgtatatttcaaaaattgatttttattacaaaatgaaggaggctatctttgttatgcctgttgacaaaaagagaccgcttatgtaacaataagaaatatacgtccaagttttaagcggaatttccatatagaattcggaatatgtaaggatgatagaaatggaaaatttagaaaatcctgtagtgcctgcggtaaatcgtgccttgaatattttggaatttgtagcaaaagccagggagccggtcagcattaagcaagtcgcacaaagtttggagctgccaaatacaacggcttttcgcatcgttaagcaattatccatacggggatatttggaagagtctgaatcccagcctggctgctatcatctggggcttcagcttctgacattatccaacggaatgacctatatcaataacctgcgacaggtctgccatgctgaactggaccatctggccattgagagccatcaggcggtccaaatgggaattttgaagggcaaccacgtcacctacatcgagcagatccttcctccaaacccagtgctgatttatactaccccttatgcagaattgcccctaaatatcagcgccgccggaaaagttctcgccgcattttcttcccaaagtaccttgccccagttattgagccaagtacagtttcaaaaaatgacttccaaaacgattgatgacgtgggcaaattcatcagctacttggatagagtgcgtcaaatgggctatgcagaggacaacgaggaattcgcacttggcatcggctgtctggcggcaccggtattcaatcatgagctgcgctgtgtagcagcgattggagtcacaggggggatccaggattattgcggcgaatcaagagagaccttggttgcgatgctgctccgcaccgctgatacaatttcacaaaagctgggaaggccgcaaaacagctgattgcgtatttccttgggaaaaagcgccgctacggcaattgtgcccagccatctgaaaaatgtttttaccaattttagaaaaaggaaatactggaaaatcagaagctctaaagaaaaaaaggacctgcatatcagcaggacctctttaggtgtacagttaaatttttacgaggataccgcagctgctttagaggtattctctggcagtaatttcttcgcccaattcttttcagctgatgcgagttttggagccccgctcaacagtcagatcagatactgatctgggacaaggccggttttcttggtcgtctcaatagggctgtcagcaattgtgcggttctgggcacagccctccgtgttggagaacagccagttttttcacctcactgcaaagagctttacactgcgctccgcccggttgttgctcgattcaaccgtccgtcctccagaaaacagatcagatatggccactgtttccgcaggcagtgcagtgccctgcccaatgccagcaaaatgtccatcaccggtctggagcgaaccatacgatgtttagtcgttttccggcaatacatccgctgatttctactcaatcccagacagaacattgctgaagcatgttggtgaggctgcttgttattgttttgatagctctgccccgttttcccggctatctttctccttctgcaatatcgtgtgttgctgcaaaaggagtgagcggtatggcaaaacgcagagccaacggggagggaaagctccgaaaacgggacggccgctgggagggccggtacaccaccgaacacgccccagggatggacaaagcgatttaccgagatgtgctggggcgcatccaggaggaaaacaaggtggaactgaaacaggtcattgagcaggagaaaactgtagattaagtaagcacgaagaagcgtacagtgagcgagtgaatgggtgtctggttcgagaactatgcccaaggtgagttctcccatcctcccattagacctgacggggatacatcaacgatgacatcagacaggtcaaatcagcagaagaaaaaagtgggggagtactctctgggggctccccagtcttaccagcggcttcatgtcccacaacggtgtgcttcacatactccgccgggtgctaatgctgctggaggtttgtaaggtccggttctataatctccatcgcacatttgtaactctgacactccagagcggggtggatatgaaaaccgcctctgggatattggggcgctactcagcggggtttactctggacacctacccctatgtcacgacagcagcccagaagacgacggagaaaattatcaacatactaaaaagctgaaatcagatatgagcccagcgaagagggccgtttggagagaaggcacagcggaggatcctgagcttgtaccgatgagggtcaaaatctggatcagttctcaatggccaaaaataaaccgccaaaaaagttgtaaaaatataaatcgctgaaatcatacgatttcagcgatttattggttgcggggacaggatttgaacctgcgacctccgggttatgagcccgacgagctaccagctgctctaccccgcgaaatcttggtgccggagaccggggtcgaaccggcacgggatcactcccacgggattttaagtcccgggcgtctgccaattccgccactccggcgcttttccgctctccgcttgaagcttatctagcttatcatgctatcgtaaaaatgtcaatagttttttgaggggcggcaaatattttttcagtctcttagcgttaaaaataaaaatgtctaccaaaagtctaccaaaaaagggcggcgggagcctggagtttcagggcctcgccgccccttctgttttcatgtgtctaccaaatgtctaccagggaaactttttaggcgtgatctcatggatttttccattaatcttcccctttttataaccaattcctcctgtgccagaagtgttgtacaggcatagtgggccgaaatgttctggaaaaggcccggtttgtcagaaaacagcg

SEQ ID NO: 13580 - DNA, 29530 bp, Unknown
  gut microbiota DNA sequence
cggcggaccggagcggaaggggctgttttctatggaaaaacacccctttttgaaaaaaagatccccatccaggcaaaaactgtccttgcgttttttggaagatgggtgtatgataatgcacgtaatgcagcgcggagcggcccgtccaaagggagggggccggagccgtgcggacaccgacggggcctttttcaaagcggaaaagaccggtcgggttttgttgtgcgtgggcacagttccgcggcaagttccattttattttatgcttttggggagggagagaaggcggctggacaagcccggtaaaaagggagtccccacccgccagacgaaaaagagaacaaatgtgatcccaagaatgcagtacagggaggttgaaatctgaatgagcaattttctcagacgttccgcgcagggcgcgggagtgccccacgagaaggggacttccaaccttgagacggtggcgatgcctctgccgtccaagatcgtcctgtccatgggacagcacatcggcgcccccgccgcccctgccgtcgccaagggcgaccaggtgtatgtgggcaccgtggtgggcaaggcagggggcttcgtctccgccgacatccactccggcgtttccggtacggtgaccgagatcaccaccattaccgcgcccaacggcgcggcccagcaggccgtggtcatcacccctgacggccagcagacggtggacccctccatcgcccccccgcaggtgacggatatgaagtccttcgtagacgcggtccgggccagcggtctggtgggcctgggcggcgccggcttccccacggcggtgaagctgtcccccaagaacctggacgagatcgacatgctggtcatcaacggcgcggagtgtgagccctatatcacctccgacaaccggtgcttcatcgaggacacccatcacgtcctcaacggcatcaagcaggtgatgaagtatctgaacatcgccaagtgcgtcatcggcatcgagggcaacaagcccgaggccatcgccaagatgaagtccgccatcgacgacccggccatcgaggtcaagaccctgccctgccggtacccccagggtgctgagaaggtgctcatcgagacctgcaccggccgggaggtgcccttccccgggctgccctccgacgtgggcgtcatcgtgatgaacgtcacctcggtggccttcgtctccaagtatctggagaccggtatgcccctgaccaccaagcgcctcaccgtggacggcgacatcgtcaagcagcccaagaacgtggaggtcatcatcggcacccccatccaggagctgctggacttctgcggaggcctcaccgccgagccggggaagatcctctacggcggccccatgatgggcacctgcgtggcggacctgtcccagcccatcctgaagaacaacaacgccatcctggccttctcccaggagcgggccaagctgcccaaggccagcaactgcatccagtgcggccgctgcgtcaacgcctgtcccctggggctggcggccaaggacatcgtggtggccttcaacaagggcaatgtggagctgctcaaccagctgcatgccgacctgtgcatgtcctgcggcacctgctcctttgtctgccccgccaagcggcctctgaccccctccattgccctggcgaagatcatgatgaagaatggaggtaagaagtgatggccaataaacttattgtcagcgccgcgccccatatcaccagcgcggacagcaccagcaagatcatgggccgcgtgtgcatcgccctgctgcccaccctgatcgcctctgtgctgatcttcggcttccaggccctgctgctcaccgccgtcaccgtggcggcctgtgtggtcttcgagtacgcctactgcaagctggtgggccgggacgtgaccatcagcgacctttccgccgtggtcaccggcctgctgctggccttcaacctgcccgccggtctgccggtgtggatgtccctggtgggcgcgttcatcgccatcgtgatcatcaagcagctcttcggcggcctgggctataactttgcaaacccggccatcgtgggccgcatcgccatggccctgggcttcaccggcgccatgaccagctatacatatcccgagaacggcatcgacgccctggcctccgccacccctctggcggtggaggagaccgcccagaacgcgggctcctatgtcaccctgctgctgggcaaccacggcggcgtgctgggtgagacttgcgccatcaccctgctgatcggcggtatctacctgatctggaccaaggtcatcagccccaccatcccggtgacctatctggccaccgtggcggtattcagcctgctgtgcggctatgaccccatctatcagctgctctccggcggcctgatcctgggcgccttcttcatggccaccgactatgtcacctctcccaccacggagaagggcaagctggtcttcggcatcggcctgggcgtcatcacctgcctgatccgcttcttcggcaccatgaacgagggcgtgtccttcgccatcctgctgatgaacctgctggtcccctacattgaagtgctgacccgccaggatctgctggggatctccaagcctaagaagaacaagggaggtgccgcgaaatgagcaattggaacaagatcggcaagcccatcgtggtcctgtgtctgatctgcgtcgtcatcaccggcgccttggccgccaccaacagcgccaccgcccccgtcatcaaggcggcggaggaggcggctgcccaggcggcccgcaccgagctgctgcctgaagccacgggcttcaccctggtggagggcgagttcgagggcgtcaccgagatctacaccgccgacaacggtgtgggcaccatcatcaccagcagcgacaagggatacagctccactgtggtggtcatggtggccttcgaccccgacggcaccatcaagcaggtgaagatccagagccagggcgagaccgccggcgtgggcactaagatcgagaacgagtccttctggagccagtacactggcctgcccgccgagaccatcaccctggaccagcaggtggaccggatcaccggcgccagcatctccagcagtgctgtgaatgacgccgtcaacttcgccatcgccgcgtacaacgcgatctcctgagaaaggcaggtgcgatagaaaatgagtaaaagattgagtgtactgaccaacggccttctgaaagagaatcccgttctgcgtctggtgctgggcacctgccccaccctggctgtctccaccatggcctccaacggcatcggcatgggtctggcggccaccttcgtgctgctgtgctccaacgtggtcatctccgccctgcggaaggtcatccccgaccaggtccgcatcccctgctacatcaccgtcattgccggcttcgtgtcggtggtccagatgctggtgaaggcctatgtccccagcctggacagcgccctgggcgtgtacctgcccctgatcgtggtcaactgcatcatcctgggccgcgctgagatgttcgcctccaagaacggcatcctggattccgctctggacggcatcggcatgggcatcggcttcaccatcaccctgaccatcatgggcaccatccgcgagatcctgggctccggcacctggatggccggcctggacggcctgttgcccttcctgcctgagggcttcaagatccaggtcatccccacctccgtggaccccttcaccctgatgaccagcgcccccggcggcttctttgtcttcggcgtcatgatggcggcggccacttggctgaccacccggcccaagaaggagaagaagcccgctgagaccgtggaaggagggaatgcgtaatggagctcgcactgaagctggccagcattttcttcaccatgatcctggtggacaactacgttctggccaagttcctgggcatctgccccttcctgggcgtgtccaaaaagctggacagcgccgtgggcatgtccctggccgtcaccttcgtcatggtcatggccaccgccgccacctggcccatctatacctacatcctctcacctgagtgggccgaggggacgagccgcgacctgggctatctccagaccatcgtgttcatcctgatcatcgccatcctggtgcagctgctggagaacgtgctgaagaagttcatccccgcgctgtacaaggcgctgggtgtgtatctgcccctgatcaccaccaactgcaccatcctgggcgtgaccatcctgaacatcgacaacggctatgatttcgcggagagcatcgtctgcgccgccggcgccggcatcggcttcctggtggccatggtcctgttctccggcgtgcgccgccgggtggaggaggccgtcacccccaagtgcttcgagggcctgcccatcaccctggtggctgcggctgtgacctccctgtccttcatgggcttcggcggcatcgtggaatccattttcggggcctgagcttaggaggggaggaaagagtatgaatccgattttactggcagtcctgatcgtcaccgtcatcggcctgatcggcgctgtcattctggtggctgcctctatctttatgtatgtcccggtggatgagcgtgtggaacagatcaccgggtgcctgcccggcgccaactgcggcgcctgtggctgcgccggctgcgccgactacgccaagaccatcgtggaggacggcaacgccgtcaacaagtgcgtccccggcggtgccaaggtggccggcgagatcgccgccatcatgggcgtggaggctggcgcctccgtccccatgaaggccgtggtggcctgttccggtacctgcgggaagaccggcaagcgctttgagtttgagggcctgcacagctgccaggcggtcaagggcctgtatggcggcgacggcgactgtaagttcggctgcctgggctacggcgactgcgtcagcgtctgtgccttcgacgccatccatgtggtggacggcgtggccctggtggaccgggagaaatgcaccggctgcggtgcctgtgccaaggcctgccccaacgccatcatcagcatcatcccggagcacaagcgcaagcctgtggtgctgtgccagaacaaggacaaaggcgctcagacccggaaggcctgttccgccggctgcatcggctgcatgaagtgcgccaaggcctgccccaagcaggccatcaccgtggaaaacaacctggcctatatcgaccaggagaagtgcgtgggctgcggcctgtgcgccaaggagtgcccggtgggcgtgatccacgtcccagcggcctacgcgcagcaggtcatgtcccccgcccaggaggaggcccccgcggccaacgcctgatcgtctgcgaggaaaaaagagagacgggactcccgtctctctttttctgctcaaaaggcggggatctcccccggataggcccgggcccgctccagaaggggcccccgggcccccatagtgaaggcgatgtcgctgctgcggatggcgagcagggccagaccaggcgtgagctggagctgctccatcagcccctgagggagggacagctccccctctggagagatggggagccagcagtaggaccgccccttataggccagtagcctggcgggcgggagggagccatcccccagcccggagcagtcggtgaggatatgccccagcttggaggggagcagcaggccacgccgggtcacacaaaatccaccggtgcttttgcttccggtgaacagtatgacctgtccctcctccgtgattcggtactcctccacggcttggggcggcaggcggagggaaccgttctcctggagcaccgagcgcccaaagacaaatttcccccctggattcaactgcggcactgaaaccacgtcctttctggtctgatgaatcgggcacatcatagcagaacggacccgatctgtcaatcagcctcacaaaagcgctgcctgcgcattgacaggggccgccgtatccggtacaataagaccgacaaagcgccagaaggtgcccggggcccggagagggccggccgggagaatagggaagcgggtgagaggcccgcgcgggaccgccgccgtatgggtgagcgccggttcatcagccactgtggggaggggccccatgggaaggcggaccggaggctgggaacccgagccggaagacctgcctgctggaggatactgccgagagagggcagacactcccgggtggtcggaccaatcatctggggagaatttggcgcggccggaaaggctgggaccgtgctttgttgtctcacacctcttttcagaatgtctggagagaggtgtttttcgtgccgcggaaaaaaggaaggaaaaacagatgaaaaccccaaagaagtcccttgcagccctgctggccatgaccctgaccgtgggtctgactgcgtgctccggcgaaacggacagccagagcgcccagtccgcctccagccagccggcccagtccgcctccagcagccacacccaggaggagagcggcttccccttcactctgaccaccaaggacggccaggaggtgaccttcacccacgtccccgagactatcatctcctgcaaccccaacgccggcgacgagctgatggccctgggcctgggggacaagatcattgccaccgcctacaacaacacccaggtcaatccccagtggcgggaggagtatgaggccattcccaccgtggcggagagctacatctccctggagaccatcctctccctggagcccgacttcgtctacggccgctccagctctttcagcgagaagaacaacaccacccacgacaccctcagcggctacggcatcatgtccctgtcctccatcgaaggctacaccgtgggggccgacgtggacgtggtctaccaggacttctatgatctgggccgcatcttccaggtggaggaccgggcggaggagatcgtcagcgccatgaaggagcagatcgccgccgtggaggaggcggtcgccggggccgagccggtgaaggtctttgtctacgacatggcccaggaggggggcgcctacacctgcggggataacttcaccgccaagctgatctcccacgccgggggcgtcaatatttttgaggacatggacaccacctgggccaccgtcagctgggaagaggtggtggaacgggccccggaggtcatcgtcatcaacgactacggcagcacctccctggaggagaagatcgaggagctgaaggaaaatcctgctctggcggacgtgcctgccattcgggacggccgcatcacctcggtgaccctgtgcgagtccttcgcctcctccatgacgggggacaccatcgaaaaatttgcccggtccttccacccggactgcttccagtgagcgcggcgggatgaaaaggctgtgccgtgcggtccgggcgcataccgggctggcctgtctggccctgctggcggtcctgatgctctccgtggtgctgggcatcagcctggggccggtgaccattccctttccggaggtgtggcgggtgatgctccaccgtctgcttacccccctgggcctgggggactggatcagcctggagggcatccgggacagcacacagaatatcgtctggcacctccgcgccccccgggtgctgctggggatgctggtgggggccgccctcaccctgtccggggtggggatgcaggctttcacccgaaatcccctggcggaaccctacgtgctgggcatctcctccggggcctccctgggggccgtgctggccatgctggtgggggtgtggctgcccatggggcggctctccgtccccgccggcgcctttgtgggggcgctggtgtccatcctgctggtgtacggcctgtcccgctccggcggcgccgtcacccccgtccggctgatcctggtgggggtggcggtctccgccatgtttcaggcctttaccaattatctcgtctatactgccccggatgacgccgcggtgcgggaggccaccttctggatgctgggcgggctgggcagcgccaaatgggaggacctgcccctgctggccctgatccttccgcccctgttcctggtgctgatggccctggcccgtcccctgaacgccatgctcatgggggacagctccgccgtcaccctgggggtggatctggaccgggtgcggggagtgctcatcctgtcctccgccctgctcactgcctccgctgtggcggtgagcggctgcattggcttcgtggggctggtcatcccccatctggtccggtctgtggtgggggcggaccaccgccgcctgatccccctgtccgccctgtgcggggccgtctttatgatctggatggacgtgggggcccggctggccgtccggccggaggagatcccggtgggcatcatcaccgccttcatcggggcccccttgtttttatggatgatccgggtgcggcgctatgaattttgaagaaaaggaggggagcgccatgctctctgcggaggggatctcctatgggacccgggacagggagatcttgtacgagatcagcctgcgggcggaggcgggggagttcgtgggcatcatcgggcccaatgggagcggaaagtccactctgctgaagaacctctacaaagtgctccgccccagggcggggcgggcattccttatgggggaggacctgctggccatgagcggccgggagatggcccagcggctggccgtggtggtccaggagcacgagagcggcttcgactttacggtggaggaggtggtccgcatggggcggcacgcccggaagggactgctggaggccgacaatgggcaggaccggtcgctggtggaccgggtgctccgcctcacccagctggaggaggtgcgggagcagagctacaccaccctgtccggcggggagaagcagcgggtactcatcgcccgggccctggtccaggacaccccctgcctgatcctggacgagcccaccaaccatctggacatcaaatatcagctccagctgatggagctggtgcgggtcctgggccggacggtggtggcggccatccacgacctgaatctggcggccctgtactgccagcggctctatgtgatgaaggctggccgcgtggccgcctcgggcacaccggaggaggtgctgaccccggagctcctccgggagatctatgaggtggaggcggaggtggcgcgggacagccggggctgcctgcgcatcttttttcagcccatccgaaacgaaggggaggaatcgatatgagagaagccattctggccgtcagcttcggcagcacggtggaccaggcccggagccgggacctggagggggtggagcaggcgctgtccgccgccgccccggagctgcccctcttccgggcctacaccagcggtctggtccgggcgcggctgggggaccgggggatcgcggtcccggatgtggccggtgccctggagcagatggcggcggaggggatagagtgcgccctgatcgtgcccacccatttgctcccgggcgcggaatatgataaaataagggaaaccgccgcccggtgggagggccgctttcccgcgctgaggctctcccgccccctgctggggacgccggaggacctgcgggagctgggcggggcgctgatggacctgatccccccggcagagggggcccagaccctgttcatgggccacgggacccacagatccgccgacctggtctacccggccctccagggcatcttccatctggccgggcgggacgacctggtggtggccacggtggagggccggcccagggtggaggaggtgctgccgctggtcaccgcccccgccgtggagctggtgccgctgatgctggtggccggggatcacgccctccacgacatggcgggggaggggccggacagctggaaaaggctcctccagagccgggggcataccgtgtcctgccggctcaccggactgggggccctgccccaggtacaggccctctatgtccgccgcctggaggagcttcgggccgggtcctgagagaagagacatgccgcgggaaaggagctgccgatgccggagcactacatcactgcgggcgggaagcgcctgcgctgcggacgcaccaccgggacctgcgccgccatggcggcggcgggggcggtgcggctgctcctcacagggcgggccccggacctgatctccctgaacacccccagagactggatggtggaggcccccctgctggactgcgtcgcagacggagagaccgccgcctgctccgtggagaaggacgggggagatgacgtggacgccacccacgggctgcccatccgggccacggtccgccgcagggcggagggggggacggccatcctgggggggctcggggtgggccgggtcacccggccggggctggaccagccggtgggggaggcggccatcaactcggtgccccggaggatgatcgcccgggcggcggaggaagaggcggcggccctgggctacgccgggggactggagatcaccatctccgtccctgggggggaggaggccgcccgccggaccttcaatcctcagctgggggtggaggggggcatctccatcctgggcacctccggcatcgtggagcccatgagcgcccaggccctggtggagaccatcgccctggagctgcgccagacggcggcggaggggacggaccgggtggtgctgaccccaggcaactatggggccgattttttggcggagagcggcctgatcacttctgatatcaggatagtaaagtgttctaactttatcggtgaggccctggaccgcgccgcggaggcggggatcaggcagctgatcctggtgggccatctgggcaagctggtgaaggtggcggggggcgtgatgaacacccactcccgctgggcggactgccgcatggagatcctgtgcgcccacgcggccctgtgcggggccggccaggagactgcccgggccctgatgggcagcgccaccaccgacgccggactggacatcctggcggaggccggcctgctggaccggaccatggacagcctgctgtccgccctccaggcacacctggagcggcgggcggggacgtcctgccgctgcggcggcgtactgttcaccaatacccggggcctgctggggatgaccgggactgcaaaggagatcttgaacatatggagagcgaaagaggaacattttacgccgtaggggtgggacccggggacccggaactgatgacccggaaggcggtgcgggtgctggaggagtgtcccgtcctggctgtcccccgcacgccggcgggggactccctggccttggagatcgcccaggcaggtgcggatctgactgacaaggagatacactttatagactttgccatgtcccgggatgaggagaaacgccgccaggcccaccggcgagcggcggaggcggtgcgcgccctgctggaccgggggacagacgtggccatgccggtgctgggggacgtgtctctcttcgccagcagcgcctatgtggcccagctgctggaggaggagggctgccgctgtgtcagggtcccgggggtccccagcttctgcgccgccgcggcccggctgggccggagcctgacggagatggacctgccggtccacatcgtcccggcggggggcttccccctggaggaggccctggacctgccggggacaaaggtgctgatgaagtccggacgggccctgccccaggtgctggaggcgctggagagccggggcctgctggagagctcggccatggtgcagaactgcggcctgccgggggagcaggcggcagagagcctgaaggacgctccccagtccggcagctacttcaccacccttctggtgccgtgacatgggcgtgtccggtctgctcctgctgttccccttcctgctgctccgatttgggctcctgggccggctgggaagggacggactgggccgcgccgcccacattccccccatggggggcagggaacggctggcctattgggtctatcagctctcctccgccggggtgctggtgtgtctctgcgcacagcgggcggaggtggacggcgcctggcccttttgggcgggacttgtcctgtaccttttggggctggccctgtgcgcgggggcggtggtgagtttcggaaggccctccccgggccctttccgggaggacggcctctaccggttctcccgcaaccccatgtatgtgtcctatttcgtgtattttgcggggtgcgtcctgctgacccgctcccggctcctggccgccctggtcctgctgttccagctctcggagcactggatcatcctggcggaggagcggtggtgcagggagcagttcggcgcaccctacgaggcgtatcggaagcgggtcaggcggtatctctgatccgtgtgggaaggaggctttttccatggtccattttgtaggggccgggccgggtgcgcccgacctgatcaccctgcggggagcggagctgcttcggggggcggactgcgtcatctatgcgggcagcctggtcaacccggcccttctggggctgtgcagggacagcgcgcggatctatgacagtgcccgcatgacgctggagcaggtgctggaggcggtggagcgcgcagaggcggcggggcaggagacggtacgcctccacaccggcgacccctgtctgtacggtgcggtgcgggagcagatggacgccctggaccggcggggcatcccctgggacgtgaccccgggggtgtcctccttctgcggggcagcggcggccctgggggcggagtacaccctgcccggggtgagccagaccgttatcatcacccgcatggcgggccggacccccgtgccgcagggggaggagatcgcctccctggcccggcacggggccaccatggtcatcttcctctccgccgggatgctggaggcactgtctgcccggctgatggaggggggataccggtcagatgctccagctgccctggtgtataaggcgacttggccggaggagaaggtagtgcgctgcacagtgggagaactggcccaggccgggcgggaccaccagatctccaggaccgcgctggtggtggtgggggacatcctggccggaccctatgaccgcagccagctctaccaccccgggttttccaccggctatcgggaggcgtcccaatgactgtggagcttatttcctttacagagaatggtgggaggctggccgccgcgctggcggccggcctggagcggagcgggcaccgcgccgcctgtacccggaagggcgagcgggcggaggagtggaccgccgccgccttccgccgcgcggaggccctgatctttgtgggggcagccgggatcgcggtccggtcggtggccccccatctggtgagtaaggcccgggaccccgccgtggtggtggtggacgagctggggcggttcgctgtccccatcctctccggccacctggggggcgccaacgacctggcccgggagatcgccgggctgctgggcgggcaggcggtcctcactaccgctaccgatgcgcgggggatctttgcctttgaccagtgggcccgccgcctgggctgcgccatccccgacccggagaagatccgccccgtggcctcccggatgctggcgggggggacagcggccttctggtcccagtggccggtggcaggggagtgcccctcgggagtggtcccggcggggcaggaggcggcccaggtccagctcaccatccgggacacgccggagcccgccctgaagctggtgcccaggatcgtctgggccgggatagggtgccggcggggcgtcccggcggaacggctggaggcggccctccgctccgggctggaggcggcggggctccatccagccgcgctggcgggggtgtgcaccatcgaccgcaagggggaggagcccggcctgctggagctgtgccgccggcgccggctgcctctgctcacctattccccggaggagctgagccgggcggagggggagtttaccccctcccccttcgtccgtcaggtcaccgggacggacaacgtatgcgagcgggcggcggtgctggccagcggcggcccgctgctgctgaaaaagacagcgggggagggggtgacggcggcgctggccgccgccccctttgccccgggatgggaggaagcgccatgaatgtgctgtatgtggtgggcctgggtccgggcggctccaggtggatgacctgggaggccagggctgccctggagcaggccgaggtgctgtgcggctacacagtctatctggatctgatccggggggagttcccggataaggagtgcttctccacccccatgacccaagaaattgagcgctgtcgggcggcgctggagcgggcccggtccggccggaccaccgccctggtgtgcagcggagacgcgggggtgtacggcatggcggggccggtgctggagctggccccccacttcccggaggtggagatccaggtggtgcccggtgtgacggctgccctggcgggggcggcggtgctgggggcccctttgatgcacgacttcgcggtgctctctctgtccgacctgctcaccccctgggaggtcatccgccgccgcctggagctggcggctcagggggactttgtcctctgcctctacaacccctccagccggcggcggcgggaccatttgcgcatggcctgtgacatcgtgctggcccaccgggggccggagacggtgtgcggctgggtccggaacgcgggacgtgcccaggaggagcaccaggtgctcaccctgggggagctgcgggaggcccaggtggatatgttcaccaccgtattcatcggctccgctgccacccgccggatcggagaccggatggtgaccccccgggggtatgagctgtgagggtgctgatcttcggcggcaccactgaggggcgccggctggcccgggccctgtcggccatgggccaccaggtctgggtcagcgtggccacccccctgggggcggaggagctggccggcctggaggatgtgtccgtcctggtggggcgcagatccgggggggagatggatgctctgctctcccggggcttccaccgctgtgtggacgccacccacccctatgctgtccaggccacccgggagatcggggcggcctgtgcccgggccggcgtccccctgcgccgcctgctccggcccgaaggcggggaggaggggctgcgggtggacagcccggaggaggccgcccggctgctggcggggcgggaggggaacatcctgctggccactggggccaaggagctcccggcctttgccgccctggagcccgcccgcctctttcccagggtgctgccctcggaggagagcgtggccgcctgccgccgggcgggcatcccctcccggaacatcatcgccctctacggacccttcacccagcgcctgaatgaggcgctgatggagcagtatcacatccgcttcctggtgaccaaggacgggggagaggcgggcggcttccgggagaaggccgccgccgccctggctgcgggggtggagctggtggtcatccgccgcccccgggaccggggcgagggcctggaggacattctggcctggttccaggccgataaggaggaagcagaatggaagtgacgctgatcgggatgggactgggcgaccccaccaccctcaccgcccaggcggtcagggctctggagggggcggacggcctgatcggggcccgccgtctggtggaggggctgaatctgggacgtgaggtgccccggtatcccgccaccaaggggacggagatcctggagatcctgcgccggagcggcctggagcgcccctgcgtgctgtacagcggggataccgggttctactccggggcccgctccctgaccgccctgctggagaaggaaggcatccccttccgggtgctgcccggcctgtccagcgtccagtatctggccgccaggctggggcggccctggcaggactggaagctggtctccgcccacgggacccggtgcgacccggtggccgccgtgctggaggggcgggaggcgtttttcctcaccggcggcgagctggggccgggggagctgtgccaggccctgcgggatgccgggctgggccacctccgggcagtggtgggtgaggagctgtcctacccggcggagcggatcacccaggggacggcggcggagtttgcccaggggaccttcgcccccctcagcgtcctgctggtggagggggcggagcgccccagggcggcggtctcctccgggatcccggacgaggacttcctgcgggatgaggtccccatgaccaagcgggaggtccgggccgcggccctctccctgctggaggtggaggaggacgacgtgctctgggacgtgggggcgggcacgggctcggtctcggtggagctggccctcctggcccggcgggggcgggtgtacgccgtggagcggaagggggaggccctctccctgatctgcgccaaccggacgcgcttcggcgcctggaacctggtaccggtccgggggaccgcgcccgccgcgctggaggacctgcccgccccggacggcgtctttgtggggggcagcggcggggagctggacgccatcctggccgcggccctggggaaaaatccccgggtccgcctgtgcgtcagcgccatcgccctggagaccctgtccgctgctgcggcggcctttgccgcccgggggctggaggcccaggtgacccagatctgggcggcccggtccaagggggccggtgggctgaacctgatgatggggcagaatccggtgtggctcatctcaggccgccggagggaggaggaggcatgagagagctggaacacagccgccccgctgacattgaggcggagagcttccgcatcatcggggcggagctggaggagcgggggatcgtcctgcctgcggatcaggcgccgctggtgaagcgggccatccataccacggcggactttgactacgcccgtaatctggtgttcacccccggggcggtggaggccggggtccgagccctccgggccggcacccccatcctgacggacaccaacatggcccggtccggcatcaaccggggggcgctggagcggctgggcatcagcgtccactgcttcatggcggacccggaggtggcccgccgggcggcagaggccgggaccacccgggcggcggcagcggtggaccagggggcggccctctggcccgaggggatctatgccgtgggcaacgcccctaccgcgctgatccgcatggcccagctgatccgtgccggagcgatgtccccggccctgatcctggcggtgccggtggggttcgtcaatgtggtggagagcaaggaggagatcctggccctggcccgggagcgggggatacccgccatcgcggctctgggccggaagggggggagcacggtggccgccgccctgtgcaacgccctgctgtatcagtcgggaggacgggagaaattatgagacgaggaaaggaccggctcatcggggccgccctctgcctgctcctgctctttggggcggggtgttccccggccccgggagcggaccaggagacgttggaccgggagctggacgtgcagctgggcctgctggcggaggtcatcacccaggaggagcggagcgcggccatggacctgtggatgcggctccgaccggtgcgccaggcccggctggaccggggcgagtatcggcggggggaccgggagcaggagctgctggaggaactgaacgggctctatgaggcatacaccatccggtatctggggggagacgacctgggctggggctacacggacccggaggaacacgtcctggcccgctaccggatcggcggggcgggggagctcaccctcatgcccaactccctggacctgacccacgggccctggaccagggaggacctggaggagatgtgggagtcgatgcaggccgtcctccccaaggacgcctttcgggactttcggagctatgtgccctttacggacggcgagggggagacggtggcctatgtgctgcccgccgaccccggggggagccagtgggagatctgcctggacccggcggacatgggggaccgggactattttctggagaccgtgctccacgagtactgccactacctcaccctgaaccaccgtcaggcggactatcggggggagcccacagtggagacctactgcgaggccggaatggtcagccgggaggggtcctatctggacgacttctgccagcggttctggaccggctacctggatgaccggctggcggatctggacagctataacttcttcctgcggcatgaggaggatttcgtcagcagctacgcctccaccgacccgtcggaggacatcagcgagagcttcgccttcttcgtgctgtgggacgtgccggagtcggaggcggtgtgggcggagaagctgcggtttttcctggactacccggagctgacggagttccgccgccaggtgcgggagaacctggggctggagcagccggagcaggcggcataaatgcaggatgcccggaggcacacgtgcctccgggcatattttatggggcggcgggagagatcaggcggggctgcggcggaacacgtggaggtcaaagcccacctgggtggtgagccgcttcagagcggacagggcctccaccccctcccggggagtcttccagcagtagggggtcatctggaacagggcccggatgtcctccgggcagtccagagtgatctcataccgcaccgggacgatgcgctgataggaaaagcctgtatagggggtttccttgacggggttttcgtagggctgggaatagaggacctgcttcatctcccagaggtgccgggcggaggggaccacatagaggaaggtgccgcccggccgcaggaccctggcgaactcctccgcggacaggggggagaacacattggtcagcaggtccgccgaggcgtccgccaggggcaggcggtaggcggaggccactgcgaattccccctccggaagccgcttggcggcccggcgcagggcgtatttggagatatcgatccccgctgcccggggccggtgtccggcccgctccagcgcccggaacatccccgctgtgtagtagccctccccacagccgctgtccagcaggacggggccctccaggtgggcggaagcctccaggaccagctcctccagggcctggcgcagcggggcgtagtagccgcgctccagaaaagcggcccgggcggccaccatctcccggtcgtcccccggcgccttggagtgcatccggttggggggcaggaggtggacgtaacccgccgccgcccgatcaaagctgtggcgggcgggacagatgcagcccctctcctcccgcgtcagagggctgccgcacagggggcagcggaacaaactgggcccgttcacagcagagcgcggatgtagtccagcccggccttggccgcgtcggcagggggattggcacggaactcaaagaccagatagtcctggaatccggtctccttcagggcctggatcaacagcggaaaatcaaagtgcctgccgtctggggccatgcggtccacatcggagatgtccacctgtccgatgaggtcgcccgccttcagcagcccttggtagaaatccgtctccccgttggtgtggagatggatggagtccacctggagccggagggcaggggagcggaaggagcggatgaactccgcggtctcggacagggagcagtaggcgtcggagtcgatgcggctgatggcctcgaaggccacctggatgtccagctgttccgcgcgggccaggatggactccatgctggagcggaacagaggctcataggcctcgcggccgccggcatcccgggtccagccccggatggcgcctacgatcagcttggcgccccccagctgggcacacagctccgcgtgggacagcatccggtccaccgcggcctggcgccgctcctggtccgccaggcccaggcccaggccgtctacggtgtagatccgtcccgtagccagtcccgatgcggtcaggccgtactctcccagcacgcggcggacataggcggcatccagctcgccggggcggttgaccgtcagggagagggcgtcatagcccagttccgccgcccggcgggcgcagtcctccaaaggccccatcaggggggcggtgttgctctcaaaggtgccgtctgcccagacggcgctggtcttcattcccataggtatctcctgttccgggggcaagtccccctgcatgtgtgatggtttattatagcaccggggccggccggggtcaattcccggccgggaaagagagcggctccgcgggagcggacagggcctgatgcccccatcgagccggacggcgggcgcacgatgtgcgcccctgcgcaaaagctgaagatatctcgcaggggcagcccccggagctgccctcaaagccttccccccctgggtggggaaggtgtcacggcggatgccgtgacggatgaggggggtgtcccctgccggtccaatcaacactccgctgagtccgatcaggggcggggcggctccccgcccctgtacaggaaacggaaaaccccgcctgcgtttcatacaggcggggctagcggcgggtcagcggggttcataggtcagctcggcgatcccgttgctgtgggcggcggagaccagacgcaggtcctgctggggcagcccgcgggaaaagagggggatgccctcccccaggatcacggggatcacagagaccacataccggtcgatggcgtttttccggatcagctgggcggccgtgtcggcgccgccgcagatccagatgtcccgcccggcgggctcccgcttcagctgttccaccaactggtgggccggaccgctgaaagcctggatcttctccgtctggggagggagggggcggtgggtgagcacatagcagtccaatccccggtagggccagctgccgggagagagctgggtgaccacctggtggtaggtggtccagcccatgaccacggtgtccactgtggagagaaaggcggggtaggtccccgggtccgggtcatcagggtcctggccggccagccaggagacatccccgtccgggcgggccaggcagccgtccaggctcatggagatgtagaggacggtgcggcgcatcacaggccctccatcatgttgacccggaggtatccctcgtccacgttgacctccgcgatgaactggtccaccgcggggatcatcagctcccgggcgccgccgcggactacatacacattgttggcgggcagggtgaggatgtccgcgatctgtcccagcaccgcgccgctggcggcgtcccggacctccattcccatcaggtcagccaggaaaaagctgccctccgggagctggacatccttccggtcgatgtacagcacggcgttgcgcatggccagagcactgttgacatcggtgacgccctgcagcttcaggatgaccatgtttttgtggacccgggcccgctccacctggatgggccagtgggagctgtccacatagagggtcttgaactggcagagaaagtccggggagtccgcccagggctgtacccgcacctcgcccataatgccgtggacgttggtgatctttccgacctccagatactgttctttcatggggattctcctttcctccggggtaagacaatggcgcaggatctccctgcgccataactgtctagtcgacgatctcgacggagacacgctgaccggtgcgctgggccacggagcggatcagggtgcggatctccttggcgatgcggccctgacggccgatcaccttccccatatcctccggagccacacggagctccagcacggtctcgccgtcgctctcatgctgggtgacagacacctgatcggggtggtccaccagattctgggcgacataggtcaaaagctctttcatttgcctgacagacctccagccttacagcgcgccggcctttttcagaagggagcggacggtgtcggtgggctgagcaccggtcttgatccaggcctgagcccgctcggcgtccaccttcagctcggcgggggtggtcagagggttgtaggtgccgatctcctcgatgaaacggccgtcacggggatagcgggaatccgccaccacgatacggtagaagggagccttcttcgcgcccatgcggcgcagtctgattttaaccatttatattcacctccaaaaatttcttgcgtatatggaaaacaccgaagtgtttgccagcgttcaaaattgggccagcagcccgaacaggagaaaggatgcccccagcaggcgggggaaccatagggcccgcgctctccactggatggagatgtttactgggaccaccgggtggagaacgaagccggcccccaccagaagaaaggccagacggcccacaatggggagatggagcagggctgacaggatggacgagataacgatgaccaggaagctggcaagcatctgatcgaaaaaggtccactttttcatggtccgtgctcctttccgccgtcggggagtcagaaggggaggccgggcatcttgccgcccagcatgcccttgccgccctttttgcccatcaggcggcgcatggacttgggcatcttgccgccggcgaactgcttggtcatggcctgcatcatctcgaactgcttcagcagccggttgatgtccaccacctgggtgccggacccggcggcgatgcgccgcttgcggctggagttgagcacattgggattttcccgctcatagggggtcatggaaaggatgatggcctccatccgccccagcagggactcgtccatggaggccccctccagatcggaggccttgacgccggggagcatcccggcgatctcggacagggagcccatattcttcagctgagccatctgctcatagaaatcggtcagcgtgaatttgtttttccgcagcttctcctggaactccagggccttctgcctgtcgaagttctgctccgccttctcgatgagggagagcatgtcgcccatgcccaggatacggctggccatccggtcagggtggaagacctcgatctggtccagcttttcccccacacccacgaacttgatgggcttgccggtgactgccttaatggagagggccgcgccgccccgggcgtctccgtccagcttggtgagcatgacgccgtcgatgtccagtgcgtcgtcaaaggccttggccgcgttcactgcgtcctggccgatcatggcgtccaccaccagcaggatctccgtgggctccacggcggccttgatgcgcttgagctcgtccatcagctcctcgtccacatggagccggccggcggtgtccaggaacaccatgtcgttgccgtgctgcctggcgtgctcgatggcggctctggcgatgtccaccgggtcggtctgacccatctggaacaccgggatgtccagctgtccgcccaccacctccagctgcttgatggcggcggggcggtagatatcgcaggcggccagcaggggccgcttgccgttctgacgcttcatcaggccggccagcttggcgctgttggtggtcttgcccgcaccctgaaggcccaccagcatcaccaccgtggggggcttggaggagatctccagcttggtgctggtgccgcccatcagggcggtaagctcctcgttgacgatcttgatgatcgtctgggcgggggagagggcctccagcacgtcggagcccacggcccgctcggtcacctgagcgatgaactgcttgaccaccttgtagctgacgtccgcctccagcagggccaggcggatctcccgcatagcctccttgacgtcggcctcggagagacggcccttgccccgcagctttttgaatgcggcggagagcttttcagaaagtccttcaaacgccatggttactccttttgaagcacctgggccagctcccggatctcccgggccgccgcctcaatgtctgggtcgtcatagctgccgttgcgctccaggatcttttccgcgtcctcagcgatctgctggagctgcttgtgcatggcgtggaaccgcttgatcaggccggtcttatcctccagatcggtgaggatggcctcggcccggacgatcacgtcccggacgccctggcgggtgatgccgctgttctccgcgatctcggagagtgaaagatcctcgttatagtagaggtcgtaaaactccttctgccgctcggtgagcacgtcgccgtaaaaatcgtacagcagggccatgcgataggcctgacttttcaaactgttccacctcctgttgagatgtcgtaaagctcaaaaactttacattcggaatcataccataacagagcccccttgtcaagtgaaaaatctgtacacttggcgggggtatattcccacggcaccggggcaaaatccataatgatcgcccaaaaaacggtatgatgattcaggaggagccgccatgtctgcttcgaacaccgcccatgttcccatggatgaaccccatctgtcccgatacggggccaacgccgcccgggcactggagctggagggagcggtccgcccggggactgtggcccgggagatgcggcgcgcgctggccgaggtggagcgcgcccggcaggagctggcccgctgggccgaggagagcgggcgcacgccgggagcggtggagtggctgctggacaacgcctatctggcggcgcgggaggggcggatggcggagcgggccttccgcaggggcaggcccctgcggcgctgccggaacggccagtctgtcctccagtgtgccgcccggacggcgctttgggcggtccccgacctggaccgccgccgcctgacggtctttctctccgcgttccagtccgtactgcccctcaccgaacgggagctgtccctgctggtccccgccctgacctgggcgctgctgtgtcagctgcgtggtctgtgcggggacctggcggcgctgcgggaggagcagacagggcccgccccctttgagtccgtctttgccgggctgcgggccctgtccgatggggactggggggcgctgctggagtcggagagccgggtggaggctgtcctgcgccaggacccggcggggtgttatggctccatggaggacgccacacgccggagataccggggacaggtgtgccgtctggcgagaaagagcggcatgggggaggaggagacggcccggcgggtcctggagctgtcccggcagggggcgggggcggagcgccacgtgggctggttcctcttccgccgcccgctgggggcggagaaaaggacacggtccggggcgtgctacggcccgctggtcctgctctctgccgccctgctctccgccgctctggctctgctgctggacagctgggtgggggggctgctgctctttttccccctgtccgatctggtgaaaaacagcgcggactttcttctggtccgtctggtgcccccgcgcccggtccaccgcatggcgctggagtccggcatcccgccggaggggaggaccctctgcgtcatcgcggccctgctgaccggaaaggagagcggccgtgagctggcagaaaagctggagcgctaccatctggccaaccgggacagcggcggagagctgcggctggggatgctggccgatctgcccgaccgggatgcccccatgggggcggaggggcggagctgggtccgggaggcccggaaggaggtggaccgcctgaaccggaagtacgggggcggcttctacctctttttccgggaaccccgttacagtgcccgggatgggcgctggatgggctgggaacggaagcggggcgcgctggtggagctggtgcggctgctgaaggaccgccccagcgggctggaggtgctctccggagaccggggggccctggcggacacccgctatgtcatcactctggacagcgataccagcctgaacgtgggcgcggcccgggagctggtgggggcaatgctccatcccctgaatcagccggaggtggaccgggagcgccgggtggtcacggaggggtacgccctgctccagcccagagtggcggtggagctggccgccgccaaccgctccctgttctcccgggtgtttgccgggctggggggagtggacccctatggcagcgcggccagcgacgtgtaccacgacctgtttgaccaggggacctatacgggaaagggcatcttccaggtggacgccttctatgcctgtctggaccgccgggtgccggaggggcgggtactgtcccatgacctgctggagggctcctacctccgggccggactgctgggggaggtggagctcacagacggatttccctatcaggtgcgttcctactacgcccgcctgaaccgctggatcaggggggactggcagctgctgccgtggctgctcccccgggtgccggacggcaggggagggcgtgagaaaaatcccctgcccccgctggcacggtggaagctgctggacaacctgcgccgctctctctcccccatctttaccctggcagccctggtgctggggatctgcgggagcggggcagctctggctgccgctggcggcgccgctatcctctctgccgcctccaatctgctcctgtccgggatggacctggccgcccggcggggcgggcgggcccggggacgctaccactccacggtggtggccggcctgcccggagccctgctccagaccgccctccagctgctgttcctgccctaccacgcctgggtgtccgcctgcgccgtgtgcaccgcgctgtggcggatgggggtgacaggccgggacctgctggcctgggtgacggcagaccagtcggagcggggcggcggcaacggtctgtggtcctattaccggcgggagtggttttcccccgccgtagggctggccacctttctgctggcggagctgcggatcggcagcctggcggggctgctgtggatggcggctcccgccgccgcctggtggatcagccggcccagtggaaagcgggcgggactggccccgggggaccgggccttcctgcttcaccaggccaccctgatctggcgctactttgccagcttcctccgggaggaggaccactggctcccgccggacaactggcaggagaagccggcggcggggctggcccgccggacctcccccaccaatatcgggctggccctgctctccgtgatggcggcggtggatctggacctgctgccccaggaccagggggcggggctgatccgccatgtcctgaacaccgtggaggggctggagaagtggcggggccacctctacaactggtatgacactgtctctgccaggcccatggccccccggtatatctccaccgtggacagcgggaacctgtgcggcagtctgatcgccctggcggcgggactggaggagtggggagagggggagctggccgcccgggcccgggcgctgtccggcgccatggaattccgccccctgtacgaccccgacggcaggctgtttttcatcggctgggaggcggagcgggaccgtcccacccccggccactatgacctgatggccagcgaggcccggcagaccagctacgtgaccgtggcccggggagaggtcccgccccggcactggcgccggctgagccggatgctgctgggggacaacgattacagcggcatggcctcctggaccgggaccatgtttgaatatttcatgcccaatctgctgctgccctgtgaggagaactccttgatgtacgagtcgctggccttctgcgtctatgcccagaagcgccggggggccaggacccacaccccctgggggatctcggaatcgggatttttcgcctttggcccggggatgacttatcagtacaaggcccacggcgttcaggccctgggtctgaagcgggggctggaccaggagctggtggtggcgccctatgcctccttcctcgccctccccatggcccccaaaagcgcggtgcgcaacctgcgccggctgtgcgccctggggctggaggggcggttcggcctctatgaggcggccgacttcaccccctcccgcctgtcagggggcagcagctttgagatcgtccgatcctatatggcccaccacctgggcatgagcctggtggccatcgacaacgccctgacggaggacgtgatgcagcggcgcttcctgtccgaccggaccatggccgcctaccgggagctgctccaggagcgggtcccggtgggagcgcctgtcatgcgccgccgggacggggcggcgccggagcgcccccgccgccgccaggggcccgatctgctgcggaccggagagggggcgggccgtctctcaccacgatgccacttggtgtccgaggggggatactgcgtctttgccgccgataacggacagacccgctccagcctggggcgggatgtcatcaccctggcggagccgggggagtaccaggcccctgccggggtgtcctggttcttctccggggcggagggggtgatcggcctgaccgccgcccccctgtaccgcggagactgccggtacagctgggagttctatgacggcggggccgtctggacctgtcagcggggcggcctgaccgcccgcaccggcctcgccctggcccggctgggcagcggggagctgcgccgggcggagctgcactgggacggagagggcgtgctggagggagagcttctgtgttatctggaacccgtgctgtgcggggagcgggatcacctggcccaccccgccttctccaagctgtttgtggagagccgcgccatccccggcggcgtctccttccgccgccgccccaggggagcggaggagcacccggtgctggcggccctgtgggacggggaggggagcacattcaccacctcacggcaggcggccctggggcggggcggcctgcgggcactggctggcggggggcccgggcccctgaagggggagacgggagcggtgctggacccgtgcctgatggtgcgcctgccggtgcgcctgcggccgggggagagctgcgccctgcgcctggcattgggggtctcggaccggctggatgccgccgccgacaccgcccagcggctgctggaggggcgggaggagccgggcgggatgctggcccccattgcccagcggctggggctggaccaggtccaggccctgggagcctttgctttgctgcgccatctggcctccgtccggcccggagcggaggggcgtccgccccagtgtgagctgtggcagttcgggatctccggggatctgcccatcgcagctgcgccgctggagggaggagtgggagaggataagatcgggctgtggtgtgcccagcatcggttcctcacccgggccggctggccgtttgacttggtgtttctggcggaggaggggggcgactaccgccgtcccctgcttactgcggtcagggaggcgctgcg

SEQ ID NO: 13581 - DNA, 13680 bp, Unknown
  gut microbiota DNA sequence
tcccaccgtgctggcctgggcctccgcccgcctgcccctggaactgatggaggaagagccggagcactggacgcctccgccggcggtgtcggtccgcccggagcccgccccctggcactttgaccaggcgggcagcgtggtcatccgcgccggggagcgcctgccccctgtgggctggagtcagatcctgtgcggagagagcttcggatggctgaccgacgagacaggcaacggcctgctctggagggagaatgcccacgagggccgcctcacccgctggaaaaacgacccgctggccgtgggcggggaggagcggctgctgctggagacagggggcatctgcgcctccgtcttcgcggacggggatggcctgccctgtacagtgacctacggccccggctttgcccgctgggagaagcggtttggggagaccctgctggtgacggagggacatgtgcccccggaccggccggagcgggtgctccgtttcgcgctctccggaggtgctgggacgctgtccatccaaaggagagatggggaggcgtccgcctgcccgatggcagagggactgccggccgtcctggtgagcgcgccgggggaacggggcgggctggtccaccgctgggacgccctcccgccggaacgggcggaggcagagggggagcaggtcgtgctggactggcggaaaaaggtgtccgccctgcgcttctccaccccggagccggcgctggaccggtatctcaacggctgggcgctctatcaggtgctggcctgccggctgatggcccgcacgtctcagtatcagaatggcggagcctacggcttccgggaccagctccaagacgtgcgggccctgctgctcactgtgccggagcgggcccgggaacagctggtgctggcctcctcccgccaatttccggagggagacgtgcagcactggtggcatccgccccatggggcgggggtccggacccggatcaccgacgacctgctgtggctgccttatgtgctggcggaatatctggaggtgacgggggactggtccgtgtgcggggagaagacctgctatctggaatccccgcccctgcgggagggggagcgggagcggtatgagacgccccggtgttcggagcgagaggacacggtctaccgccatgccctggcggccatccggtgcgccatggagcgcggtgtgggcagccacggcctggccctgataggaggcggagactggaacgacggcatgaaccgcgtgggggcgggaggccggggggagtctgtgtggctgacctggttcctcgccctggtgcttcggaagttcgcgccggtgtgccggcatatggaggagccgcagctggcggaggagctgctgggccgggcggagggataccggaaggccgcggaggcggcttgggacgggagctggtaccgccggggctattttgacagcggggcccccctggggacccggggggcggagagctgcgagatcgactccattgcccagtccttcgccgcgctggtggaggactcggaccgggagcgggcctgccaggcagtgtctgccgcgctggagcggctctatctgccccaggccggggtagtgaagctgttcgatccgccctttcaggacaggggcccggacccgggctatatcaagggctatctgcccggcgtgcgggagaacgggggacagtacacccatggggctgtgtggctggctctggcctgcctccgcctgggccggacggaggatgggctggagctgctgcgggccctcctgccggagcgccgccggacgcagatctatcaggcggagccctatgtgctggccgccgatgtctatgcggccccggggcacctgggccggggcggctggagctggtacaccggggcggcggggtggtactaccgcaccgcggtggaggagctgctgggcctgaaggtccgggaaggccgcttgtttgtggagccccacctgccggaggactggccgggctggaccggggagtgggaactggaccgggggcggctgagcatccaggtgagccgggggagagagctctccgtccggctggacggccgggagatccgggacggcgtccccctccgggaactgacaggggaccaccggctggaagtgacagcggcacccgggaatggaaagctttgcttttccgcgaaagatgtggtatgataactctgttctgcttccaggaaggaaattcccttctgaaaggccacaggaaaagggggacgccccctttcgtgcagagaaaggaatctgatctatgactcaagtaacgcgccgggagctctttcccggggtgtggctgcggacagtccacaccgacaaattcaaaagcagctatctcagcctgaccatgctggtccccctggatcgggagcgggcggcggccaatgccctgctcttcccggtgctgcgccgggggacccgggagcacccggatatggagtccctctccgccgccctggacgagctgtacggaggcgccatcgagcccatcgtgcggaaaaagggggagacccagtgcctgggctttgtggccagctttctggatgatgcctttgcgcccgggggcgagcccatcctggagcccgcggcggggctgctgggggagctgctgctccgcccccgccttcaggacggcatttttgcggaggaatatgtgtccggggaacgggccaatctggtggaccgcatccggggccagatcaacgacaagcgctcctacgccaccctgcgcctgggacagctgatgtgcggggaggaggccttcggggtggacaagctgggggatgtggagcatgccgcggccgtcacgccgggctctctgtgggagcggtatcagcagctgctctccaccgcccagatcgagctgtactactgcggttccgcggaggaggagcgggtggcccgcgccctgaaggaggcgctgtccgccctccccgtgaatgaggggcggatctgcccggactgcgaggtccggctccacgccggaccggagcccagcatggtggaggagtccatggacgtgacccagggcaagctggccatgggcttccgcaccggcggcgtcacctgctgggaggaggaataccccgccatggccatgtgcaacgccgtattcggcggcaccaccctgtccaagctctttatgaacgtgcgggagaagctgtctctgtgctactacgccagctccaccctggagaagatgaaggggctgatcctggtctcctccgggatcgaatttgacaagttccagcaggccagggacgagatcctccatcagctggaggagatccggcaggggaacatggaggactgggagctggaggggacccgccgcaccatgatcggcgcccacctggccaccctggatgtccaggaccggcaggaggacttctggctgggccagacggccgccggtctggagaccggcatcgaggagctggtggcccagctggagcaggtcacccgggagcaggtggcccaggcggctcagaagctggaactggacaccatttacttcctgaagggaacggagggctgaaccatggagaaactggaatttccccgggtgggggagcagatgtaccaccaggtgctggacaacgggctgcatatctttgtggtgcccaagcccggctttcagaagagctacgccttttttgccaccaattacggaggcatggatatgaagttcaagctggatggccaggatatggacactccggcgggggtggcccactatctggagcacaagatgttcgacaccaaggagggcaacgccctccaggagctggcggccaacggcgcctcccccaatgccttcaccagcaacgccatcacaggctactatttcgagagcacagagaaattcgaggagaacctgcgcatcctgctctccttcgtctccattccctatttcaccaaggagagcgtggacaaggagcaggggatcatcggtcaggagatcggcatgatcgaggacgacccggactgggtggtctttatggatctgatgcaggccctctacgagaagcacccggtgcgggtgtcggtggcgggctcggcggagtccatctcccacatcaccgctgagaccctctacgcctgccacaaggcattctacgacccctccaatatggtgctgtgcgtggcaggggacgtggacccggagaagatctgccaggcggcccgggagatcctgccggagcggcctggagcaccggttgcccggggggactacggcgcccaggagcccgcggaggtgtgccagcccatgatccagcgggagatggaggtctcggtccccctgttccagctgggattcaagggggaggcggccccggagggagagggggccctgcgccagcagctgctgggcgagctggcctgtgaggcacttctgggcaactccggcccgctgtatgccagactctaccgggaggggctggtcaaccggaatttctcctacgggtatgagagctaccccggctgcgctttcctgtgtgccgggggggagagcaaggacccggagggagtgcgggcggcggtggccgccgaggcggagcggatcgcacgggaggggatcgaccccgagctgtgggagcggctgaaaaaatcctcctacggaaaccgggtgcgggcgctgaactcctttgagcacatctgcatcagtcaggcccagtcgtttttccagggctgcgatttcctgcgcttcccggaggtgtacgacagcctgaccagggaggacgcccaggccatgatcgcccgctgggtcacgccggagcgcaccgccctgtctgtggtccggcccagagaggaagcggtggaatgaccaacatcgtgacatttcccggactggggctggagttccaccttgaccgggtggccttctcgttgtttggccacccggtgtactggtacggggtcatcattggctgcggatttctgctggccgtcctgctgtgctgccggtgggcgcccagattcggcgtgaacagcgaccagatcatggacctgctgatcttcgcggtgcccctctccgtggtggggctgcgggtctattacgtactcttctatctggacctgtaccgggaggcggacggttccctgaactggggggccatcttccgcatcacggacggcggcctggccatctacggcggcatcattgccgccgccctgaccttgatcgtgttctgccgtatccggaagatcagcttcttctcctttgcagacctgggggtccacggccttctgatcggccagttcatcggccggtggggaaactttatgaatgtggaggcctacggcggcgtcaccggacttccctggcggatgtgttcggagagcatcgccagctccctgctgtcccagggactggtggacacggacggctatcaggccatcctggacggcaccctgggggtgcaccctacgtttttctacgaatccctgtggaattttgtgggcatctttctgatctactggatcggaaagcactggaagaaatttgatggccaggtgttctggagctatgtgctgtggtacggcctgggccggttctggatcgagggcctgcggacggacagcctgtatttcttcggactggagctgttcggcgcccccatccgcacctcccaggtgctggccatcgtctctgccgccgtggcggctgttgtattgatctatgagctgaagttccgtcggcacgatccgtctgagctttatgtgaaccggctggccgcccacagggcggacgctggagagggcccgggcggaccggagaaaaaggaggactgatttgtgtcggcggtcataatggacggaaaggcactggcaaaaaaggtgaaggaggaggtccgggcggcggcggcgcggatggagcgccgccccggcctggccgtgatcctggtaggggacgaccccgccagccaggtctacgcggatggaaagaagcgggactgtgcccagtgcgggatatacagtgaggaatacatcctgccggcggagacaggacaggaggagctgatgctgctcattgaaacgctgaacggacgcagcgacatcgacggcatcctgatccagctgcccctgccggcccatttgaatgagcgggcggtcctgtctgtggtcaggcccgacaaggatgtggactgcttccaccccttcaacgtgggggagctgatgatcggggagaagggcttttatccctgcaccccggccagcgtgatgcgtctgctcgcggaatacggcgtggagctgtcggggaaaagctgcgtgatcgtggggcgctccaatatcgtgggcaagccgctggctatgctgatgctgcgggagaacgccacggtcaccatctgccacaccaagacggagtacctgaaaaaggagtgcagccgggcggacatcctgatctccgccgccggacaggccggcctcatcactggagacatggtgaaggagggggccgtggtggtggatgtggcagtgaaccgccgggcggacgggaccctgtgcggcgacgtggtatttgaggaggcggccggacgggcgtcgtacatcaccccggttccggggggcgttgggccgctgacccgggccatgctgatgaagaacacgctgtacgcagcggtgatccacggaaaatagatccggaagcgggcggagagggggagtcatctcccacctctccgcccgtcctttttactgtaaaaaagatggggaaatgattgacggaccaggtggctatcccatatactggtcttacataaaatcgtgctgcgggagggccgtatgagaacaaaagtaaggacaagactgctgaagtttaccatggcgatggagatcgtgatggcgatcaccatcctgggggcgatcctggccagcattgcactgctgatctgcggctcggtggagaagttctgctgccagtgggagtccttctccattgacgcatttatggcaaatgcgttcctcatcgtcatggggatcgagtttgtaaagatgctgatgctgcatacctacggggcggtgatcgatgtgctgctgttcgccatcgcccggcagatgatcatcagccatgaggaacccatgcagacgctgatgagcgtgggggcggtggccgggatctttgccatcaagaaatatctctataccggggagcggtgggagtccggacagaaggaccggccatgcagcaagtaaaaaaccggcggctctgggaggagacccagagccgccggcctttcttttttagggatcacttccgcttccggtctggccagaagaggatgaagaccagggcacacaccgccataagatagcagtagaacatgtagggcatgatcttgacggcagagactcccgtccctgcggaggcgtagagcagctgcgcaccatagggcaggatgccctgcatcaccgaggcaaagatatccaggagggaggcggaccgccgggggtcgatgtggtactcctggctgatgtccttggcgatggagccggtcatcacgatggcaactgtgttattggcggtggctacatccaccgtggccaccagtccggcgatgcccagctgggcaccccgcttggagttggcgcggcggtggacgaagtcgatgagccactggatgccgccatattcccgcaccagggcgccgatacaggccacgacgatggagatgacagtgatgtcatacatggcggtgatgcccgtccccatcacagagaagatctgggtccagggaaaggcgccggaggccacgcccacgatcaggctcagcacagcgccgatggtcaggatcaggaacacgttgacgccggccacggcccccaccaggaccaccagatagggcaggaccttccagacgctgtatgtgccgatctccggctggccgctgccgccccaggtgagggcgatgaagatcaccagggtgaggatggctgcaggcaggacgatgaagaagttcatgcggaacttgtccttcatttcacagccctgggtgcggaccgcggcgatggtggtgtcggagatcatggagaggttgtcaccgaacatggcgcccgaggccaccgccgcgatgcacaggaccacctcgaagccggtggcttcgctcatggagacggcgaagggggccagggcggagatggtgcccaccgaggtgcccatggagatggacacgaagcaggagatcaagaacaggcccgccaccgcgaactggctgggcaggtagtccaggaacagatagaccgtgctgtcggcgccgccggcggcctggaccgcgccggaaaaggcgcctgcggccagaaagaccaggcacatggtgaggatgttctcatccgccaccccgttggccattaccttcagcttggcgttgaagtccagggcccggttctggacgcaggctacgaacagggcgatgaggaaggccacgatggccggggtctgatagaagcccatctcgatcttgagcccatactcgaacagcaggccgcagcccaaatagaggaccaggaacaccaggatggggagcagggcggcggcattgccccgcttctgcgccggattgagttctcccataggaagggaccccctttttctttctcttttgacctttctattttagaggagttgggagagggtgtcaatagaaaaggaggcggcataggatggaacagcctttgtatggacagaggagggagccatggaactgaagctgagtcaggagttcctgacagagaatgactgttaccaggccgggcggaagatcgtacccaaggggatcatggtccactccaccggcgtggcgcagccggacccgcaggtgttcatccgccgctggaacaagcctggggtggaggtgtgcgtccacgccttcgtggcccgggatgaggtcatccagaccctgccctggaactggcggggctggcacgcaggctcgggaaaaaacggcagcgccaacaatacccacatctcctttgagtgctgtgagccagccgggcacacctatcagaacggaaagatggtgggctatgatgtggagaagaacgaggcatattttcaggacatctaccgcaacgccgtggagctgtccgccatgctgtgccgccagtaccgcctggaccccatggagccgggcgtgatcctggaccacgccggcggccacgccctggggatcgccagcaaccacagcgatgtgggccagtggtggccgctgcacgggaagaccatggatgacttcaggcgggccgtgagggatgcgatgagaggaggagaggagacggtgacacaggaacagtttgatgccatgatggcggattatctggcccgcagaggccgagagaagccctctgactggtctgagaacgcccgccgctgggcggaggaggccggactggtctccggggacagcgctgggatgcgctatcgggacttcgccacccgggaggagaccatccagttcctttaccgctaccagcaggtgacggaagggaagccataacggagaaagagccccctccgccggaagagccggcagagggggcttctggtcatggtgtcgctcaggctctccagagcccgtgaagattgcaataggcgtaagcggccttgacccggtcgccgggggcgagggcaaatttgacctccggggcctgacctggctccaggtatttgatttgacagccctcggtggtctccagggccacccactggatatagtgctcggggatcatgggatggggggcggagcccaccttgacatccaccatgctgccttctacggtgaccacagggacatgcttctcctgagccgcgtcggtggaatcggggacgagttcggtcatcttctgcccgcagcacatgacgggcacgccgctggactggagaaaggtgacgatattcccgcagtgctcacagatgtagaacttcataggatgctgcctcctttgcaatggggagcccgtgattttccggccgggatgtgccggaagagctcagccctattatacccaaaatacagggaaatagcaacagaatcttagtgttacgagccgtgtatccgccacagctgatgccgctccgccaccgggtccacggcgatcagctccccgtcccgggtgaaggagatgaaccgcccgccctgatggcacagggtgccccggtcccccttggagagatagtaccagatgtccggcgggacctggcaggtcaccacagtgtcccggctggggacatggaaatagaggtagtaggaggagccagcgcgggagtggcagttctccttggcgtggacccgggcctcttcggcccggacaggctcccctctggaggagtcctgaaggttgtgcagatggaagatgatcaaactgatgcacagggcggccagtactgccgcagcgacagccatatcctgcctccttcctccaaaggcctgaggtacaagaccagcataacagaaaaaagcgcaaaaaacaaccttccaccggagtggaaggctgttttttctgacttaccggatgaggctgctcatatcgtacaggccgggtgccttcacaccggccataaacttggccgcctccacggcgccctgggcgaagatctcccgggagagggcagtgtggcggatctccatgacctcgtcgtggccggcaaagatgatctcgtgctcccccacgatggtgccgccccggaccgcggagatgccgatctccttcttgtcacggggatggcggacgctgtggcgctcgaagacgtactccgtctcgtggccgcaggcccccgccgccgcgtcggcgatcatcagggcagtgccgctgggagcgtccaccttccggcggtgatggcgctccacgatctcgatgtcatagctgtctcccagcacagaggccgcctttttcaccagctccagcagtacattgatccccagggacatgttggcggagcggaaaatgggcacctccagggcagcggcgccgatttgggccacctgctcaggggtgtagccggtggtggccagcaccagaggggtcccggtggcccgggcgaagtccagcagcccctccagggcggcgggggaggagaagtcgatgaccgcgtccgcctccccgctgaactgggcaggggaggagaagacgggaaagtcccggtcggaggagcccaggatatcgaagccggccgccacctggacctgggggtcggcggcgcacagggactccaccacccggcccatgtggccgctgcatccggagatgatgatcttttgcatggcggctccttacagcaggcccatgcggcccatggcctggcgcagcgtctccagattcttgtgggagatgtcgcacaggggcagacgcagggaaccggcctccatgcccatcaggttcatggctgccttgatggggatggggttgacctcgatgaacagggcgtcgatcaggtccatataggcgatctgaagcttggaggcatcctcaaactgtccctccaggcacaggtgggacatcttgaccatgacctcggggatgatgttgctggccaccgagatgacccccttggcacccagggacatcatagggaccacctggtcgtcgttgccggaccagatgtagaagtcatcggggcagaggaaccgggtgtgggccagcagggagaagttgccggaggcctccttcacgccgttgatcttgggattctgagccagcaccttgtaggactcggcggtaaaggagaccccggtgcggctgggcacgttgtagaggatcatgggcagctcgatgcgctccgcgatgtactcatagtgcttgatgaggccggtctggctggccttgttgtagtagggggtcaccagcaggcaggcgtcggcgccggagtcctgggcgtgctgggacaggtagacggcggcggaggtgtcgttgctgcccgtgccggcgatgactttgacccggtggtccacccgcttgacgcagaattccaccgcggcgatgtgctcccggatggacatggtggctgactcgccggtagtaccgcacacgcagaccgcatccacgccggcggcgatctgggcgtcgatcagcttgccgaaggcgtcgtagttgatattgccgttctggtcaaagggtgtagccagggcggggcaggagccggtaaatacgggtgttctcataaaacagcatcccttctgattgagagtggaagagtgaagcgtggaacacggaggcggcccatgcaggggacgtctctgcgccccttcactcagaggaattgacggccgtaaaagcgcttcggatggagagacagcgaaagggaccgcagaggcggggcccttcctgcgtcatgtttttctcagttatccgttaaatatacccttccgcgcacagcagctcggccagcaggacggcgccgccggcggcgccgcgcagggtgttgtgggacaggcccacgaacttgtagtcgtactgggtatcggggcgcagacggcccagggagatggccatgccgccctccagatcccggtccagcctggcctggggacggtcgggctcctcaaaatagtggaggaactgtttgggggcggaggggagctccagctcctgggcccggcccttgaagttcttccaggtctccctgatctcctccatagagggcttattgcggaaggtgacgaacacggcggcggtgtggccgtcggagacggggacccgcaggcactgggcagtgatggcgggtccggcggccttgacgatcttgccgtcctccaccttgccccagaccttcaggggctcctgctcgctcttctcctcctcgccgccgatgtaggggatcagattatccaccatctcgggccagcgctcaaaggtcttgcccgcaccggagatggcctgataggtgcaaaccaggaccttctcgatgccgaactgcatcaggggatgcagggcaggggcataggactggatggagcagttggatttgacggcgatgaagccgcgccgggtgcccaggcgggcgcgctgtgcggggatgaccgccagatgctccgggttcatctcgggcaccaccatgggcacgtcgtcggtccagcggtgggcggagttgttggagaccaccggcacctcggccttggcgtaggtctcctccagggcgcggatctcctccttcttcatatccacggcacagaagacgaagtctaccatgccggcgatcttttccacgtcggcggaggcgtccagcaccaccaggtccttggcctgctgggggatgggagtcttcatggcccagcggccggagacggcctgctcataggtcttgccggcggaacgggggctggcggcgatggcggtgagctggaaccaggggtggtcctccatcagggtgacgaagcgctgccccaccatgccggtgccgccgatgatgcctactttgtactttttcatgttcaggttcctttcatggcggctcgtgccgcagatttggactttgcggaaaagggaaaaaacagaggttgccaatcagggccggagtcagtataatagacgacaagaagtacagggatctgacggggccggcctgtttccctcctatttttaattagtatctatgatagcatgatgagaaatcagtgtcaacaaattgcgtgttgacgcttttgtgagaa

SEQ ID NO: 13582 - DNA, 194 bp, Unknown
  gut microbiota DNA sequence
cccgccgacatcatccagggcatcgaggagcccagcatcaccctgacccaggagctgatgaagcgctgcgacctggtcatcgccaccggcggccgtcccatggtcaagtccgcatactcctccggtgtgccggcctacggctccggcgccggcaacgcgactgtcatcatcgacaacacctgcaacaccgccga

SEQ ID NO: 13583 - DNA, 16890 bp, Unknown
  gut microbiota DNA sequence
tagccaatagcagatcacctcgccacggcggcttccgcctggggagtctgtatgagtcagtccaaacataaggagtggtaacaatgagctattctgtacaaaacatccgcaatgtctgtctgctgggacacggtgggagcggaaagacctccctggcggagagcctgctttacatgaccggcgctatcgaccgcatgggcaagcccgccgacggcaacaccgtctgcgactatgatgcggaggagacccgccgccagatctccatctccacttccgtggctcccctggaatataagggctgcaagatcaacattctggacaccccgggcagcttcgacttctcaggtgaggtgctggaggccctccaggtctctgacgccgccatcatcgtctgctccgccaaagacggcatctctgtggggctggaaaaagcctggcgctactgcgaggagcgcgacatgccccgctttatctatatctccaagacagatgaggaaaactccgactataacgccaccttcgacgccctgcgtgagcgcttcggcaacaagatcgcccccatcgtggtccccatctgggacgacaacaagaaggtcaccggcatcatcgacgtgctcaacaagcgcgcctacgagatgcagaacggcaaacgggtggagatcgagctgccggagggcaaagaggacgtggtcacccagttcaacgacgctctgaaggaatccgtggccgagaccagcgaggagtttatggacaaattcttctccggcgaggacttcacctatgtggagatgatccagggcctgcgccagggcgtgcgggagctgtccctcttccccgtgctgtgcggctccgccgtgtccaccatgggctccctgatgctgatggacaatatcgtggagcttctgcccaacccggtggagggcaacatgcgcaagggcatgctccccagcggcgacaaggaggaatacgccgtctcccccggcggcgtacccagcgccttcgtgttcaagacggtctccgaccagtacggcaagtactccttcatcaaggtcatctccggcaccatcacctccgacctggccctggtcaacgcccgcaccggctcccccgagaagctgggccggctgtacaccatgcggggcaagaaggccgtggaggtcaaggagctctcctgcggcgatatcggcgccatcggcaagctggagaaggtcaagaccggtgataccctgtgtgacgcccgcaaggtcttcttcatgccccccatccccttccccgagccctgctactccgtggccatcgtgcccaagacccgggggcaggaggacaagatcgcccagggcttggcccgcctgaacgaggaggacccgaccttcaccttggtgaacaacggcgagacccaccagatggtcctcagcggcaccggcgacatgcagatggatgtgctggtgtccaagctgaagagccgcttcaatgtggaggcggagctgaaggctccccgggtggcctatcgtgagaagatccgcaagacagtctccaaacagggccgccacaaaaagcagaccggcggtgccggccagttcggcgatgtctgggtccgctttgagcccaatccggagagcgaccagatggtctttgccgaggaggttttcggcggctccgtgcccaagaactatttccccgctgtggagaagggcctgcgtgaagcctgcgttcacggacctctggcgggctaccccgtggtcaacctgaaggctgtcctctatgatggaagctaccaccccgtggactcctccgagatcgctttcaagaccgcggcccagctggcctacaaggccgccatgcctgaggccaaccccgtgctcatggagcccatcggcgagctgaaggtcaccattccagacagctacatgggcgacgtcatcggtgacctgaacaagcgccgcggccgcatcatgggcatgaatcccactaaggacggcgagcaggtggtggaggccgaggtccccatggccgagatgtctacctacgccatcgacctgcgggccatgacccagtcccgcggctccttcaccttccactttgtccgctatgaggactgccctcccgcggcccagcagaaggccattgaggaagccaaggccctggcggaagaataaatcatcccaggcacccgtttccccacagggagcgggtgccttttgcgggcagttccccggtccggccccatacagcgcgccagcccggtggtccctggaccaccgggctggctctgtgctctgttctgtcgcagacggacacggctccaccacgcttcggccgccccgggggaagcaggggggaggtatccctgtcccgcccggcgcgctgccgtgaacctgtctcatcttgtccccatcatactcctccccaatccatttttcaaatcaatctttcttataaaataattgattttatctatatttctgcccggtgaacccgctccagcatctcctggtatccgggggtctcccggaggaaagcggattccgggtcccgctccagttcctccagcagatattggagcatgatctgctggacttccctcgcagcctcctttgtgggcaagtggcggtagagaggggacgcactcaggtcccagggctcctccaggctgcgcaggagccgttccagcaccgccagcgcctcggggccgtcctgctccgccagcgccagctggagcggggcagacgccactgcgtaggcggtgagctggaacacccgtcccgcctgctccgccgtctcactgtattgccgcgcgcacgtcttgtcccccgcctccagcgccaggtccatcaaagccatgagggtagactggagatctgatgcctgccggaacagctcccgctccagaatgggccacgcctcttccgaccgcttctgtttcctgcggagcatggcctccagcatgggccgttcccggtcctcctggggcagacgggccagctgttcctctgcctgctccagctctccctgggccatgtactgggagatgagcatccgctccgcccgctcccgcacccgcctgtctccactgtccgcgcaccggcggtagagggccaggatctcccccttccacgcctgctcccgctccgggtcattctctccccgcttccagagcaccagcgccccgtccagtatctgggccgccgtataggccagcaggtcgctgtttgggtactcccgcagcttgtcccgggccagacggaaggcggcctcacagccctcctgctgggctctctcccccagcacattggcaaatgctccgatctcctcctctgtcagttcctcctgaaaggagagcagggtgttcaggtccacctcaagcagacgggccagcgggggcagcagggtgatatccggataggagttgttccgctcccacttgttgacagctggcgctgacacccccagccgctgggccagctgttcctgggtcagcctcagtgccaggcgccgctgccgcaggatctcgtgaaatttcatgttccgtcccccttttccttggtgtgcccattgtatcagaggagaccttttctccgcaaccgaagggtattcacctttccttcaaaaaaattaaccgctgttcatattttttctgttttcaaaaaaattgtcctctgactgtggtcagaggacaaaattgtgctgaaatatgcacaattttccgctttccattcccttgacagggcccttgcttccgctataatgaaaccaacctccatatcagaaaggaagatcctatgacacaccttcgcagcagatggaccgccctgttcctggcgctggtcctttccctctctctggccctgcccgcctccgccgcacaggaggaccgggcccaggccgcccatgaggccgcccagtacgccatgcagtatggcggcgccgtcagtgtccagtacgccctttgggagaacggagaggtcaccctccaggggcacgacggcgtctactccaagacggagaaccgcgcgctcaccgatgatgacctgtacggcatcggctccatcagcaagacctataccgccgccgccatgatgaagctggtggagcaggggaaagtagacctggatgagccggtcaccgcctatctccctgatttcaccatggcagacccccgctacacccagatcacggtgcgcatgctcctcaaccactcctccggcctgatgggcggcaccaccaatgacgccttcctgttcggggaccaggggaacgatgacgctccctcccgcctgctggagcggctggccgggcagacccttcaggccgagcccggcgcttacagcgtctactccaacgacagcttcaccttggcccagctggtcatcgagcgggtcagcggcatggagtacaccgcctttctaaaccagtacctgctggagcctctgggactggagaacaccctgacccctatggaggagttcgataccagccggctggtcaagacctatctggggactgacacccgggccctgcccgccgagaacctgaccatcgtgggcacgggaggcatctactccaccgccagcgatctggccgccttcggcggcgccctgtgcggggaaggtctgctgagccaggcgtctttggatgagatggccagcgaccagtatctgctgggcatgtggcccgaggacagtgacggcgacgccgtcgcctatggcctgggctgggacagcgtccatatgttccccttcagtcagaacggcatccaggccctggtcaaggggggcgacaccatcgtctatcatgccggactggtcatcctgcccgagtatgacatggccgccgcggtgctcacttccggcgggatcagcacctacaatcagctggccgccgcccgtatccttctggatgccctggctgagcagggcgtcgaggtggaggaggaggccgccctcacccccgcccagcccgcccagatgcccgccgagctgacccagctcagcggctggtacggcacctccaccgccgccgcccagctccagatcaccgacgagggcgtgctcacccttaccgggatggaggggaccttcacctaccgggaggacggcagtttccgggacgagagcgattccgtcctgctcaagctggtccaggaggacaacggggagacctacctctatcagaagagctacgcctccattcccggcctgaccaccctctgtgtggcctcctacgccatggagcgcctgcccagctcccagccggacgaggccactcaggccgcctgggaggctagagagggcaagatgtacgttcaaaccaacgagcgctggtcctccgcctactacgccttaagcggcgtctttgccgccgtcacccttcagggcagcccggagggctatctgctcaccaatcagctcaccgcccctgacaccgctgccccagtccttcagatccccggcaccggaagccgggacagtgccgtgatccgtgtgctggatgtagacggctgcgagaccctggagctcaacggctccctctatcaggacgcaagctccgtctccaccatcttctccgggccggagtcctggtgcatcatccgcccggggcagacagcccgctggtaccggacaggcgaggccgccggcagtcagatgacggtggaggtcccggaaaacggcggtttctatgtgtatgacgccgctctgggcctccaggccagctcctggctctatggagacaccaccgttgttcttccggaaaacggctggatcgtcttctccggcgaggagggggcccagttccacatctatctctcacaaccctgagcaaacgctccggccgcccttccggcgtccggagcgttccttttttctgtcagccggaccacaccgccggccataaaaacaggcgccgccccatggggcggcgcctgaatcgtgtctgtgtcttactgcttgggcagggtggtcttgggggcggccggcttagggtcctcggtgtcgaacaccgttttcgccgcggcggccaggcccgccaggccctggatctcgctgggtacgatgatcttggtggccttgccgttggcggcggcggtgaacgcctccagggccttgatcttcagcacgccgtcgccggggttggcctcgttgatgagcttaatggcgtcagcggtggcctgctgcaccttcatgatggcctgggcctgggcctcggcttccaggatcttagcctgcttggcgccctcagcctgaaggatggcggcctgcttggccgcgtcagcccgcaggatggcggactgcttctcgccctcagccaccaggatctgggactgcttctgtccctcggcctggaggatggactcacggcgctcgcgctcggcccgcatctgcttctccatggactcctgaatgtctctgggcggcatgatgttcttcagctccacccggttgaccttgataccccagttgtcggtggcctcgtccagaatggcccgcatctgaccgttgatgtggtctcggctggtgagggactggtccagctccaagtcaccgatgatgttgcgcagggtggtggcagtgaggttctcaatggcggacatgggattctccaccccataggtgtacagcttagggtcggtgatctggaaatagatcaccgtatcgatctgcatggtaacattgtccttggtgatgacgggctgggggggaaaatccaccacctgctccttcagggaaacattctttgcaacccgctcaatgaacgggatcttgaagtgcaggcccacgccccacacgccctgaaaggcgcccaggcgttcaatgacgaatgcgcgggactgcgggaccacccggacgttggcggccagcaccagcagcaccagcaccaccaggatgatgggcactaaaaacgaaagaatactatccatgatctctcctccttataacagctctacaaaaaccttgactccctcgatgcggagcaccttgacctcccgcccaggctgtatgacaacgtcatgggcggagcgagcggtccagacctgtcccgagatattcaccaggccgctccccttcaggttgtcgatctcctctgtgaccagtgctgtggcgccgatgacccggtccgcgttggtggcctggtagcggggcgtcaggaacttctttgccaaggggcggaccagcagcagggtcaccccggacagagccagaaagaccaccacctggagccacagcgccgcgccaaagcctgccgcgatcagcgcacccagagcacccaccgcgaaccaaacggaggtcaggcccacagtgatagcctcccccaccgcgaacacgatcagggcgatcagccagagcacagtaaacggtatgggtatcatagcacactcctttctgttcccatcccggggggctggaaagaaaacttctttccttggatgacaggatatcatatcttacaaaaaattgctatggttttctctcttttttctgtaaataatttcaggatcgggggagcgccgcctttccgctctataaagtatttgcctaatggcgaaaaatccgatatactgttttttaccaatctctctcgacgcttaaaggagaatcccgcccatgcccatcgtttcagaacttatcctctccctcatgctcactgcctccctgtccgccggagctcccctctctgctccgccgggcctggccgtctcccttcctgccatcaccgctcaggcgcagcagctccacacccccctgatgatcctccacgccggcggcgtcaccccggagggagtgacgggcagcaacagtctggaggcgctggaacattcctacgaaaacggcttccggctgctggagctggacttctcctggacctgcgacggggagctggtctgcgtccacgactggaacgctttctatggccgcatcctggacacggactcccccaccctggcccagttcgaggccgtccgggacagcacctacggcttcacttccctgaccctggatcatctgatcgcctggctgagggaacaccccggcgtctccatcgtcaccgacatcaaggaggactgcgcggcgggcgccgccctgatcgcccagcgctgtccggatctgcgcagccgcttcatcattcagatctaccacccggaagaatatgaccaggtggcagatctgggctttgagcacatcatcctcaccgtgtatcagatgtcctggtccgaaaagcaggacaccgccgccctggttcgctttgctgctgaacaccccctggaggggatcaccttcccggcggagctggcggacaccccaggctatgtggaggcgctcctggaggcccaggtccctctcttcgtccacacggtcaatgacccggcggatcaggccgccctggtccgccagggcatctcgggcatctacactgatctcggggcgcccgccccccaggaataaggagaactgccatggaaactctgaactttgcgatccccaccctcttcggcctggaggccttggctgcggatgagctgcgccgcctggggctggaccaggtgcgggcggaaaatggccgcgtcctctgctccggccggcccggcgacatcccgcggatggatctaaatctgcgcaccggggagcgggtgctgctggtgctgggcaccttccctgccggagatttcgacgccctgtttgaggggacccgtgccctcccctgggagcagttcatcccccgggagggccggttccctgtcaaggggcactgccttaattccgccctccattccgtgcctgcctgccaatccattgtgaaaaaggcggccgccgcccgtctgggggatgcctacggcctgaataccctccctgagaccggagcgctcttccagatccagttctccatcatgaaagacaccgccgtcctgatgctggacacctcgggaccagggctttacaagcggggctaccgggcccacggggtggacgcccctctgcgggagaccctggccgccgccatggtgctcctctcccgctaccggggccgggacccgctgtgcgaccccttctgcggttcaggcaccatccccatcgaggccgccctcatcgccaaaaaccgggctccgggcctgaaccgctccttctccgctcagaagtggagctggctccccactcaggcctggatggatgccgccgatgaggcccaggaccgggagttccacggggactatgagatctggggcggcgatatcgaccctgccgccgtggagctggcccggcacaacgcccagctggccgaggtggacgacattgtaaggtttgaagcggcggacgcccgcaccttccactggggcgggatgtacggccggatcgtcaccaatcctccctacggcgagcgcattatggagcgccgggaggcagaggagctgtaccgcgccttcggaaaggcatgggccaagttcccggagacctggaagctgtatctgctctcctcccatacggagtttgagcgcacctttgggaagacggcggacaggaagcggaagttatataacggaatgctgaaatgtgacctgttcctctacggcgtcaaataggaggtgcatcatggcatatcgtgtcaaaaaattccggggctatcggcggatgctcaggaagctgatccgggtggtagaggactaccagcccgactggcgcccggacgaggcggatggtcgggaagaatttctggagctggacctgtactctcaccggtttttccacccccgtggaaagggccggaaggccctgttttccgccctgctgcgcaagacggaggccctcatcgccgccaagccggcggacctgcccttctgcaaaatattcctctttatgcccgggggagacctgggccaggcggagatcgtcctcatctatgaccgggagcggtttgagaccttctggctgcgcaccgacccggcggacgggctttggaccctccaaaaggaccgctctctgctgacggagctggggctgtcctccacgctcccggagcggtgcgtgttggaggagttccactgggcgggctatgtggagcggacgctgatctggggctatggggagctgccctgacccatcggaggtatttatgaggcacctgttcatcatcaacccggcggcgggcaggccggagagcaccgcccggctggaggccctgctgtcccggctgtcctttccccacgaggtggcctatacccgggaggccggggacgcccaacggctggcggcgacggcggtccggacgggggggccggtgcgcatctacgcctgcggcggggacggcaccctcaacgaggtggtcaacggggcggcgggctttgacaacgccgcggtcacctgcgtgcccaaggggacgggcaacgactttctcaagctgttcggcccccgcttccgggagctgttctacgacctggaggccctggccgccggcccccagcgtgcctttgacctgatggactgcaacggcaagctgggcctggacgtggtgtgtgccggcgtggacgcccgcatcgccgcgggggtgcaccgatataaggacctgcgctttgtctccggcatcggcgcctatcttctatccctggcggagcaggtcatcttccggggcctctgccgtcccctgaccatccgtgccgacggcctggactggcaggagcggcagaccgccatcctgtgcatctgcaacggcaggcactacggcggcggcttcatgcccgtgccggacgccatgccggacgacggtgtgctggatgtcctggccgtgggggagatcagccgcctcactttcttccgcctggtgggcaagtacgcccaggggctctaccggcagtacccccaacttatcaccgactggcacggccagtccctctcctttttctccccccgggagatcaccgtggtggtggacggcgaggtcatgcgcgggacccgcttcaccgtccgcctctcccccttgaaaatcaactttttcttccctgcgggtgccgattattcccccgaattttagcactcttttctccactttgtgaacggacggtaaacttttacgaaattgcccgcaattttttgaaattgggggttgattttttgttttaaaacgtttattatcatactcgtggttggcactcagttttattgagtgctaacattccgagagtcctgtcggtcacagtgtcggcgcactctccccaactcgtttaataccaatatcatataaggaggaacctgttatgaaactcaagcccttagctgaccgcgtcattctgaagatggtggaggccgaggagaccaccaagggcggcatcatcctcaccggcgccgccaaggagaagcccgaggtggccgaggtcctggctgtgggccccggcggcatggtggacggcaaggaggtcactatgaccgtgaaggtgggagacaaggtcatcaccagcaagtattccggcacccaggtaaagatcgacggcgaagaggtgaccatcgtccgtcagaacgatatcctggccattgtagagtgaaattcagcgacggcaactaggaatgagaaacgtcggatcgatgaattgcctgaggcggcagtcgatcccaatggctacggtaaagccggaccgccgcaattcctaagttctaactcctaatttctgattcaaactaagtcttctctaaattggaggtaatgtgttatggctaaaatcatttgctacggcgaggaagcccgcaaggctctggaaaagggcgtggaccagctggctgacaccgtcaagatcactctgggccccaagggccgcaacgtggtgctggacaagaagttcggcgcccccctcatcaccaacgacggcgtgaccatcgccaaggagatcgagctggaggacccctttgagaacatgggcgcccagctggtgaaggaggtctccaccaagaccaatgacgtggccggtgacggcaccaccactgctaccctgctggcccaggctatcgtgaaggagggcctgaagaacctggccgccggcgccaaccccatggtcatgaagaagggcatcgccaaggccactgccgccgccatcgaggccatgaaggtcaacagccagaaggtcaacggctccgctgacatcgcccgcgtgggcgctgtctcctccggcgacgaggccatcggccagctgatcgccgaggccatggagaaggtgggccacgacggcgtcatcaccatcgaggagtctaaaaccgccgagacctactccgaggtagtggagggcatgcagttcgaccgcggctatgtcaccccctacatggtcaccgacactgagaagatggaggccaacctggacgacgccctcatcctcatcaccgacaagaagatctccaatatccaggagttgctgcccgttctggagcaggtggtccagtccggcaagaagctgctgatcatcgctgaggatgtggagggcgacgccctgtccaccctgatcgtcaaccgcctgcgcggcaccctgaacgtggtgtgcgtcaaggcccccggcttcggcgaccgccgcaaggagatgctccaggatatcgccatcctcaccggcggcactgtgatctcctccgacgtgggcctggagctgaaggaggccactctggatcagttgggtcaggcccgccaggtgaaggtcaccaaggagaacaccaccatcgtcaacggcgccggcagttccgaagagatcaaggcccgcatcggccagatcaagagccagatcgaagtcaccacctccgactacgacaaggagaagctccaggagcgtctggccaagctggctggcggcgtagccgttatcaaggtgggcgctgccaccgaggtggagatgaaggagaagaagctgcgcatcgaggacgccctgaacgctacccgcgctgctgtggaggaaggcatcgtggccggcggcggcaccgcctatctgaacgccatccccgccgtggagaagctttacgctgagactgagggcgacgaaaagaccggtctgcagatcgtggcccgcgcactgaccgcccccgtgaagcagatcgctgccaacgccggcattgatggctctgtggtgctggagaagatccgcgagtccggcaaggtgggctacggtttcgacgcctacaacgaggtctactgcgacatgatccccactggcattgttgaccccaccaaggtgacccgctccgctctggagaacgccgcctctattgcctctactctcctgaccaccgaatccctggtggccgataagcctcagcctcccgcacctgcagcccccgccgctcccgacatgggcggcatgtactaaaaacaggccgaaaagcgttgatatgactggatttgtcggaagaaaatcagaaaacttaccataaacttacgacaatcacatgggaaaacgcacggcatgtatgatgcaggttagatgtcggaaacttggataaaatagttgtccttctgtcacagaactgcaaagaaacagccagagagtgtagtgctctctggctgttcttcttcatgtaggaaaaagtgaaaactccattaccccatgtactcttcacaactgtggttgttgtactgtttcttgatatggatgatgatcgatccgtccggctgctccgcctcgtctgtgatctggtactttgtccggttgcgctcaagcagagccttgtaatggttcaattcctctctgaccatctgcaccgcagtcgtatggtcaagatcttctttcaactggaaatggatggtctgcagcaggcaagcggatttgattcgtttcatggtaaatttcctcctgatgtcgatggatacccgcaggtatcagatggaattgtttccggcaatccgagtttttggcggatatatgccccaatatcttctgtgcccaggttcagagcgaatgaaaattcttgggcgatgatggactccgcctttttcaggatattggcgtctgtatttgtgagtccctgttttccatctctggatttcagatagaaacaactggcgagctgcaacaactcatgttcatcccttcttgcaaggatctcatgagatttcgcaagcctccgtttccggtcgctgatccaggatatatcttcctccttcacactggcaatggccttgtcgatctcctgaggggatagcaccggccgcattttctccaagagctcctggttgtccgccggaacgtagacgcgggagcctttctgataaaccggacttaaaatataatagtcgcgcttgggctgggcagatccaaatttcaaggaccgcctcccgtcgatcctgcaaacgccctgatttccgtagttcacatagtcccctatattgggcattttcttcacctccaactgaggatttcctcatttctataacaaattataccaaaatttttcccgttttttcaaagggcgtttttctcaaaaaattgacgcgcgtgtattggtgaaaatgcgcatatagacccgtaactacttttgtggcagatacagaaaataaaatcaacgcttgactttttcggatttgatctgttaaaattaaatggtcaaacagcttgcagcgtagaatcttgacggttctgcgctgtttttttgtttgtacgcagttttcaggcagcttttctctgataaagactccaagataccaagtaaacggaggtcaacccatgcggtctaaagagcaaacacactatctgggacaggagaagatcccgaaactgatgctgaagttctccatcccctgcatcctctcccttctggtcagcgcgctctataacatcgtggatcaggtctttatcggaaacagcgagatgagtgctctgggaaatgccgccaccggcgtggtgttccccatcttcattatcgctcaggcatttgcctggtgctttggtgacggctgtgccgcctatctgaacatctgtcagggaaagaaggacacgaaaaacgccaccgcctgtatcggcagcggcatcacgatcaccctcctggtcagcctcatcctgatggctgtctttttcccgctgaaggagcagattctcactctgttcggcgcgtcggaaaataccatcgggatggcggtggagtatttcaacatcatccttgcctttttcccagccaatatgctgatgaacatgatgaactcggtgatccgggccgacggcagtcccgcctggtctatggcctccatgctgtccggggccatcataaatatcatcctggacccggtctttattttcggcttccactggggaatgtccggcgcggctctggctacggtcatcggccaggtagtgtcctttgtgatcagcgtcatctacttcttccgcaccaagacgttccggctgtctgcgcagaattttatcccccatttccgcgtgttctccgccgctctaaaactgggggcctcctcgtttgtcacccaaataaccattgtgatcatctccctggtctgtaatatcatgctggccaagtacggcgcgctctcccaatacggggtggacatccccatcgccatcatcgggattgagagcaaggtctttaccttcgtcatcaatatcgtggtcggcatcgtcctgggctgtcagcctatcatcagttataattttggagccggaaactacaagcgggtcaagctgacctaccgctacgcgatgactgccacagtgatcatcggactcgtagcgaccctgatttttgaacttgcgccccggtttgtggtaggaatgttcggtcagcccaccaatgtgcccaaccccggcgactactgggaattcgcggaaatgaccttccggatcttcctggccctggtggtcctcacctgcgccatcaagatgacctcgatctttttccaagccgtgggcaagcccatccacgccgtgatctcctctctgacccgcgatatcatctgctttgtccccctggtgatcattctgccccggttctttgggatcaaaggcatcctgtacgccgcgcccatcgcggatctgattgcctccctagtgatgatcgctatgacggtgcagttcatgcgctctctcaagcggaaatccgccgccgtgccagagactgccgcctccgcgatcaagccgacccacaagggcgtgatcatcaccatcgcaagggagcacggctccgccggcaagcagatcggaaaagtcgtggcggagaaactgaacattcccttctactacaaggaggtcgccgctctggcggctcaggagagcggcctgcatagagagttcatctcagacctcaatgccaatgccccgcagattctccacgacctgtacctcagcacagatgtggtacagcaggcggtccaggcccaggatcagatcatccggaagatcgccgatcagggctcctgcgtcatcgtaggacgggcggcggactatgttctgcgggattacgacgatgtagtgcggatctttatctatgcgccggagacataccgtgtccagaaagtcatggaggtgtacggcgacacccgggaggaggctgtcaagaacattcggcgttcggacgaggcccgcgcagcctactaccacagcatctcggacgccaactggggagaggcccacaattatgacctgctgctggacagctccatcggtgtcgaggcgtccgccgaggcaatttgcggttttattcgctgcacgcatgaaaaccaagtgaaaatgaaatatgcagggtgatgggcgataacttttgccgccgcatttttccaagtgacggatcacttgtagaacacagaacgacacttggcctgcccggacaacataccgggcaggccaggtgccttatacgcaatatatagcgtttttatagttgacagctactaaatcctgtggtatattgatgatgttgatttttgtgcgcatcc

SEQ ID NO: 13584 - DNA, 26668 bp, Unknown
  gut microbiota DNA sequence
gggtgctcttcatggatggcggaaagatcctggagcaggagcagccccaggccttcttctccaatcctaagcacccccgcacccagctcttcctctccaaagtcctgtaagctcaaaaaggcgccccgctgtcctttgacagcggggcgcttccgcctttccagatggtatgcagggccgcccaaaagtccgttgtatgggcgccggccgtttcccgccgcatccccggggagggcccctcataacctccggctcagccaatggccagcttgatataagagatcgtccggagccgaggccccggacgatctcttatcatcgaaactgatcctgttccgcttccgcctttggcgaaagctccacgtgctcccttgctcgtcctctccaaaccggacccgcttcgctgggctccggtttggccggcggcagagacgccggcttccgcggctttacagtcccagcttcatggacaccacgttgtccaccatggccagggcattatccagcatcagtacgtccttgccgccgcccatggcgctgtccggcttgccgccgccggaaccgccggcgatggcggacacctgcttgatgatatcccccgccttcacgccccgcttgacggcctccttgccgcacaccgccaggaaggtgatcttctccccattgacggaggccagcaccgccaccacgctgggctctttgtcacgcaggaagtcgcccatgttccgcagacggctggcatcggcatcgggcacggtggcagtgaggaccttcaggccgcccacctcgtgggccgagaagaggaaccgctcagcctcgcccagagcctccttggctcggaatttctccagggactggcgcagctccttcatctccgtcatgatgtgctccgccttgtcccgcagttcgccgggcttggccttcagggcggcagcggcctggaagagcatctcctggttgcggttcatcacgtccagggacgcctgcccggtggtggcctcgatgcggcgcacgccggaggccacagagaactcgctggagatgtggaacacccccgccttggcggtgttgtccagatgggttccgccgcagaactccacggagtacccccccatgtccaccacccggacggtgtcgccgtacttctcgccgaacagggcggtggcgccggtcttcttggcctcctcgatgtccatcaccttggtgtccaccggatatccctccaggatggactcattcaccaggcggttcacctcgctcagctcctccggcgtcatggcggagaagtgggtgaagtcgaagcggaggaagtcgggctccaccagggagccggcctgatgcacgtggtcgcccagcacggtctggagggccttgtgcagcagatgggtggcggtgtgggcccgctggatggcccggcggcgcttggcgtcgatggaggcggtgaccgtatcccccaccttcacattgccggagagcacccggccgtagtgcatatatttcccgcccttgttcttctgtacgtcgctgacctggaagcggaagccgtcgttctccaccacgccgtggtcggccacctggccgcccatctcggcgtagaagggagtctgatccagcaccaggatgccctcggcgccggtgcccagctcctcccgcagctcctcgcccgccaccagggccagcaccttcccctgggcagaatggctctcatagcccaggaactgggtggcgggcatgtccttgccaaactccacgccggcccagcccaggtcgcccagggcctcccgggccttccgggcccgggtcttctgctcctccatcagggtgtcgaaggcggccttgtccagctccatgccctcgtcctccaccatctcgatggtcaggtcgatggggaagccgtaggtgtcatacagcttgaaggcgtccgccccggagaaggtcttctccccccgggccttgtgcccttccagcatctccccgaagatcttcaggccgccgtcgatggtcttggcaaagttctcctcctccacccggatgaccttggtgatatagtcctggcgctcccgcagctcaggatagtggccctcgttctcgtggatgacggtgtcgcacacctcatacaggaaggggtggtccacccccagcagcttgccgtggcgggcggcccggcgcagcagacggcggagcacatagccccggccctcgttggaggggagcacgccgtcacagatcatgaaggtggcggagcggatgtggtctgtgatgacccggagggacacgtccttgctgtggctctcgccgtagtgggcgccggtgatctgggacaccttgtgggtgatgttcatcacggtgtccacatcaaagagggagtccaccccctggcacacgcaggccaggcgctccagtcccatgccggtgtcgatgttcttctgcttcagctcagtgtagtggccctccccgtcgttgtcgaactgggagaagacgatgttccacacctcgatatagcggtcgcagtcgcagcccacagtgcaccccggcttgccgcagccataggccgggccccggtcgtagtagatctcggagcaggggccgcaggggccggagccgtgctcccagaagttgtccgccttgccgaacttgaagatgcggtcctccggaatgccgatctcgtcccgccagatggccatggcctcgtcgtcggcgggggtggtctcgttgccctcaaagacggagggatacagccggtccgggtccaggcccacccactccgggctggtcaggaactcccaggaccaggcgatggcctcgcgcttgaagtagtcgccgaaggagaagttgcccagcatctcgaaataggtgccgtggcgggcggtcttgccgatgttctcgatgtcgccggtgcggatgcacttctgacaggtgcagacgcggtggcgggggggctcctgctccccggtgaaccagggcttcatgggcgccatgccgctgttgatgagcagcagggaggcgtcgttctgggggatcagggagaagctgggcaggcggagatgtcccttgctctcaaaaaaagacaggaacatctccctcagttcattcaggccaaagggcttgggctcgcgcatggtggtctacctccaatattttttcatgtttttgtgttacaaataaccgggccatatcatcagtcgccccggaacaggccggtgaaattgttcaccagattggacaggctccagctggacttctgaagtccggcggacaggccgatcagctccatgtccgggtcaaaggccacccggatggacaccttctcctgggagaagatgcacaggagctgggcgatgccgtgctcctccccctcggtgctgccagtgacctgggcggacttgagctcctgatagtcccccgcctcctggaacaccggctccaccaggtcctggacgctctgggcggtcaggtctgcccggatatcctcccggaaggactcatataccgcctcgtagtcgccctccaggagctggtccaggacagcctccccggcggtcaggacggcctctgtgtccatgccctggggcaggggctccgcctcctcctgggaggagcagccggccagcatcacggtcagggccagggccgccgccagcagcggcacgatcctctgtttcatggtctgtcctccagcatcagctcagaccgggcatagagcaccgcccggcccgccagaatgacccggtccccttccatccggcagtacagggtcccccctctgggggatgcctgccgggccacgaaccgggtcttgcccagcttttgcgcccagtaggggatgatatggcagtgtccggagccgcacacagggtcctccggcacccccatctttggggcaaacgagcgggagacgcagtcgtacccctccatccccggcgccgtgacctgcatcagggcccccttcaccttcagcagcttgtccatgtccggcttcagcgccagcacgtcctccgcccggtcaaagacgcacagcaggtcccgggcccgccagacctccgacggccgcgcccccagggcctgggtgatctcctccgtcacctccagccgcttcagctggtaggcggggaaatccatgctcagcagctctccctccgcccgcacggtcagcagtccgctgagggtctggaagccgaccctctccactcccggctccacgaatctggtgatgatatgggccgcagccagggtggcgtggccgcataggtcgatctccccgccgggggtgaaccagcgcagccggtactcctccccctctttcacaacaaaggccgtctcagacaggttgttctcccgggtgatcttcagcatcagatcctcctccggccaccgctccatcacgcagaccgcggccgggttgccctcaaatatcctgtcggcgaaggcgtccaccacatattgtctcattccatcagctccttgttccataaaaaatcgcccctgaccaagtcaggggcggatcatcaccacggtaccaccctgatcgccagagcacgccctttcgggagcgctccggcctctcagcatcccagctaacgggggatcgtccgtcccgctcctcacgggccgctccggagtggcctgcgccgccgcttctgccgagggctcacaccgctcccctctcgcttcaggctgcctgctgcgcttggctccatcatcgcatttaccgcaatattttatcacaatttcggcgcttgtcaaccgttcccgccgctttttccaaaacgtgcctcccattcggcgggcttgaagcccaccagcacgaagtcctctcccgccaggatgggccgcttgaccagcatcccgtccgcagccagcaggtccagctgctcctcctcgtccatgccgggcagcctgtccttcaggcccagagccttgtattgcaggccgctggtgttgaaaaatcgcttcaggggcaggccgctcctgtgctgccactcccgcagctcctcctttttggggttgtccagcttgatgtcccggaactcataggggatcgcccgttcctccagaaaggcccttgccttctggcaggtggtgcatttggggtagcatacaaagagcatgttggtccctccgtcctgaatgttgggcagcccgcaggaagcgcacgccctgctccatactttaccacactccgggacgcaaatcaaggttctgctccgccgctctcttgaatttctgcccatgcaatggtataataggggcgacaaaaaggaggtgacatccatgctggtctccacaaggggcagatatgcgctccgggtcatgctggagctggcccagcacggccgggactgctacaccgccctgagctccatcgcttcggagcagggcatctcaggcaagtatctggagagcatcatctccaccctctccaagggcggcctggtggagggcgtgcgtggaaaggggggcggctaccgactcacccgtccgccggaggactactccgtgggagagatcctgcgtctggcggagggctccctggccccggtggcctgtctcgactgcggctccgacccctgtgcccgggccggcagctgccgcacccgtcccctctgggagcggcttgacgcgctcatctgtggatatctggaccaggtgaccctggccgatctcctctccgctcccggctcggactcctctccctgctgagtggccgtccctgttccggctccgcggccgcggctcctgtccgggagccgcggccgctttttccggccctccggcgcagagcctgatgcccgcaccggcccccgggtcctgtgtaggggcgcacttcgtgcgccctcattcctgccttgaaacagcccctcaaatattgtatcatggtaacagaaacgacaggggttctcggcgggtattttcagggaaaactctgcttaaacatcccctccgatgcgtctgtgtgtccccgccctctgcggggcgggaccgcggaggggaaagcctgccctggggccccaaaacaagagcaggagaaaaaactgtcagcacggacgatggagggagctctatggacctgaacacgcgaaagatcctatccctatttgcaagcatcctattcaccattccggtctatatcattctgcacgagggcgggcatgccctgatcgcgctgtcctgcggcgcccgcatcacagaattcagcattctgggcgcctatatgcgctatgaaggcggtacgttcaccgctctgacgctgtctcttttttatattgcgggaatgctgctgccggtcctcatatccatcgcctatatgctgctctatcgggacgcagcgcagtccgtcttttatcgaattttttcttttctgtttcccttgatcctcacagcccctgccctggcatgggggatcgtccccctcctgtatctttccgatcaggcacccccaggggatgatgtgaccggattcatagaaagctccggtgcaagcccctgggctgtcctgttgggtgctgtcctcctttttgccggctgtctctttctggcctggcagagaaagatcatccaaaactattgggccgctgtcaggctcggcgtgtcatgagccgttcccgcggggccaaggctgtccccttggtgcggataggacgataccctccgtacactgagggcatctatggcgcggaacagaaggatctcaggggatgcaaccggcagttgcggaagtttcagccgtagttggtagcatgttaccatggatcgcagtatattgtttccaagggggtaacacaaatgttgtctgaaagaatatatcagttcagacgaaagagcggcctttctcaagagcagcttgcggagaagataggcgtttcgagacaggccatctccaaatgggagagcggaacatcaatgcctgaatttcaaaaactgttggctttgagtgagtgcttccacatcacccttgatgaacttgtaaaggacagaggggctgaggaaaggacagaagaaacacggtcaacgccaaaagaagccaagggcccgaaagccatggatcagaaagccggcatttgtctttgcctggctggcgccatctgtctgacactatccggactcatgatggtcataagccccggtgcggcagagcagctgaataccgcttcaacgatcaccctcaatgggtctggtgtgctcatcgccctgtgcgtccttttgatggtcactggagcggtcctgatcctgcgaaagaaatgaacggaggcaagcctatgcggaaattgagtcatctttttagcgctgtcgcaattttgttgtcagatgtcatgtgtgccgttgtggcatttggctatcgtgatatgctctgcgggatcgagcactcatgttacagcgcacctgccagcgtggcatttctctatgccatcccgtttggcatcgggatcgcggtatgttcccttgtcgcgtacatacttcataaacggtcaagttaacaaatgatccgatctcaaaggctccgctcgtacaacgtcccccggctgcaccggggactgcgcgcagaaaaggcccgccgctgacgcggcgggccttcttatgtcaggggccgtccgggagctctccccggcgcgggtcacagggtgtcctcctccgcccggtccagggcctctcccacatcgaaggggggcatgtcctcctccgctccgcttggagctgccccggaagcgctctcgggaggggttcccccggggacgccctggcggtacttcatctcctgccactgctccttggtgatgagcagctggcggggctttgagccctcgaagggccccacgatccccttctcctccagctggtccaccagccgggccgcccgggcatagcccagcttcaggcggcgctggagcatagagaccgacgcctgtcccgtctccaggatcacctcggctgccgcgtcgatgagctcgtcgaactcctcccccacctcctcgggggcggagccgcccacgcccttggcgcccttctccttctcggcggcgtgctgctcgatctcctgcatcacctggtcatcgtagctggcgtcgccgctgttctgcttgacaaagtccaccactgcggccacctcctggtcggagatgaggcagccctggacccgggtgggcttgccggagcccagggggaagtagagcatgtcgccccggccaaccagcttctccgcgccggtggtgtccaggatgatgcgggactccaggctggaggccaccgcgaaggcgatgcggctggggatattggccttcatcaggccggtgatcacgtcggcggagggccgctgggtggcgatgatgaggtgcatgccggaggcgcggcccatctgggccacccggcagatggactcctccacctccttggccgccaccagcatcaggtcggccagctcgtcgatgaccaccacgatctggggcattttggtcatgccctccgtcctggcggccagggcgttgtaggcggccagatcccgcaccccaacctcggcaaaggtgcggtagcgcttcatcatctcggtcaccgcccactgcagggcgcccgccgccttcttggggtcagtgaccaccgggatcagcaggtgggggatgccgttgtagatgcccagctccaccatcttggggtccaccatgatcaggcgcacctcgtcgggggtggccttatagagcagggagatgatcagggagttggtgcacaccgacttgcccgagccggtggtgccggcaatgagcaggtggggcagcttggcgatgttgcccacgatgcagtggccgccgatgtccttacccacggcgaaggacaccttggaggggctgtcggtgaactccctggagccgatgacgctgtggatgttcaccggcgacaccagcttgttgggcacctcgatgcccaccatggagatctggtccgggatgggggcgatgcgcacgccggaggcccccagggccagggcgatgtcgtccgccagattggtcagcttgttcagccggacgccctggtccagctccagctcgtaccgggtcaccgaggggccccgggtcacgttgacgatgttggcgtcgatgccgaaggagtggatggtgtcatccagccgctgccggttggcgttgagctccaccagggcctccccgccgatgtcccccggtccctccttcagcagggagagggggggatactgataggggtgctcccccgcctccgccagccgggactggacatcccgggccacctcctgggcggcctggcgtgcctcctcccgggagaccttggccggctccggctcccgggggctctccccggagaggggggcggccggcggggcgggcgggacagacgggacaggcgcgggggccggctccggcgcctgccggaccagctccgcctgggcgggctctgccgccggctccggcgccggggcgggctgctccgccgtccgctgctccgcccccgccagcacctggtccggagcggggacatttgccttgcggttgaaaaagctccccttctttttcacctcgggagcggtctgggccgtcttgcccaccagggggccgtcctccaccgggatgtcgatgtccgcccggcgggaggggggccgaacgggctccggggcggcaggccgctcctcccgcttgctccggcgcgggcgctccggctcctcctccggctcatactcatagcggggccggtcgaagatccagtccgccacctcggccagggagaggcggaaggcccccagtcccgccagcaggaaggccagcacgaacaggatggtggagcccaggcggctgaacacctggacgctcccctgggccagcacgccccccagcacgccgccggaggtcagctcctcccccgccgcccacagggtcttcaccagggcggcgtcccagggcaggaccctgcccagcagcccgtggacgatgcaggagaagagcaggggcagcagcagggcgcaggtcacccgcaggcgcaccggccgcccccggtggaaggccaggatataggccgccagcagcagggccggaggcatcagccagaagccatagcccagcaggcccttcagcagtccggagaagaaatcgatgaaaatggcctggatgtggaaatagcccagcgccgcgaacagggccagcgccagacacaccgccgccccgatctcccgacgcatgggccggcgggccggcgctttgctcccgcggctgttcccccggctgctgccggaggcactgccgctcctgcgcgttcccccggaggaggtgcgctttcctccggtcttcttttgtgatgcggccatgtgtccgcctccctttccggtcaatcaggtcttggtccggggcgccctcacagccccgccaggctggcggccagggagatggctcccgccgcccagcagtagtaggcaaaggcgccgaactttcccttgcccgccagcaggttcaccaggcggatggcgaagtagcccaccacgccggccaccagcatgcccaccagatagacgggcagaaggctggtgtcgatccccgcctggaccgcgtcgatcagctccagcagggtggcgccgaagacggcaggcaggctcatcaggaaggagaaccggacggcaaaggtgcggtcatagccccgcagcatccccgccgagatggtgatgccggaccgggagatgccgggcaaggtgcccagcgcctgggcgcagcccaccagaagggcgtccagcacagtggcagtccgctccgttttccgcccccgagccatccggtcggagaaaaacaggatgaagccggtggccagcagggcgaaagagacaaaggtcacgttggacatggccccctccacaagatccttgatcggcagcaccacaaacaagggcagggtagccacaatgatgagcagcaccagccgccgggcggggggcagcttctcccggccccgccgtcccctggaggccaggtcccggatgcccaggaaaaattcccggatcatgtcgatgatgtcctgccagtagtagacgcacaccgcgatcagggtggcaaagtgcaggagcaccgtgaaaaacatctgggactcctccacgttttccatggcgaagaagtgctggaacagggccaggtggcccgagctggagatgggcaggaattccgcgatcccctgcaggatccccatcaagatcgacatccaataggtcaaaacgatgtacctccgtgaaactgtcatactctgtcccgttccccggaagagtcccctcctccggaaacaggcactttattatattagcacaagcggggagggaattccagtctttttcctccaaacttatgtcaacttctcgtcttttcccctccaggcaggagaggccccgtccggcccaggctggacggatggaaaaaagacgctgtccgtccgaacggacagcgtccctctcacctgtccggcccggccggcagggtcatctgcttatagaagtccagggtgcggaagccccgttccagctgggtgagcagatacgcctcgctcaccccggccagctcctccagggccccgctgtccagccggaaggaaaacagccgccgggcgtccccgcagaccacatgccgcatagcggccaggacggggggcgagaccggcatggagatcccctcccccacaccgcctcggcatttggcgcagtggagcgccccctcccgcaggtggaagcggggctcctccggccgttccgcgccgcagacggcgcagccgtccaggatgggctcatagcccgcagcgcacatcagccgcagctcaaaggccgccttgaccagggccaggggcttctggggcatctggtccagggcgtacaggctgttgagcaccagggagagcagctccggcgccggcacgtcctccaccgccagcgcctccgccgcctcggcgaagtagcaggccagggccagccgctccacatcccggcgcagccccagaaactcccgctccaccgccgcctccttcacggtccagcggccccggtactcatacagcaccaggtccgaccaggccagcagctggaccccggcggccaccgggctccccttcttacggcagccccgggccgaagcggtgagcttcccgctctcctgggtcagcagggtcaggatcttgtccgactccttgtaatccaccgcacggaggaccagcgctttggtgcgcatatgcatctcgtccgctcctctatgtatctccggccggtccgccgagggcgggccggccgggcagttcacatatcctttttgtccatcatgcccggcacagacgggggcagagtcccgccccccggcgctccgggagggggcatgggagggaagaccacttcctccccctccttcagccgggccgccagataggcctggggcagtccggtggcaaaaaagaagttccaaaatccgctctgttccatctgtcttgccctcctgtctctgctgcttaggctggcatctccagtggaaaacatgcgcggtaatttttaggcccggtcttttccctcactcatcccggtatccgaagttgcggatcagattcacgttgtcgcgccaattttcttttactttcacccaggtctggaggtacaccttggtccccatgaatcgctccatgtcctgccgggccagggaggacacctttttcagcatggctccccccttgccgatgatgatccccttatggctgttcttctcgcagtagatggtggcgtcgatctcgatgacctcgtcatcccgctcggaaaacttggtgatctccacggcggtgccgtgggggatctccttgtccaggcagagcagcagcttctcccgcaggatctccgccatcatctggcgctccggctgatcggtgaccatgtcctctggaaagagctggggcccctggggcagaaacccgtccagtacgtccagcagctcctccaccccctcgccggtcctggccgagacagggaccacggcggtgaactcatgggcctgcccgtaggtctggatgacctccagcagctcctccttgtgctccagggtgtccaccttgttgatgaccagcaccgaggggcagcccagagtcttgatgcgggcgatgagctccgcctccgggccgccgacgttggggatgggctccaccagcagcatgaccgcgtccacgtcggccacgctctccttcaccacgttcaccatgtagtcccccaggcgggtgcgtgccttgtgcaggcccggcgtatccagaaagacgaactggctctccccccggttcagaatggcgcagatccggttccgggtggtctggggcttgttggagacgatggccaccttctcccccaccagggcattggtcagggtggacttgcccacgttggggcggcctacaatagagatcattcccgattttttgatggacatagcgtttgttcctcaactttcttttccggcggtgtgagcactttccgccttatgatccgttccccgctccagcagctggtccagcttctcctccatccggcggagccggtctgtctcctcctccagccggcgccgggtctgctggagccgctcccgcagctgtatgatcagcgccccggccagggccaggagggcggtggccagcagaaagcaggccatttcctccccgatccaggaggccagcagcccgccgaaaaagagcagaaatccgccgccaacagccagcaggagccacaggacaaaaaagttggcgagcatcgttttccctccctgtttttcatggagcgccgcccgctgacgggcgggcgcaggtcctttaccagatgcccagcaggtgctgcatgcccaggctgacgcaggtgatggccgcccagcaggtgaagcccagcaggatgggcttgcctcccgtcttcaccagcttgaccacgtcggtgttgatgccgatggccgccatggccatgacgataaagaacttgctcagggtcttgagcagggagaaaagctcattggcccccgccagggcgggaccggagagcacggcggtgaccaccgtagtgatgacggaggccagcacaaagtacaggataaacatggggaacaccgacttggcggacaccttcacgccgctcttcccgccggccttctccgcctggcgcacccggaagagggccagcgccagggtgatggggatgatggccagggtgcgggtcagcttgacgatggtggcatactccagcaccgcgccgccggtgttgtgcagggtgtcccaggtggaggcggccgccgtgacggaggaggtgtcgttcaccgcagtgccggcgaacaggccgaagccggtgtcgctcagcccgatggccccgcccagggtggggaagatcagggccgccagcacattgaacaggaagatcaccgagatggactgggcgatctcctcatcgtccgcctcgatcaccggggcggtggccgcgatggcggagcccccgcagatggaggagcccacgccgatgagggtggcgatcttcccgggcatatgcagggcccggctcatgaggaaggccacgatgagggaggtggcgatggtggacaggatgatgggcagggaggtgagccccacctcaccgatcttccgcaggttcaggccgaagcccagcaggatgaccgcgtactggagcacctttttggaggtgaaggccaccccgtccttcaccttgtccttgtttttcatcaccgcgcacagcaccatgccgaacaggatggccagcaccgcgctgcccacgatctccagagccggggccagctccaccaaaaaccaggccagcagtgccaccgccaggcacagcagcactccgggtgcccttttctgccaaatattcatctctttctctcctagatctctctttctgtctcccgcggccggccgccggcctctccggcatttcgggccggtgcgcctctgcgggactgcttattgtaccacaccggcccgccccgcgcaatcccctccgggcccggcgggacattttctcccgcttccccgcgggacgtggcctctcatccccggcggatgcccagcccctccaggatgtgctcctcccgccggcgcatctgggccttcatggggccttcgtccatgtggtcatagcccagcagatggagcacagaatggaccgccagatagctcagctcccgctccacactgtggccgtactcctccgcctgggcggcggcccgctccagagagatgcacatatcccccaggggcaccagcccggtgtccgggtcctcgtgctcttcccccggcttctcccccggagagaggtcgaacatggggaaggagagcacgtcagtgggcctgtccaccccccgcatgtccagattcacctgatggatgccctcgtcgtcggtgaggagcacgttgatctcacagggcaggtccatcccctccgcctccagggcggcggagatgacccggcggagcaggggctccacagtgtccggggcctccacctccgcctccaggatgatccggtgctccggccccgccggaggacatgtcccccggttgacctcccgcgcatcggtccggcccgccagatagtccagggagacgccgaagaactccgccgccttcacaaaggtgagaaagctgggggcgttcccatccttctccaggcgctggtaattccgccaggcgatggacaggtgctctgccgtctgcgcctgggtcagaccgcgctccttccgcaggcgcctcagccgttcattgaatatcatttgtacccgcctccattgatggatatcgtatctcttcctcccgctgcatcgtttctcccggcgggcgcgcgcaccctgcgcgggggctcttcagggcgggacctctttgggatgcccgaggtcagggccgctcccgcctgtcctttttgggaccgcggcgctcctcgtcctcctcataggccttgatgatccgctggaccagcacgtggcggaccacgtcgctctccgtcaggcggcagatggagatgtcctccacccccttgagcacccgcatagcctcccgcaggccggagaccttgtccgcgggcaggtcgatctgggtgatgtcgccggtgatgacgatcttggagccgaagccaaggcgggtgaggaacatcttcatctgttcccgggaggtgttctgggcctcgtccaggatgatgaagctgtcgtccaaggtgcggccccgcatataggccaggggggccacctcgatgttcccccgctccagatacttgttgtaggtctccgcgcccagcatgtcgaacagggcgtcgtacaggggccgcagataggggtccaccttggactggagatccccaggcaggaagcccagccgctcacccgcctccactgcgggtcgggtgaggatgatgcggttgacctccttggcccggaaggcggccaccgccgccgccaccgccagataggtcttgccggtgccggcggggccgatgcccagggtgaccacgttcttcttgatggcctccacatacttcttctgtcccagggtcttggccttgatgggccgccccttggcggtgacgcacagcacgtcccccgccagctggctgatctggctctcgttgccgctgcggaccagctggatgatatagcgcacgttctgctcgttgatggcctccccccgggaggagagggacatgagggcctcgatggccttgaccgcgtacatcacgttttccgcgttctcgccgctcaccttcagcatggagtcccggctcaccaccgagacctccatctcgccctcaatgatacggatgttctcgtcaaaggagccgaacacgttgatggtctcctccagccgctccaggctgatgctctgttctgtcatttgcaggaaatctccttacttgttatggttgttccggggcgctgtctccggcgtccggtgccgcgggcacctcccggccgatctcctcccggcactcggcggtgagggtgacctccagccagctgtccgccgcccgggcggtgtagtaggtggagaccacccggccctcctccccgatctgctccttcagctgcgccagcaggcgctcctccaacagagtctgggcggcggtgcggtccacctccgtctggacgggctcataggcccggtaccgctccactgtccaggacagggggagcgtgagcccgccgggcagcccggcctggtacactgtacttattttatcataccagggccaggaaatgccagcgttttgataaaattccacgggatatcccaggaccgtcagggtaaagcggcttttttcctctcctgtgtacgccttgacctgggcggtgagcgggatggacgcggtgagggtgcgccaggtcctggcttccacccggccccgggcgtgggtctggtagtagcgcaccggctggtcgctgtacatggggggctccatgctcaccgtgccgctgatgaggatctccccctccgtcactgtatccccctccttcaccgccgcctccccgtccatggtctccacccgggtcacgatgccgtccgcctttgacaccacgtggtagtggccctcctcctgggtcagctcggggggctggaccgcctcccgcacctgcacctccagccgggtgccgtggaggttcagggacatccaggacagctcatccagggacagcagggcctcctcggcgatctgccgccgctccagggccggaccgtatgccccgggccgcacccccagccgccgcagctcgctgaggatcaccccagtggggacggtctcgttccctgtcacctggatggtgagcacgaagctggacaggatgcacaccgctgccagggacagtgcgaaccccgccaggaaggcataccgggtgcggaagcgggccaaaaaggcgggcaggccccggctcccctccgtctccacagtgcagcccacccgctccgccagcttccacagctgcttccggtcctcctgccgcaccgtcatggacagggtgtgcccatcccgccactccagggcccagaatgagatcccattctgggcgcacacgttcatcaggcgctccgggaagggcccccgggccaccacccgcagctccccccgcagccggttcacgatccactgcacacgcgttccctcccctcaggccagctggatgccggcgatgcggccggtgatgagcagctccagcccggtcatggcccgcagctccagcccctggccggtgatctggatgacgaaggccccgccgctgacgtggatctcctccgttccgtaggccaggatgccccggtggttctcgatccgcagctcccggtcccccaccagctccaccttgggcagtccggccagggcgtccgcaggcagatcgaacagctctgccgtcttttccaaaagcccctcccggcgcggttttttctccatggcgcatcacctctgcttatgtgtatgagggaggatgggaaaagttgtacccgatttttccgcgccggccccgccccagcagggcgggcagtcccggacaggaacagccgccgcccggtttccgggcggcggctgtcctcagcagtcccacggggctgctggccgtctttttctctctgttcatgggatcggcggcgcgggatgggcggccggagcgccgcctcacgcctcccttcgtatctccggctcctccgggccgcccttgccccgctcctccccattcagctttccctccgcccacaggcagaacaggtcaaggatcagcgtcaccgccagcaggagggcggacacccaggccaccgctccgctggtgtccatcagggcggaccagtcctggagctccaccagatgcttgttgtagaggacctgcaaaaacagggccccggcgcaggccgccatgctgaggagacaggccagccctgcccggtccccgcccggctttctccgggagaaatacaccgctgggatgccccaggcggtcaggcccagcagcaggctccccaagttcatccatccgtaccccacttcattcgtcctttctgtgtcctggcgcttttgtcctcccataggtctcccccaaaggggcggccgtttcttcggggcccgtttttctccgcagggtccaattccctcatcgggccctgtgcaccgccctccggcctctgtgtaggggcggggcctgcccctccgtcccattggaccggtccggcggaaggcgccccctccggtcagccggcgtcttcaaactccacccggatcacttccccgtcccggaactggagcaccatgacctcctcccggccgctgttctcccggcccgcgccgatgtagtagccgtcccggtacatccccacctccgggtcctcccgggtataggggtgctcccccagcagggcctgcacctccgccaggtccatgccctccagcccgtcgtactgctccagcaggctgtctaccagcacgccccggtcatccagctcctcccaccgggcctgggtgaaggtctccggctcatagaccggctggggcagcatgcggctcgcccacagccacaccaccgccgccgcggccgccagtatgaccaggaccacggggacggtcagcactgccgtcagccccagttccagagcccggcccgccgccctcttcatttccgctgcgttcatcgctgtgttcctcctctctttttatgagacccgccaacaggccaggggctctccatgcacgaacaaatttacataacgccatcccacctggtggagcagatccgcatcccggaccaccagggtctctcccgccaggcggaccacctgttctctcccgccgcttcccacaagccccgctccggcgcaggcggccgcccccagcagggctgccgcacagcccaggacgcacaccgctgtcacccagtctttccccaggcagagcgcccccaggccccggatggtccctgccagcaggaggaccgccagcccgcccccggtcagagacagggcggtctggacccacccccgccagaagagcccccgttcttccagcagggcaccgcccccatactggaggaccagcacacagcccagcgccgcggccaggatggccagccgcctctgccctggggctctcagatacaggcaggcccccagcgccgtcagggacagcacccccagggccgcccccaggccggaggcggtaaaaaagctgagccagctcacagtgtccatccccgtcacctcccgggccccagctcctccccccggaggagccagctttcatatcggcagaccctggggcactgatggctcccccggtcgattcccctgtactccgccaccacagcctgtccctcccactcgctgactcggtcataatcccgcaggaaaaagacgaacaggagaaggaagagcgccagcgtcagcagggccgcgccgccggccagacccaggacgatctccggccagcgcccccggacccgggggcgctcccccaggacctggagcccataccagatcccctggaagaggaggacgcacagtaccagcaccatcaggtttcggacccagcaccgccagcccaggccggccagcgccagcaggaagccgcccccgtaccggactgtcaggaccgccgccgcccccgctagggtccggaccatccgccgccgctccactgtctcagtcctcccacacatagacctgctccccgtggacgaaccagtttacataacggtatccagtctcccggaaaatgccgctgtactccgccaccacggtctgcccctcccactccctgacccgatccctccacagccccagcatggacagcagcccaagacaggccgccagcaccagcacagtcagataggagcagatcctgcccaggctctctgcccccgggagcagcgtatgcagctcccggggcaggaggagggccagcgcagccgcggcgatggcagctgccgccaccagtccgccggacacccaccgccgccagcccaggcccgccgtctccagcagggcgccgccccccagccagaccgccagcaggagcaggacggccccggccagaagggccagccttcggcgcgcccggccccgccccagaaacagacactggcacagcatgcacagctcccccgccatggtcaggggcatcaggatcaaaagcagcatcaccacaggcatgtgtttcctccatagtttaccatattataatttatgttaccttaaagcgcacaccgggccgcgccgttggagcggtcagaaccgcatctcaaagcagaaccacccgggctccagcctgcgcacaaagcagcggttgtcgccccccgcctctctccagagccagccgccgtcccagggctcccagcccgacagcgccgccccctggaagcctgtcaggacgtctgagggcacatggctgatcccccaatagctggtggaggggcccaccccccagcctccgcagaggaactccacggtctggacccgcccctcccccgccgggtagagggtgacctccatcacgccccggggcagctccgccggcccattcctcgccagcagctcctccgccgcccggtcgaactcctcccgcccggcctggaagagggcctccgcccgttccgccggagggtccccggcggccaggcccaccagggccaggcagagcagcgaggcggccagcagaaaggccagcgccctcttttccctccgctccatcccgctctccctcctcaggtgtcaaattccagataggacagggtggcggcggcgctgtcgtacaccgccagggtgtagttgaatgaggatcgctggaacatgctgccctcccggtcctcctgccggtccagcagataccaccatccgcgctccggcaccgtccagcccgccagctccgccgccccgccccggtagaggaaggactccatcttgtcgtccatggggaaggggttccacctgcccgagggatggtgggacaccgcctcctccacccgggccccgtcctccggggagaaggtcagctccgtgtggagcaggccgtccccgtggaagccgccgtggtcgtcataggtgtccgttgtctgggccgtggggagctccagctccagctcccgggccacatagtcccccgggccgggcctccagatggcgctccacagcatcagaaggaccagcagaatgggcagcgccttcatcggtctccctcctccggcacaaattccagaatatccccgggctggcagtccagggcggcgcagatggcctccagagtggaaaagcggatagccctcgccttgttgttcttcaggatggacaggttggccatggtgatgtccactttctgggccagctcccccagggacatcttgcgccgggccatcatcacgtccaggttgactacgatcttcatgctccgccccctcagatggtcaggtcctggtcctctttcagctccgccgcctggcggaacagggcagacatcaccaggaaaagcaggcccgccatcagcgacaccggaatgaacaaggctgtgaaggtgaacagcggggctgcgctcctcagccgcaggaaccacaccgccatccgcactgccgccagcagggcgatgccccagcagctggccgccgcccgcttcatggaccgggcattggaccgctgaaagggagtctggacgatgatcgtggacaggatgcaccgggcctgccacaggagcacggcggtacagatgccgcagcccaggaaaaaggccgcgctccaccacacctccggcccgtaccccgaccagtcgcctcccagcatggccaggggccgcaccaccaggatctcccatgcgggcacaccagcccccagcagggagcgcatggtccccatcagggagctgatgctggggtgtcccatccccatcccctcataggccatcatggtatagcccggcaccagaggcaggaccagcagattgaagacaaataccgccagcaccatcccatacaggaccttggccatgcggacgaccacgttgtgttccatgagcgcggctccctcctttgtaattgcccatatcctaccacctcaaaacacgattgtcaatatatttttatcgtttttcgataaatccaaagggaaaagaaacctccggacgggggagtccggagacgcatcccttcaaaaaccgctctctctttctctcaccagcgcacgcggcgccacactgactgttcctattacagagataactgtttcttttccattactatctctgttactgttacggggccctatttgcacgggatcgtacaaccagagccccccgccgcgccggggtgagggggccgtcatcccgccagtgccccgccatagcgccgcagctccttccgccgctgccgccagtccggcatcagccggtccatcagcccgtaaaagcccggcccgtggtccgggtggacaaagtggaccagctcatggagggccacatagtcccgcagggtctccgggcagcgggccagggcggtgttcagggtgatgtagccctgccgccagtggcagttgccccactggctcttcatacggcgcagcctcagctccggccaggccaccccaaggggctgcaccagaggatagacccggtccagcgcctcccccagcagccgcaggcactcccgccgggcgggctccggcggcagctccggccccggggcccactgccgctccagcgcctggatgatccaccggcatttggcccggaccatggcgtccgcctcctctgccgggcagcccagcgggattgacaggctcacctgaccgttccgcacccggaggttgaggtttttcacccgctttcgggtgagcagataggagatgggccccgccggagtgtccgtgatccgcagctgctccatcctgttccgccccctctctgtacccggtctttccatggaggataacagaattttggagaaaatgcaagggcggtgagtgcctcagctccgcccggtgtgctccccccataccgctctcccggcggccggttcgggtcgtacaacggcgcccctctcctcagcccctgtgcagggcggcatatgctgtgccggatgaggagggcaatcgccccagaaggccgggcgggtctgggcctcgcccctgcacaggggccgggaggggtgcgcaccatacagggcccgaagccacggcacacggcccgtgggccggcatttctccccgaacaaaggccgcgggcggcctgacagccgcccgcttctcccattttattttccctgctgggcccgccagagggcctggacctgcgccgttcccgccgtgtaccatccgggctcctccgccgtctccacggttcccggctccggcaccacgctgctcagcacaccggcgccgccgccgctgccgtccggggctttcagcccttcaaaccagccgtagtcctccggggtgccccccaccaggaaatagtggagcaccccctccccgtcggtgtaggtgtggacgtagggggtgtcctcgtccaccagatcggtgatatcggtccgctcgccgccggccacgaaccacagccgtcccgcttccagagagaccaccagcggctccccctcttctcccttcccgtccgacatggtgacggacccatagccctctccgatggtcacctggcctccggaggccatctgatagatcctctctccccaggtccaggccaccaggcccaggcaggccgccgcggccacggccgcgatcacggcccggcggagctcccgtcttctccgtccggccacctgtcccagcacccgctggcgcacccgctccccatccaccagtcccggctgggggacaggctcactctcctgatcctgatactcgttcatcaggcttgagatcttcagcttcttcaacacaaaaccccgctttccgcaaatgttccttcagcttctcccggccccggcggagccgggtcttggcggtggacgggttgagccccatctcctccgccgcccgggccaccgtctggccgtagtagtagtgccggacgaagagctcccggtccggcctctccagctctcccagggcccgccggaccagctccgcctgctcccgctcctccagcaggcgctgggggccgtcctccgccagacagagcacgtcctcctccagcgccaggacctcccggctggcccgcaggcggttcagcgcccggttccgggccacctttcccagccagccccggatctgctccgggcgcagcgccttccggtgctcccaggccgacaggaacacgtccgctgtcagctcctcccagtcctggggccggccgggcagcacccgggcggccaccgcggccacatagggggtatagcggctcatcagctcctccagcccccgggggtccccccggcgcagggcccgccacatctcctgttcctgaatgggtgtcacatcctttccctgaaacgcgtttcacccctataaacacaggagacgggcttttggtttcaatttgcggcgtatttgtcgggatcttgcctaccagcggtcgtccaccttctccgcgaagcccagaagctccttcagccggaccgccgtgccgtcgtccagcaccgcggtgccggtgaagctgccgaacacctggtgctggccggaccgcaccacgccggcactggggcaggccgcccggtccaggatggggcggaacttcatccgaaagcgccggtcgtcgctgtcgaaggtccagggggccaggtagtgctcctggccgttcttccgtgggatatggaaggtcacctgggagagcttgtggagtttcccgccataaaacagggcgttctccgtggcggcggaggtgtctccgaagccgtatccgatgttgaagccgaatgggaccccgtccaccatgccggaggcggagccccagtaccaggtgctgcggcaggtccacacccctctgccccagtccagcaccgcgaaggagtcctccgggtcaaagacatactcccggtcccccagagtgacctttccctgggcccgcatgcagttgatcttctggttgaaatagaactgccccggcttttcaaagggcgtgcacatcacgatggactcctccggctcctgggtgagcaggatctgggcgtccagcgcctgcccgtcccggaagcggtccatatgggcgtggagggtgcgcccctctccctcatgctggaacagcaggccgtagccccgcccggccctggcgcagctgccccggagagagctctggggcagccctgtcccgcccagaggcatgagccgcatggggctgcgggtcacctgccatccctcccagaggtcgatcagggagatggagtccatccccatgtagcggttgtccgaaatggtgagggccagggcgcactggcggttcatcaccagatagcagtccctctccttcagacggagagggacgcccctcaccctggagcggtcgtacacaggcagcagcctccgggcccaccccggctgggtcagctccccctgctcgtccagcagcgggatggcctgtgtgatctcatgctgcatcagtcgtgcctcctttccgccggagtcccgccggcgttccacagggctattttaccatcgatctcagggaaaaggaagggccaacgggggccgcacatccgtgcggcccccgttggagact

SEQ ID NO: 13585 - DNA, 45545 bp, Unknown
  gut microbiota DNA sequence
cttaaatcagtatatatatttatattagttttcctttcaaaaaaagtcaagatttaggcagaatatttcttgactttttcttttaaaatctatatgcttgttctagaatatattataagtttatattatcaatttgaaaggagaaacagcaatggaaatcagagagatgattacagaaattaagggacgcttggacacaaggggcgggttgaaagccgtcatctttgttgcctgcggaggctcacaggctgccatctatcctggcaagtatcttctggagcgtgaggccaatgaaatagcggtctcaatttataacagcaatgagttcaattatgtaaccccgaaatctctggatgagaggtgcatcgtaatctgctgctccttgaaggccacagcagaaaccgtgcatgcagtggagcgcgcacggcagttcggagctgttaccatcgctatgacgggctcccctgaaaccggaatggcaaaagccggagaatatgtggtagtgtactccaatggggatgaacagatttattcccaatccaaccagtcgatggcactgcggcttgggtttgaaattctgcatcaatttgaaggatatccgctgtaccatgaggctatggcagcctttgaccagatcgacgcaatcgttgcagaaagcaaacgatccatgctccctgccgcacaatcttttgctgttgaatatcaaaacgatcctctctttcaagtcctgggggccggcccgctgtacgggaccgcctattctatggcaaactgtcattttatggaaatgcattggcgaaatgccattatgattcacagcggagaatatttccacggtccctttgaaatgaccagcgagactcagccgatgatccttctgatggcaaccgggcgttcacgctttttggatgaacgtgtacttaaattcctcaaaacctatgcaaagcgctttatcgttatagatgctaaggatactgggattgaggaacacattgatcccagaattgccgaatttttcaactctgtggtaatgatcccgctggagcgtttctttgtagagcagatgtccaagctctgcaagcactccatggatgaccggcactatatgtggaaagtagaatattgagaagatgcgcgaaatatctacgaggagggggcttgtcctgaggacaggccccctcctcgtagattccgcttcttatcttacagttctcccctgtatcctcaagatgtaggcggcagctctctgtgccacatattgcttcgctgtatccgtacatgtcggcacaggcacaggatccctgccgcagccaggagtcccagtacaatcggaagcaacggatattgtatcctgtaatacactgcactgcttcccggatccggccattgaaccgggtcatatggcaggccgtattctgcggtcaactgcttgatattcagcaggtgaacgaccgggattccccttcccaggtatcgttccaccagaccgctttgatctgtcaccggcatggcgcttcttgggtccagaactccctgccccaaagcgatcccgcgttctcccacacccatagaggtcacatttcctcccacagatacaaagcattggatggggccctggcgctcatagatctcctgtctctgttccaaattattcagaaacttcggttcttgaaagatcacaagtcccgcctgctccagccgctccaagatctccatcttctgctcgggcaacatcccatctcctgtatcattgtcgcctcccagcgtaactgcggcactgtctgttgtaagcacgccgtcctgcacaagccggtgcagcatctctggaaaggtaagctctggatcagtagcaccataagtagacgctcctactgacgaaatggggatgacttccactttcatagactggcatgctgccatcactgccagattcattgcagggaaagaacccgaaaaccctgcggccacccggtcccccggccgaacccctgcctcatagagcaatctgacgcacagcgcccccatatccggccatgcagtcgttctcttagcttctatggcaccaagggtcgtggtaatccctgtatagtagggaccgatcataccggtctgatgataatcttcctggctcatagggatatggagctcctctttatatccccttactgcggaaaagcatctggtcagcagctcagctgcctgccgctgttccatcacatatgaggtctcagcgcgctggactccgtgggacgcccaccagactgctccgaaaaggatcagagcacacagcatcagcaggcgcacaatctttttttctctctgtttcccgttcatacccggaacacctgcattcccattcccatcatgatcaaggccagaatacctactaccactgccagagacatcagagattttaccactccctgccgttccaactcgtttgctatgatgcccggcaccagcacgccaatgattcctggatcataaggcagtatctcagaggaggcaatgatcaagtcaatggtaaacgccaataaaatcatcacagcaaagcgccgtcggccatataaaatcatgaaatttcccaacagtttgccgcctccccatgccaagagtgcgatcaccagcgtatagacaattctgaccggcgtctgcaggcagaggacaatatatcccggtacgatcagcccagctggagaaaaacctgtcagttccgtaaacaaaagactgacggccaccccgatcaaaacaatttcatggtacaattctcttcccctcccccaccacacgttctatgagtgaccttcctggtcctgccaaatttccagctgcaaagatcacagtatccgatcctgttctatccaggggcacctccttttcactgcctaaactgtacaccggcctgccgggcagtcttttctttatctcccggcataccgcgcctcgggcccctccagtgatccacacttcttccggctgaagctcatgcgcaaccatcgccatatggatagcacggtacccccggtctgcacggttattaatgagtaggatcagcttatgtccatccagtttcagtctctctgccatccttcgataattcatgcatgtggatttaggatcattgactgccatggcgttgataaatagagccccttggggaagccggaacgccgaaagggcatatgggtccggctgatagcttaaaatccccaccaatgcagcttcacggtccactcccagctctccgcacacagccagggcaagcgccacattctccggaaagtcgaaatttggaagatcatctgccgggcgggacaattccaccctggcccctactttttctgcattccgcaccatctggccccaaaattgagtatccgctgtataaaggatcccatgctccggaatggtgcgggatagggaatcacatatctcttccaaggtcagccccatctcctctgtatggtccagccgtacattcgtgatcaccccaatatcagagcgtacgattttcctctgtgagatttcctggagaaatggatccacagccatacactctattacaaggacctgggcatgctccctgaccgccatacgcatcacccgggcctgctcccgtatatttgccttcccgcggcggcgcagtggccgttctactccgtccgttccaatcagccgagggactgtcccagttgtcttgcagaagactgaccagcccccagactttaatcccgcagcgatcattcgggtcaccgtggattttccccggattccatttacatacactacatgctgcagcaaggctctgtcccgtttgacctgatacgcttctaaccctaataggatcataatcaacaggaaaagcaccaaaattagagcttccatatttccctccccctcatatttattatatatattcttataagcaattatatcaaataccattttctttgagaagactgttcggtaaaacttttttcttcttccatagactcttggccaccgcagctctgttttaatatagtactcccaagagccttccacaaaaataaagccgcacccctgtggcaggttgctgctcggaaccaaaatagagacagaggggtaccctcttcactaggaaatactctcccctctgataaaaaatcggagcaagcgcacaaacgcttactccgaccatgtcttgtccaaacactatagatgccgtcactccctagttcgtacccagaccacatcacagcccagcaaagtggttatgatgcggaagaaggaacagcagaatgagcgcactctaatttcaataaaaatcggagcaagcgatataacgcttgctccgacgctggaggtgccacccagatttgaactgggggtggagcttttgcagagctctgccttaccacttggctatggcaccaaaaatatggagcgagtgacggggctcgaacccgctacctccaccttggcaaggtggcgctctaccagatgagctacactcgcatattgtgccctgacgggatcattcttatcccgtcagggacttggtgcctccggtcggaatcgaaccaacgacacgaggattttcagtcctctgctctaccaactgagctacagaggcaaatggcgactcggaagggacttgaaccctcgacctccggcgtgacaggccggcgttctaaccaactgaactaccgagccaggtagtcatgggatggggccaatgtggtgggaacaacagggctcgaacctgtgaccccatgcttgtaaggcatgtgctctaccagctgagctatgctcccccggtttgctgtcgctgtctcacgacggcttgcttattatactaaagtctttccatcttgtcaaccactattttcactttttttgcgcaaattttggtttcctcttttttgctgccccggaccagcagacagcaggcccaccggtccggaggcatccctatttctacatcttccgttctgcgggggccggggacttctccccctcccgggcgagctccgtacggaagaagtggagcagcatccctccgctgcacaggaaggtgatgaagtccgccaccatctgggtcatctccagcccggtgagatcaaacagcctgggcagcaggaagatcagagggataaagaacagcccctgccggcatacggccaggaaggaggccctccaggagcaccccagcgactggaagagcatgttggcaaagaccagcaccgcccccaggggaaggctgacacactggaaccggaaagcccgggccccgatggcgatcacctccgtgtcctcccggaagaagtggatcacctggggtgcgaaaagaaacccaatgacggccgccgcagtcagcaccaaggtgcaggacttcatggagaacttcacgctctcccgcacccggtccagccgccccgcaccgtagttgaagcctactacaggctgaaacccctggccgaagccgatgacgacggacatgatgaaggtaaacaccttggtcacgatccccatggcggccaccgccgggtcgccgtagagccccgcattgaggttcagagacacggaggccacactggacatgccctgccgcaggaaggatggcagaccgcttttcaggatgtctccatacaccttggcctctcgagcgatgagccgggggctgacccggatgtcgctctgccctcgcacaaagaaggaggccaggatagccaggctgacgcactggctgaacagggtggcgatggccgccccggagatgcccatgtcaaaggtgaagatcaggatggggtccaacacgatgttcagcagtccgccgaatcccaggccgatcaccgaccggttggcctttccctgccaccgcagcaaattgttgaggatataggccaggatcatcaccggggcaccgaagatgatatacctggcgtagtctagggcgtagggatagatggtgggggtggcccccagcagccagaccagctcatcgatccagacgaagcagacggacatgagcagcagccccagcaccagtcccagaatgacggcgctggatgcgtactggtccgcccgctctttccatcccttccccagcagccgggaggtgatgctccccgcccccatccccacggtgaagcccaccgcctggatgatcgccatgagggaaaagacgatgctcaccgctccggaggcgctggtggctccatcccccgcgccgatgtgggagacaaaataggtgtccgccatgttgtagatggaggtcaccagcatgctgatgatggtgggcaccgccagcctgccgatcagtcccgggatgggggcctccagcatctgtttccgctgttcttccggactttcccgcttcacttttttctcctttccgcctttcccggcttctctccctgccttcctctctccgccgcccgccagcggtaaaaaagcgccccatccctccggtctcttccggggggatggggcgtcgttcctcttaaaacggcagtccgagcccgccggtcagtttctgcatggtggaagccgcatcgttttccgcagcccgcagcgcctcgttgacggcggccacgatcatgtcctggagcatctccacgtcatccgggtccaccgcctcaggatcgatctccagcgccttcagctcccgcttgccggtcacagtggcagtcaccaccccgccgccggcggcggcctcgtactccttctcctggagctcctgctgcatgcgcatcatatcctgctgcatcttctgggcctgcttgagcatgttggcgttcattcccataccgcccatgccgccgcggcctccaaagccctttgccatatccatccactccttattccgatataaccatatcacttgatgatgatattgtcaaactgttccccaaactccagcagggcgtccagggcgtcccgctgtccagcttccggggcctgccccgtgcccaggtcctccggagagggcttcccgatttggaaggctactctggcctgcccgccgaaccgctgcccggcggcctgtgccagcacctccgtgatgttgggcttgttgagcatcgccttggtgaatgcactgtccacccacagggtcagcaccccgtttttccaggtccccaccgtcttttccgggttcaccagatagggccccgcggagggcagctttcgcttggcctccgccgcgaaggcgggccagaaggagctctcgcccccggcgacggccggctgggcaggcgggaccgccgcaggccgtctctccggctcttccagggtccgctcctcctccggttcctccggcaggggcggacgctcctccgtccagggaggagcctccacgggcgccggctgaggccgggcgggctgctgcgccgccccgccgtcccccgccgaaccggccgtctgccgagccgggacgccggaggccaactgctcctccagccgggcgatccgggcggacagtccggccgccgagtcgtccagcgtctcgtcgcacaggcggatgaggcacagctccgcgtccgtccgccggctgctgctgcggggcagcagcgcggcagtgtcctgaaggcagttgagcatctggagcaggcggggcgcggtaagcagctctcccaggccgcgcatggtggtctcgtcatatccaccggtcagcagggcactgccgcctctgggggccgtctttctcatcagcagatcccgggccagggaggacagctcccccagcaccgcccccacgtcctttcccccggcgtacagccgggacagggtctccagggcggcggcagtgtcgtgccgggcggccagctccatcagccgggcggtctccagatttcccgccagccccagggtatccagcaccgcctgctcgtccacctgctgtccgccgccggagcactggtccagcagggaaagggcgtccctcaagccgccatcagccagccgggccagaagggccgctccctccggggtcaggtcgatgccctcctgccccgccacatactccaggcgctgggcgatctgtccgggcaggatgcgtttgaacgcgaactgctgacaccgggagcggatggtagccggcaccttgtgcagctccgtggtggccaggataaacatcaggtgggacggcggctcctccaggatcttcagcagcgcattgaaggctggggtggagagcatatggacctcgtccacgatatagacccgcttacggaccgccgccggggtatagaccgcctcatcccgcagggcccggacctggtctacgccgttgttggaggcggcatccagctccagcacatccaggatagagccgttttcaatgcccaggcaggccgggcactgattgcaggggttgccattcaccgggctctggcagttcaccgcccgagacaggatcttggcgcaggtggtcttgcccgtcccccgggtcccagtgaacagataggcgtgggacagccgcccccccgccacctgctgcttcaaagtgtcggtgatatggctctggcccaccacatcgtcaaaagtgcggggcctccatttgcggtacagggcctgatacacgatatcacctcaaatccttttctctgcccatccgggcaaaaaatactcgatgcagagcaaggccgcacaccggcctttgaagcgtacactatacccgttacctggacagccggctcaagaacagtaaccccgcggcacacgcggcgggccgcttagtgctgctcggttccccgcctgacacggttcacggagccgcgttgcgcgggaccggtctatcatcgctgcttatccaggtcagacagcacaatgcacgtccgggggccgggattcatccctgctgaagcgggttgcaggaacagggcaccgctatctccccgactagtgcggccttgccccacaccgaggtctggaacaaagctgggatatattatactgcatccggcagaatttatcaacaggatttttcacggccttttcccatcggagggagcgccccagctctcgcgcaaaaaggcgcccccgggccgtcggtccgggggcgcccgccctcattggatgtgcacatggtcgttgatatgcttcatgcagtagcagtagtagccgttgcatttggaacagtagcggaactccatgttggggtcgtccgcgtcggtgatgccgcacacggcgcatttgtggagatagcccttccggttctggacttccttctgagcctttttgaagttgatggtttgaggatcgacccggtgagcagcccggctgctcccccggcggaggatggccatcagatcgtcccagaagaagatgaagtagttcaggatggccacaatggggaccattccctggacccagttgccgttcataaagtaatgaccaatatcaaaggcaaagagggccgcatccacccaggccagccacttcactttcaggggcaggatcccgtagagcagcacccgcatatccgggtacagggtggcgaaggcaaaaaacatggacatgttcacgtagtacatgctggcagtctccaggaaggcaccagagatccagtaagtcaccatcccggtgaaaatgttcagcaggacgcccaccccgtaaaacacggtgaaccgggtagacccccactggttttccagagcgtttccgatgtagtagtagaacagggtggtcaaggcaaaccacaggatgaaaccgccgctggtggggacgaagataaaggtgagcagccgccacacctgcccttccatgatcagggccgggtagaaccgcagcatagcggagaagtagccgttgctgaacatatccatcagatagaccgctacattggcgatgacgatgtacttcatcagacctgggatgccgagccggggatgcttgtagcagaagcggtccagccagcgggaaatcgcgcccatacaggagcctcctaacatttgtgtcaaatcgtttttcattgtaccccggttttcgggaattgtccatgacaaatctgtaaattatttgtctttgtctcccatgggccggaaagttttctcattcagcattgaatttgtctccgaaacattgtaaagtaaagaaagaaattttttagtttcgcccacgaaaggatggtctttatggagaatttcagccagagcgcccctgtcaacatggccccgaccggcatcgccacctttgccaaatgtcccatctgccctgacatccgccagatccaggctgacatcgctgtcatcggcgccccctgcgatatggctatccagggccgccccggcgcccggctgggcccccggggcatacgtacccagtccacccgctttcgcttcagtccccagggttcctatgatccagaacgggacgactactacctgagcaccgagaagtggtcggtgatggactgcggcgacatcgactatgtccccggcgatctggagcagaccttcggcaacatcgaggccgcggtgcgcctgctccgcagccggggctgcctgcccgtggtgctggggggcgaccactccatctccatcccggtcgcccgggggctggaccagtccggccccttccatgtgatccagctggacgcccacctggactggaccgatcagctgggcgggaaccggctcttcaacggccatcccatgcgctacatgtcccagctgccctatgtggaccggatggctcacctgggcatccacggcatcggcagcagcaagcgctccgacttccaggacgcccgggcctatggggcaacgatcctctccacccgccagatccgggccatgggagcccagaaggttctggaacagctgccccagggcgggcgctactatgtcaccatcgacatcgacgctttcgactactccatcgccggcggcaccggctcccccatgctgggcggcctgctctatgacgaggcggtggacctgctggagggcatcgcccagctgggcgaggtcatctgcgtggatctggtggaggtctcgcccccttatgacgacgcggcgggcaccacctgctatctggccgcccggatcctggccgacttcctgggcttcatcaccaaggagcgggagcgcaggggagaacgctgatccccatccccatcaaatcaaaggagcaaatgatatgagcatcgtgaaagacctgtctctgtccccttccggcctgcagaagatccagtgggtccgggacttcatgcccgccctgggcggcatcgaggagcgcttccgccgggagaagccctttgagggcctgaccatcgccgtctctgtccacctggaggccaagaccgccaacctggggctggtgctccgggaggggggcgcccaggtgtatctcaccggctgcaaccccctgtccacccaggacgatgtggccgctgccatggccagcctgggggtggagaccttcggtgtccacggggtggacatgcggggctatgaggacctgctgaccgagaccctgaagtgccgcccccacctgatcgtggacgacggcggcgacctgatctccctgctgggggggcggtgcgctccctacggggaccggctgctgggaggctgtgaggagaccaccaccggcatccaccgcctgtacgcccgggagcgggcgggcatcctcccctgccccatgatggcggtaaacgacgccaaggccaagcactactacgacaacaaatacggcaccggccagtccacctgggacgccatcatgcacaccaccaacctgatggtagcgggcaagacggtggtggtggccggctacggctggtgcggcaagggcatcgccatgcgggccaagggcatgggggccaacgtgatcgtcaccgaggtggaccccttcaaggccctggaggccaccatggagaacttccgggtgatgcccatggacgaggccgccagatacggcgatatcttcgtcaccgccaccggctgcaaggacgtgatcgtggagcgccacttccaggtgatgaagcacaatgtcctgctgtgcaactccgggcactttgactgtgaggtagacgtggcccgcctgggccagctggcggaggagcgcttcccccgccgggcaggcattgagggcttccgcctgcccgacggccgcgttctcaacgtgctggcggaggggcggctggtcaacctggccgccggaaacggccacccggcggagatcatggatatgtccttcgccgtccaggccctttccctggagtggatggccaggcacgccggaaagctggagaagaaggtctacaacgtccccgaagagatcgacgaccagatcggccgggtgaagctggccgccatggggctttccatcgatacgctgacccaggagcagaaggattatctggcgggctgggaggcctgaaccggggccggctgcatcagcgggcaggctctcctgtgggagagctgccagcagacacatcttatcgactgtaaaaaggagagctgtatgaacgactttcagtactatacccccactaaggtggtattcggcaggggcaccgaggagcaggcgggccagctggtgaaggagcagggcgggaccagggcgctggtccatttcggcggccgcagcgccagggagagcggcctcctggaccgggtgctggccagtctggaccgggccggcgtggcccacgtggagctgggcggcgtggtccctaacccccggctgtccaaggtacgggaggggatggagctgtgctgccgggagggtgtggacttcctgctggccgtggggggcggaagcgtcattgactccgccaaggccatcgccctggggctggcctacgagggggacgtgtgggacctgttctccggccagcctgcccaggactgcctcccggtggggactgtgctcaccatcgccgccgccggcagtgagatgagcaactcctgcgtcatcaccaacgaggacggctggaaaaagcgggggttgaacaccgacctgtgccgcccccgctttgccgtgatggacccggagctcaccttcaccctccccgcctatcagactgcctccggctgcgtggacatcatctaccacaccatggagcgctacttctccggccctgagacggtggagcccaccgactctatggcggaggggctgatgcgctccatgctggagctctcccgccgggtggtccgggacccccgggactatgatgcccgtgccggcatcatgtgggcggggagcctgtcccacaacagcctcaccggctgcggccggggcggccgcggccgcatcggggactgggccagccaccagctggagcacgagctgagcggcatgttcgacgtcacccacggggccggtctggccgccgtctggggggcctggtcccggtatgtcatggacgcggccccggagcggttcgcccgcttcgcccgggcggtgatgggggtggatactcccggctccgacgaggagaccgcgctggccggcatccgggcctttgagcacttcctccgctccatcggcatgcccaccaccgtggggcagctgggcatcacgctggacgagcaggccatcgaaaagctggcctggatgtgtacctttgagggcaggcgcaccattggctcctttaaggtgctgggcctggaggagatcaaggatatctaccggacggcccgataagctgttcatgaaaaacgccgtggcgtatcgtttccgatacgccacggtgtttttattgagtggatgaaatcagactccctcggcggcttccagcggtccgcaggtcatgtttcaggtctctccgctgttctcgtcctccccctcctcctttgacggatatccgatcttcagcgtcatgccgtcgtgccagatccccgcgctgcgggtgatgggcagcttctgcccctcgctgaagccgatggtctccccgtcccggagggtgacatcctgctccagcacataggaggcgatgtccagcacaaacccccgcaggtccccgggctccgcccgggtgtccagcacctccagctcgtccttgccgaaggcgcgcagcccctcggtgtaggcgcacaggcctccctcccggcggtacagccccggccacaccaaattcagcaggggaaggctcccgtcctccatcatctgggccgcctccagatagaactccggctggtacacggtcccgttggcgtagatgcccagcacgccgtcctgtccacaggcagcgcacaccagcttcacctggaggcgggcggcctgccccacatctccgtcccgtgccatggtggacaccaggatctgcccccggtgccggcgtgtggtctcctccgcctcgctccacaggtagttgcggcccgcattctgctccgcctcccctttgggcacggggaaggggtagaggctcaccgccgtcagaaagccctccgcctcaaagaccagggtgcttcccccctccccgctgtccttctcttccgtcatgcaggggatgccccagtcgtcccgcagggtccgcttaaattcctccgcgtcccactccggctgctccagcagcacgaaggccaggaaggtccccccctcaggctgcgccagagcgggctggtcctcctcgcacagggcaaagtcgggggcgaagcggaccatctgctgctcctccccccgctggtagaacaggcacagccggcggtccatctggatggtgaaccgctccagggccagtcccccagtccccagccctgcccgggcggagaggaaggtcagaccccggcggtccagctccggcaggcgccggaccagctcccgcacccactcggccggcaccttggacagggcggcctcgttcccgaagaaccgcccctccaccgtgctcccctgatagggcatggtgaacgtgcagtaaggggcgtccgcctcccactctacaggcgcaagggccgccttgatctcctccagcgcctcccggcggcagaggatgcaggagatcgcccgcttcttgtctccggcgctctcgtccagccccgcctggagctttctgtcagattccgggtcgatccagtggaactccatctcctccagcgtgcgccccttctggatctcccggcgcagggtggtgaattcatagtctcccggctccagggcaagcccccggtccgccgccgccagggccccctcccggtccccaaagtggctgagcagcctgccgtacatgagccagccccacacatactccgggtccagtccgactcccttctccgcgtacttcagggcctcctccagccgtccgcagtaggtcagggcgcaggcgtaccgatagtaccagaccccgctccgggcctgctctgccgcctgctccgaatccggcatccactgggccgcccggtaataatactcgtactcatccacattgttgcagatgtaggagtaccacagggccgtgtccagatccgcccgcacccgctcccaggtgaagcgcccccggcggacaccgtcctgaagccgctcctccaggaagttcagcattttgtagaagtagccggataccccttcgcacatggactccagctcccgcacatcctcagctgttagcaccgggccagccggtgctctctcttccgctccgttctccagctctccgccgctccgtttggccagctcctcctcacactcccggatcaccgccggggcgtttttgtcctccgggtccagctccatccaccgctgggcgtaagggatggccttctcctcctgcccctccaggtattgataggcataggccatgcgcatattccactccgccttgtcccggccctcctcccggacggcctccagcacctggatggcccgcaggagggccttgtcccccttgcggccgggggtgccctcttcgcggtccccgatgatggcgtagttttccagcgccctggacagggcgtaggcaaagcggtagtcccgccagtcctccgggatggcgttcagggcctggatgcagcgggtgtactcgtcctcgtcgttccactgttccagctgccggtaaaaggcgtcggcgttctccagggtgtagggaatgtagtccatcccggtcagcgtctcctccagctcgtcctcctccggttttttgagggacaccgtcccggcctcccggcggaaggtgtggaagtcggcccaggggagatccgtgtccgcgaaaaagtcctggaccttgttcaggacggcgggcaggtcccaggcgatgaagtccacatagccgcagaagatgccggtggccccgccagtgaggatgagcacgtccgggccgcaggcactgctcagatagtcctccagctcgtcccggaaagcaaagatcttgtcgctgccctcctcttcccgcagggtgtccagtggatagcagaagaagcccgccactacgccgtcggcgtggaggtcatccatggagtcgttttcagcgctcagatagccgttgatgaggggagcgcagttggtggagccggcgatcacatccagccgccagtccgcctccgggtcctcgttgggctccatctcatagccgatgtagttctccagatagtcctccgggtcggcagctagatccaggcccatgcccttcagcttgtccggcaggtccgacaggagaatagactgctcccctttgggctcctccagcacgtcgaaggcgtcgatgtaccgcatatgggaaatctcgcccaagacctggtcggtgagggtggtgagcatccaccaggcccggccctcctcctcccggagcagggggagcagcttttcgcaataggcggacagggcgaagctgttttttccccgctcctccagccagacctgcacatcctccccggagacctcccagccgtcgtcggtacgcagtccgatgccggggttgggctggcggcccgccaggatattccagtgctccagcacctttttcggtgcgtgcttctggaagtagaccagttcaaacagcttgaccttgtccccctccggggtgaggatcagctcgtgcttctggccgttaaagcccatttcgaaggatatgtcatcaaaggccaggtgcagaacatcctccatctgggccaccagttcatccccccgctgatggtccttgtcctcatccatcctttgacgcagctgtgcctcctgctgagcaaatttctcccatgccgcctccgtccgctcccggaagcactccgagaaccggggcagagcgactcccttttgacaccattcaatgaactcctgggtatccccgtcaccggggcgggcttccagcgccgcctggaaatagggtagcgcccggccctcctggtccaggtagtagtaggaataacccatgcggaagttccagcaatggtcccccgcgaaatacgcctcatggggcttcagcagggcaatggccttgcggaacagctcccggtcccccggcgcggcctggttgttgtaggcccgggccagttcgctgtccatctccggggtgcgctcctgggcggggacggcctccaaggcctcgatgatcttctgatactcgtcgttttcgttccagatcttacactggtccagcaaagtcatatgggtgctctcctttatttcttcctattttgctatttcgtttgtctatctgtcttcctgctccgcagggtgcgggaagcagatatctcctcccccaacgccccacagagtttacgcaggcgttccattgatcgtctccgccctgtgacattccgggccgtaccccaggccgtgaaacaaaggtcccctgcgcggtgccgggatccagccggcaccgcacaggggatcaaaaaagtccgcaaaaagccggcgcactcaggtgcgctgtgccgctcctccccgcaaaagggccgtactgctccatacgcctcgctcctctctgttctctctgatccgcccaggcgtgtccgaagcgtgggcctgggatatccctctattctaacagaggccgcaacaaaagaacatccccctctgaatttccctgcccccgcttttcacgtcatttatcgtgtctgatttgatatttgccatgtcaaaattataaatcgatatttaaaacacgtcaatagccgtgttttaaattattttgtatccccctcatcttgggtacactatagacaaggggggatggggcttggcacggcaatttgacaaccgcgaaaaaatggcggatctgttcttcgccatcagctattaccgcaggcgcaggggcatgtctcaggagcagctggcggaggagctgggcatcagccgccagcatctcgccgccatcgaggccccgaacatgaaccgcggcctctctctggagctgcttttcaacatcgccacggtcctggagatcgaaccctatcttctgttgaaattcagcccggaaaaatgaccttgaccataccggccatgaaagcgcagacgaagtccccttcgcctgcgcttttccgtttccccgggtgctccccagcccctgcgggccttatttttttgcgaagcgctccaggaagaacttggtgaaggccgccagttcctcctcctgggatacatagatgtacagtgactcgtcttccagccagtcgtaggcattgatggcgatatagccccggctgtcggggtagatgacaaaggcgtcggtggggtagcggttgcggtaggccttcagaatatccgcgcgtcggtaatacactggctcgccgcagccggagagatccggaacagtggggacgaccacgatggtctggctttcctcgttccaccccacgatcaggcttcccaccttccgcctgctcccgtggacgaacccatagttgaatcggctcacatcctcggtatagccggagatcagcctgtactcgcctccgttttccacaacccggtcgaacatctgccgcatctttttcgcgttttctccgctcttctccagatccacttccggacctttccacaatttgctgaaaaatcccataatagattcctcctgaatgatagtatgtgatctccgccggacacagtgctttcctgtcctccgcccggtcgggtgcttggggacatgcttcggagctctgccggctccgtcaaaataaagatattcttcatattttgtatttatttaggggagtcgaaagcccgccgggtccggactgctgtgccagatatcccggcgggccgcatccccgctccggtcaggatccctgctccttcaggcgctccaggcggtccacgatggcgtcgatctggaaggccaccgtcgcatcagcggcctccggcacgaacagcggcagactttccgggatagcccggcgcacgatcatggccgtcaggctcaggtttgtgaacagctccacccggtcccggtctgcccggaccccaaagcactccaggatcttcccgaacaggcgggcctgcttctcccggaacacgcggcagttgtccgctgacaggcgccggaagatcagctgctgctcctcaatggtcaaaacagcgatgccgtttttctcaccatagcagcatgcatggaggaactgccggaccccctcccgccaggtcagtgccggatctgccatcagccgctccgcgtaggccagtatcctgggttgctggagatagagggtctccacgatcaggtcctctttcgtcggaaaaaatgaatagaaaaaggtacgggaaatgcccaccgctttgtagatctgctccaccgtggtatgctggatgccctgcctggccatccgctccagcgcctcagtgaccagtgccgccctgatccgctcccggtcctcctcagaataggccacctttggcacacccgcaccccctcaaataaaaacactttctataatttgttcttattttaacacatttttttcaaaaatcaagtacaggacagacctgcgagctcccgccgtgctcagatcacagctcgatcttttccgggaatgcctcgtttctcagcaccccccacatcttgtcgatataggccagggtatagaaattttcatagtagtggtagtaaaacgcgcccttcagcgtcatgctgtatctctcatcccgccgggtgaccagccccatccattgtgccagcctcagctccataccgtacatctttttcaatgggacgccgaaaaactgttcaaaggcaccggcatccacctctgtgctgtaggcggtccagaacagataatagaccatccgttgacgcagagaaaaccggagtgtcagggaggtggggagcttcccttcgtcgatccttctgcagtattcttccacagaaaaggtgttgattttgaactgatctctcagcagggtggtggctgagcacccaaaccccagaaaatggtcccttgtcatggaggaatacactgcgtcctgctcctttgcaaaggtccacacagagctgcggatgtatccccggtccaggcaccagcgggtgatgccgtccaaaagcgcccgcttctcccccttccccatagcctgcaccgtgctggacgtgaaggtgaaatcaatgaagggatagatcgccacatgattggcaccggcctggaatgcagtctccaggtccatctccagatcctccaggtcctgtccgggcagggcaaaaataaaatccatggacaccgtttcaaagtggacctgggacagcgcctcccgcagggctgggaggtccacaggcctccgtcccagcagtccctggaactttctctggaaggactggaccccgatgctgatcctggtcacccccgcatcccgcagaatgcgcaggacggagggcaccacatcctccgggtgcagctccaccccgacgccctcggtgatgataaaatgcgcctcgatggcttccatcacctctttcagccggccggccgccagcgccggcgtaccgccgccgaagtagaggctggtgacccttttcctgccggggagctgaccgcccaccaggtggatctcctggatcagccggtccagatagcggtcgcagaccgccctgtcatactggaccttgcaatacgggcagaagccgcacagctccctgcaaaacgggatatgcacatacagtcccagcccctcacactgggaaaagggcagctgctggtcgtattcattttgaaagagaaagggcttggccgagcgggtcagccacatcctcgtcaggtctgtgatgatactcatgatgctcctcaaatatacttcaggtaggtccgcagcatctccagaacgatcctgggatgtccccggaacaagagggtgtattccgccacaaagaagtagccgcactctctgcacaggccgggcacttcaatgcagcgcccgcatgtggacagctttccgttttccaccaccacgcactggtggcacggcgtggggaagcggttctcgatcagggctgggaaagcgccgggcagattgaatacaggcgcgcccgctttcatcatctccctgataacgccgcagcactccgccttttcttcccgggtgagggcaagctccctggtatcgggatagggcgtgtggaaattaaaggagaccgcccgcacatttttggtctcctgcgccgccagacagacatcccggactgcgcctttgttgatctggttgatcgccatatagaagcagatattgtcggaagtggcgtgctccacatgttccatgatggtgtcgtatgtgtcgccccggatggcattgtggcgtgcccggtcaccgtcgaggctgagcaggatcagatccgcctccggcagatcaatggggaaggtgccgttggtcacgacgttgaccaggagaaagcccattttcttggcctccaccaccaggtcccgcaccgtgcgcgccccgtcatgccacaggaaggtctctcccccgcaaaagaacaggatgcgcacccccatatggtagaggagctccatctcccggcgaatctgtccatagggatggtccaccgatgtcagatcgtggacagagcagtgcctgcacttcagattgcaccggtctgtgacgatcactgtgcccaggatgggctttttttcccgcagaagaatggtcctgaccccaaaggcggcaaaatgcagaaatgaagaaagcttcatcctgtctccccctctccaaagcgcccgccggacggcctgcccgcagcctgtttgaaactactatatcatagtccagcatacacttccacctgttatggtggaaattcccctttttcttccgcacatgcagcgggcatcgggcatttccacgggagcccgtttccatttccccgcttctcccgcaacgatctcctattccctcatccgcctgcgggaacgatgcccagcttaggagaaattttctgtcctgatgctcttggggcttgaaattaccaggatcatcccatacaatagggatgtccccagctgtttttccaacctgcaagggcggggagcacctgcttccaggccgcttatgatcgatggagtgttggtgtctgtgttttatctgtttttctgcccggcccatagagggccccgtcccgcccaagcggggtgtccccgccgctgtgccctgtgactcccgggcgtcctgatttttttacggcggtctacgccgtggtggcccgcattccggcaggacaggtggccacctatggtctggtggcctttctggccggccggcccagggccagccgcatcgtgggctgcgccctggcccgggcgccggagggcctgccctgtcatcgagtcctgtaccgggatgggggcctcagccccgcggacgtgttcggcggaacgggcatccagcgcctgctgctggaaggagagggcgtccccttcctgcccgatggcagggtggacctgtcccgctgcctgtgggacggcggagaagaaaggagcaccctatgaatgttacctttgagatggtgaggagttctccggagatccgcacctacatcacccaggcggacgcctcgctcacggcgctgggctttacggagcactccttcgcccacgtgaccaagtgcgccgaggtggccgcccgcatcctgacccagctgggctacaccccgaaagaggtggagctggccaggatcgccgcctacatgcacgacatcggcaacgtggtcaaccgccacgaccacgccctcagcggggccaccatggccttccgcatcctggacaagatggggatggagccccccgacgtggccgccgtcatcactgccatcggccaccacgacgactccaccgcctacccggtgaacgccatcgccgccgccctgatcctggccgacaagaccgatgtgcgccgcagccgggtgcggaacaaggacatgtccacctttgacatccacgaccgggtgaactactccgtggagcgctccgaggtgctgctggacctgccgggacggaccgtgactctctccctctccatcaacacggaggtgtgcgccgtcatggactattttgagatctttctccagcggatgctcctcagccggaaagctgccgagaccctggacctcaaattccggctggagatcaacggacagatcctgctttagtgccccgctcccctccgcggcaccgcttttccctattttcaggccgtctgccttttggcaggcggcctgctttgttctgccagagccctgccccggccgctctgtaaccacactgtaacttgacctttatttacttcaaatgtagtatattattacaaactacaaaagtagtagattggagcgatagctgtgaaacgactccccgacactgagctggaggtcatgaaggccctttgggactccggccccgacaccccccgcgccgccctggagcgcgctctggccccccacggctgggccgccaacaccatcaacacctatctcacccggctggcggacaaagggtttctatccgcccgccgcctgggcaggagcaaccggtacacccccctggtcagccgagaggactacctctcctttgacagccgctccgtcctctcccgcctgtacggcagttccccccgaaacttcgtggctgccctggcccgggacgggctggcccccggcgaggtggacgagctcagggccctgctggatgagctggaaaggggcgccaaatgaaccgatttctccttgatctggccgccctctccctgggcggcggggcagtggtcctgctcctgctgctggctgcccgtctcacccggggccgctacgccgcccggtggcgctgtactgcctggctgctcctctccctgcggctggctgtccccttccccctgctcccccatatggggccggccgaggcaccagtccagctgaccgtcccctccaacccggtagtcttcacctattcgccgcctgtctcccagcccccggcggcctccagccgcccagcccagtcccaggccgcgccctcccggtctgagccggtccagaatgccgtccagccggaggccccggcggaatcaggaggattttccctctccctcgcccagctcctcctgatcctgtggctgctgggcgcggcgggggtcctcctgtggaatgtgggctgtcacctcaggttctgccgctggctccgccgctggggccgggaggctgaggagactcccctgctggcgcggtaccgggcgctgggggaccagatgggcctgcgccgtctgcccaggctggtcctctgcccctctctgcccgcccccatgctggccggtctgctccgccctgtgatccttctgccggagcccctcccccagagcgccactctggagtgcgccctgcgccacgagctgacccacttccgccgccgggacatccccctgaaggccctggtgctctgggtaaaggccctgcactggttcaatccgctgatgtggctcatggcccgggcggtggagcaggacacagagctggcctgtgacgacagcaccctgcacgcgctgcccggggaccagcgttctgcctacggccgttccatccttcaggccgtcagcgccgtccaaaacagaaaggaggaggaccagtcttgacccgcccatgtccttacacgcccctctctacccccctctccggctccgcccggcaggcggaggcgcgtatccgcaacctgttccagggccccaaacggcggccgccggtctggctgatggccctgaccctgctcctcattttctcctgcggcggactggtcacctgccggaccgcagcctccccgcccccggaggagggcgcccccgtattctcccttaccaccccgggcgaggagtcggtccccttctccgatcttctgggcttctccggcaccgccatccacacggtgcgggaggacctttcagactggtacgaataccagatccgtctgcccgacgggacttctttctccttggcggacacctccggcctgatgtaccacctggatctggacggggacggccacccggatctgctggcccatgaccccgacggcggctggctgttggtctggcggaggtggccggacggctccgtccgctcccagaatctgcgccaggcggcggctgagctgctgggcctggagggcaccccctgggagctggtcgccttgaccttccaccctcaggacgagatggtctccatccgctccgccgccgacccgtcccagatcctcctcaccctccccctgtctcagctgctggaggccgcctgcggcgggaatatcctgctggcctcctccggccagcagggagaagatcttatccctctcagtgatactcttccatttgggacctatgcggtgttccgggagggactggacctggacgggacagggggaacagacgattctgtcacggtcttctcctatgatgacgacagcgcctccggtcccctcactgtggtggaggccgccctgggcaccggagaggtgctgacttgggaactcccctccaccggccatcccaggctgctgcccgcctcctttaccccctcggggctgcagtccgtcgtcctggtccttgaggaccgctactccaattacggcgcagccagctgtttcgtgctggccgtggaggagggggcgctgacagagcaggtccggctgggcacctgggaggacaacgcagacgacctcgccccggactgcccggtgatctggtccgcctacctccataccaggccggacggccttcaggtcctgcgggtacccatcctgtacgacaaatggcaccagccggagtgggccaccctgtcctggacacaggcggggtgggacttgacccgagacggctatctgacggacactgagaccgtcaccgttggaccgggccgcacgctgaccctggcgctccgctgccccatccccgcgccggacgactcatctcagctccgctatgaccagatccaggtcctggacggcggcactcttctccagaccatcaccccagactccttcacccccgacagccgggccgcctttcaggggttcgtggccttctcccccctgctggactatgtggatgtacgggacatcgattttgacggcagtgaggactttggagttctctgtgacaccacccacaacgaggcccactgctggttcgtctgggacgaagcctctggctccttccgctatctgaccaccctggggggccggctggaggtcctgcccgagaccgggcagctggtggagggctggtggaccgatgggcctgaacccgtctaccacgccctcgcctacaacagccggggcgaactggtcctggtcccctcccagtcggatggtcttttctgaggccccgccttcgacattaaaaaattagaaaagaggtatctgccatgcgcgctctgcctgaaccgctcccctcttcccgttccggctctgcccggcggacggcttccctggtcctgtccctccttctcgcctgcggagcgcttgcgtcctgtcggggggagacgccctctgctccagtcaagggagaggccccacgcctggtcttctccctccatcggctggatctggatggcgtggggagcatcgacgacagggccgccgttttcatccggggggacgcctccaccaccgtggaggtgcggctgggcaccggggaagagctctcctggacctatgaccacccggatcttgccttctcccggcagatcctcacgtctgcctatctgagcaccaaagatcaccaggccctcctgctccaggcggccctctcccactctgaccatgatgcggcccagtacatcattctggaggtggaaaacggccgtctgacggaacagggacggctggcggaggacgaccctgcctccctggccccggggcagttcaccacccagtctcaggtgacccgtctccctgacggctctatgcaggtcctgcgggtgcttctgaaggaccccgacgggcaggcagaccgctggcatctgctcgcctgggaggacggcgctttcaccctcaccccccagcctgtcccagatctggcctatctgctcatgagggaacatcataacttcccctatgacgccccgtacatgtcctcccagctgctcctgtcccgggagggggatggctgcgtcctgggactggccctggtggaagggggcactcactccgccggaatgggcaatctgatggttgggctctgggatctggagccacagcagtggcggggccaggtccaccttttggggggcgacaacgggctctggtcctcctggacggcggaggacggcgccctccacatcctgtgtgccaatacctccgcatatagcgggtgggagggccccagcaatgccgcccactaccgctttgacggcagcaccctggaggagctggccagctgggactactatgacgaggattacaaggccgtcccgagggagggaggactggatctctactccttcaatcctcagtatgagttccagtttcataacccggattacagcggggtacccctccccagccagtgggtctattcccactttcagaccctcgcttagaaaaaggagataccgccatggaccgaacctcccctcgcacccctttctccaccccgctctccggctccgcccggcaggcggaggcgcgcatccgcaacctgttccagggccccaagcggcgaccgccagtctggctgatggtcctggccctgctcctcatcctgtcctgcggcgggctggtgacctgccaggaccaaaaggttccgccggaaaaggcggagatcagcgccctctctgcctccgccacctcccagcctctctccagtgaggacctcctcctggtagacgccctgtacggggccgccgctccccagatgggtacggcagaggacggagaatccatcccccagcttctctgtgcccacagccaggacgggaccaccctggccgccgctctcttccagaaaggctccgcctcctggctggtcatcggggcagtggaacaggcgaccagcaccctacggggcccggcctatgtggtctccggaccggagggggccgcccatatcttcccgttccgggagtacggcagcggtcagctccgcctgctctacaccttcaacaccctggatcagggcagccgctccggctccgccggggtggtgtgcctggaggacagccggctcacctgggcgtggccggcggagggggacatcctggaggagggctcccgtgccgctcaggaatatgaagaattctggcagacctatctgcccctgctgtccccctccggtgtggagctgttctcccgggaaacggcctccagcccctacgggggctctcccgcccagtggacctatcaccactctgactccttctggtcttccccggagctggacctgcccgacggggtgtatgagcaggcccgggtctggctggaggggatcgctcaggagggctgcaatccctggcagacggagggcctccccgccgcctggcagatccgtgccctcacccccgccgatggccgctacctgctgtcctcccctgccgtctccgaggaagctgactatctgttgacagcccaggcagactcggacccggagttgtgcctcactgcccgcctgcgcctccgacacgggaccggggaagtacctcaggccgtagagtggacaataggcacgccacaagagctggggctggacggggaacctccccgctgccccctccccctctcggatggccgcactctcaccctggagtttgacgagtctcccatcgacggcatggagagcacggtgctcatccgtcaggtgaaggtgtgggacggccctgtcctgctccagtccatcaccgccggctccgtcttggaggacgggctccacctctatgaaggcctgtaccgcctcccggatgcggacaaggtccctggcgctcccgacctgcgggacctgaacggggacggctccgcggacctgggcctgctggtcaactgcggttttccccacaacgtgaactatgcccacttcctctggaacgaggcgatggggcagctggtgttctccggcctgttttttgcccccctggagctggaggacacaggcggcgtggtggagacggagcatgtctccaactatccggacatccgccgtcggtacactttctccaggtacggcgtccccctgctcaccggcgtggtatcccggggggctcttcctccggaggagagcacgctccccatcccagaggagggcgtccatttcaccttttccagcggggctggggcttggagcaccgacctgaccctgttccctgacggcaccttctccgggaagttccacgaccgcgatatggatatcacctatctgtgccagttccagggtgtcttctccatgctgacccccctagacagccgcacctggtccctcaccctcacggacctggaggtgaccaccggccgcccggaggggacggagtggacggagggcggcatccgctatgtggccgccgccccctatgggctggatggtggaaacgagttttgtctctacctccccggcactcctgcggagaatatttccccgcgctgccgctcctggagcggcggctattacgggctgtttgaggcgggcgctgttctctctgggtacggcctgtgtgatctgcggttgggatacggcttcttctccttctcctgaccaccccgcgccgttctccccgctccatttcttctgaaaggacgtgcttttatggccagataccagtgtccctccacccccttctccactcccctctccggctccgcccggcaggcggaggctcgcatccgcaacctgtttcagggccccaagcggcgaccgccagtctggctgatggtcctggtcctgctccttatcctgtcctgcggcgggctggtggcctgccagagccaggaggctccgccgctggaaggggactgcgtccagacaggggagcatgatgcccctagtgcccggctgatacagaccattctggaccaggggctctccgccctggatctcacctctcctccagtcagccaggtcctggccacgctcccgggaaacgggtgcaccttggccgctgtctctctctccgacgggtcctcccactatatactggccatcggcgtggtgcaggagtccgacggggctgtcggccctgtctttctggtgcagggccagggatgccagccccatgccgttcccttccagcaggacgggacctcctatctcctgtacaccgccaacagcctttcccagtggctctctcagggagaatccggtcttctcgctttcgacggcactcagttcacctgggtctggccggtggagggagacgtccgggaggagggctccgccgcccgggcggcctatgactcctactgggagaacgctctggcgctccttgctccaggcggcgtggacgtgtttgcccggacaggctacgccgtcattgacggagacggcccccagtggctccccgatcacaatgagcagttctatacggcccctgaggaccagctgaacatcggcatctattaccagacccgggtgtggctggaggatttcacccgcagcgggcgtaacccctggaacgcccacaatgcctccgcctcctggcagatcctctccctcgccccgacggacgggtcctatccagggcggaacgacatggcggaggcctcctacgacctgctggcccgggcggacgcagacagtgacctctacttggccgcccgcatccggtacagccccgaagagggatgcatctctgtcgtccagggctggtccatgggctcttattcggaggtagaggccgccatgcaggctctgccggaggaggacaccgtaccctccggcctgaacagcagagaattttatgccctggtccgtcagtatctgtctgcccgtctgggggcggaccagatcttcttttccggctgggaccagctttctcctccccaggagggggatctgctcctgactctggtggactatctcggctccgccgccctggcggacaacactgtgggctcggtctataccatggaggccatgcagttccgtgccggcagctgggtccctcaggaggcgcccttcaccctcgtcctcagccgaagcgccggggacggagtctttctgtccgtggcgggggaggccatctccaatcctgccgccatgtctctggacgaggtcgcccgccagcccttccgggatctgtacgatccggagatagccctgttccgggacggatggcccacccccgctgggcccgggctccaggatacagctctgtttttctcccaggccggcgtccgggaggagctgcctggtgaggggctggtccagaacgagggggacatgtgggtccgatacagctgggacggcttttccgccgactattaccacctggcctccgacggctccgagaccctccggggagtggagaccacccggaccgatgtgtacaccctccgaggcatccgggtgggagacagccgccagcaggtcctggcctcctatccagctctgaagtccgagagcaccaggaacccctccctgaatgagatggactgcatgtggtactgtgaggacatggacaacgatcaggggctggctcttctgttcttttttaaaggggagcatgtcagccgcatcgtcttgacccggctgctctgagccccctccgcataccgaaaggagatgagaccgtgaaacagcccccaccctccacccccttctccactcccctctccggctccgcccggcaggcggaggctcgcatccgtaacctgtttcagtgtgagaaaaagcgtccgcctctccccctcctctttcttgccgccctgctcatcctctcctgcggctggctggtctcctgccggagccagcccgccgaccccctggtggtgatggaggtccagcactacgacaccaacagcaactacctggagatccccactctggtcctgccggacggccagaaagccgacgaggggctgacctccattaaccgggccctgtccggcctgcgggacagctacctcccgctcctggagggcccccttccatccggtacggatgggtatgacaactgttgcctgctctaccccgcggagaccgaccggtatctgaacctgctcttctttcagacctactttgtcagcgatctgaacacgggccatgtcctctccctggtgtacgacaaggaggagcggcggcaggtgtccctggaggacgccctggcactggccggggtgacggaggaggggctgtatctggccctggcggagcagtacgacccggagctggcccaggaggtccccggggccgacctctgcatccaggacccggacctggagggcttccgcatgggtggggacggccagcccctcttctacctcaccgcccgctccgacgaccgggaggacagcgcggcggacgccgtcagcggggcggagcacctctatatctggtccgctgggaccttcacccgctataatccgtacgacctccaccgcctgccccctctggtcccagcggaggagtgcctggacctggacccgcccctgtggcggcaatggcacttcgcgggcgagaagccggagggcggcttcacctccctcgccctccccgtctcccccggcacgccccgccctccagcgctcacggaggaggcggagcagatggtgctggactacttcgcctcaggccgcttccggccggtctcaggtcgggcctggttcctgggggaggggctctccccccaggccggcgacctggtaatccaggacatccagcccgccgctctctaccccacctacgagaccctgtgcgggatctaccgcatccgctatctgctgtacggcagcggggaccgtctgaccgatccgcacgatttggaggactacctcttttttgatctggaccagtcggagaactttcttggggtgcgcaccgtcatgtcggtgccgggcggtcatctcctcaccgccgccctgacggattcctgggagggcgtgctgtccgacgtgtacgccgccctctggcgggacggcttccccatgcccgccggcctctggtccagcgagatctccttttacggggaggaggaccgtcccgtccacaccgtcctgaagagctggcggggcagcgactccagcgacagcctccagctcgagcagctgagctgggagggctttacctccgtcacctactgccagccggagtatgaccgccgttcagtctggtatctggagaccactgacccggccttttacaccgcccggggcatccgagtgggctccacccgcgcggaggtggagaacgcctaccccacgctccaggatccccccttcaacggccaggagtttccgggcgtctggtacagctcccaggaggggcgcctcaagccggccattctctttttctttgaagacggcctggtcagccgcatcgcggtggatttcaggacccactgagtactggcatgtctgtttttcatagatccaggaaaaatcttcacgctcccggccccggtatctctggacagccctcctcttctttgataaactaggcttacagaaagaacgccggccatcggccggcccgggaggggttcctatgcagctagacatcggaatggtattttccagcttgatcggcctgtttcttctcatgggcgtgggatgggtctccgtaaagacaaagattgtccccccctccgcctccgcccccatgtccagccttttgctgaaggtcaccctgccctgcaccatcttctcctccctggccacccgggagtttgactccgccttcctggtggacggggtcatcatcatcgtcatcggactggtcctcttccccctgtacgctgccctgtcctggggcatctccaaggtgctgaaggtaccggcgggccggcggggcatctggtccttcggtgccaccttctgcaacaacggctttatgggcttccccgtggccctggccctgtttggcgaggagggcctggccctggccgtcatgttcggcgtacccttcaacctgctggtctataccctgggtgtgcggatggtgtgcgctgactgcggcaccgacgcccagcctgtcaatttggtccgcaccctactgagcaacatcaacatcgcccttatcctcagcctcatcttctatgtggggcagatccccctgccggaggccctgatgacccccgtcacccatctgtccaatgtgaccacacccctgtccatgttcgtcactggcatggctctggcctccggcaagggggccgagttgttccgggacaaggatgcctacaccgccaccggcatgcggctcatcgttgtccccctgctcacctgggcggtgatgtccctgctccccctgtctaacccgctgatcgcctccatcgtcctcatcacggtggccatgcccgccccctcggtcaccaccattctggcggagacctacaacggcaaccggggccttgccgccaagatcgtgttcctcaccagtctgttctgcatgatgaccctgcccctagtggccatgttcctcctgtgatcctgctgttcccgtgctgccgtccccctgggacggcagcactttttctccatagagagcctccgtcaaggcggaggcccttcgggtgtctctcatatcaaaccaaaaaagcctcctgccgcaaggtgctctcgcgccggatcttccgactctgcccgcaaagtccttccgcaaatttttgcataggcaaccagattttgcggatactactctctgtctacaaaatgcaaccgcaggaggaatttgatatatgaaagccactggaatcgtacggcgcatcgatgacttgggccgggtggtcatccccaaggagatccgccgcacgatgcgtattcgggaaggtgacccgctggaaatctacacggaccgggacggcggggtcatcttcaaaaagtattccctcatggggggcgtgtccgagttcgccggccagctgtgtgagaccatcggccgcaccgccggcaagatcgcagtcatcaccgatcgggacaactgcgtggccgtcaccggcgcccccaggcgtgagatccaagacaagcagatctcccctgagctggagcggctgatggagggccgtcagatctatcagcacaagccgggagccgagaccattcccctctgcgccgacgggaccgcgttccatgtgggcactgccgcccccatcctgtccgagggcgatgtgctgggctgcgtcatctttgcggaggacggggagagccagtcccccgacgagatcgactacaagctggcccaggcggcggccgccttcctgggaaaacacatggagagctgatcagctcctggatacagcgaggacgcagggctcccccctgcgtcctcgctattctccctacgctcagtcgtttccccggtcttggagcatggcctccacctcgtgccgggggctgcggcggtccccttccccacagcggtagtaggtgccccgataggggtcggagcccagatacaccggccgctggcggaaatctgccctaggcacaaagatggccaccaccgtgttccgcccgctccgcatcagccgcacgtcttccgtccggagcacgttggcgctgaccagcttggggtcctgcacgatggaccagaactcctccaccagctcctccgggtccaggagtggcaccgaatacagggagccgtccttcgcctccgccacccccagcaggatcaccccgcccagggtgttagcgaaagcggagtaggtctcccagaggctgtggggcaggccgccctgggcccgcttggcctcgatacggttgtcctcccggtactctgacaaaaattccagatcatccagcccttccatcacttcgctcctttctctagcgtgtcggcactcacgccctacagaagaagtccgccccctccgtggagggagggggcgtcttgttacgtcaaatgggtctggaaaaagcggctggcgttgccgaacatgatcccgtcggccagttcctggccgataccccgggacagcagatactcatagatccccgccgccttggccgggctgttcaggtagtccggcaagtcggccccgtcaaagtcggagcccagggccaggtttttggccgcccccagctccaggaagtgggacacatggcggtacaggtcatccaagctctccaccctgccctcgtcccgcaggaatttcacaaagtagttcaggccgatcagacagtcccggtccaccatctcccgaatcatctcgtctgtgaggttgcgtttgtggccgcacaccgccctggcgttggaatgggtggccagaaagggcttttgggccacctccagcagatcatagaagcccgggtcgttgaggtgagacacgtccaccaggatgccgcatcgctccagctctgggatcaccgcttttccgaaggcggacagcccgtggtccgtggtgtggcccgagccgatctcattctcgccgttccacaccagcgtcaccgcccgcaccccctggtctgccagcacctggacgcggctcaggtctccggccagcgccgatccgttctcgatggtgagaaaggccgctgtctgatttccggcccatgcccgcttcatgtccgcataggtgcggcagggggctgcccgctgagaaaacttcttcatctggcgaaaaaagttctcccggttctgctcaaaatagtcgatggccgcctgtcctcgatactcatcgggaataaagaccgcataaaactgagcccagtgcacatcctccggcatggcggacagggacagcacccgttccgggtcgtccagcgtgtccggattccccgcaggggtgggccggcagtctgtcagcgtgtcacagtgcagatcgatcagcgctttgggattcataaagccactccattctgtccggagggaaactcccctcccgttttggatcacggaagaagggccgggcggacttctgtccgtccggccctttccgctctattcaagctgggtcaggcctcgtcttcgatcaggccgtaatctccgtcattgcggcagtagaccaccgcgaaagcaccgtccgcatcctcgtcccggaaagcgaagaagctgtggcccagcagattcatctgaaggatggcctcgtcccgggtcatgggcttgatgggaaagcgcttgctgcggaccaggttgtactccccctcctccggcccgtcgggcacaaaagtggagatctcctcatccacgctgcgctcaaaagccccctggcgcagccgcttctccagccgggtcttatttttgcggatctggcgctccagcgtggccacagcggcgtcgatggatgcgtgcatgtcggaggtgctctccgacgcgcggaagatggtaccgccagaccggatggtgacctccactctgttccggtccctctcgatgctgaatgtgacagctgcggtggcgtcctctttaaagaaacggtccagcttccccacctttttctccgcgtaccgatgaatcacggcgggcaggttcacctttttgtccgtaaacacaaacttcataacattccgctcctttcgccccggagggccaacttcatcggagatctggcctccgatgagtcaattataccacaggcgtcaaaaaattctagacttttttgtgaatttttctcaagagtttccctcttctaacagaacatcattccgtcacccgccggccgtccaccaccacggcggagacccggctgagccagttgaggggatggccgctcatcaccaccacgtcaccgtccttccccggcgtcagggagcccacccggtgagccactccgccgatctccgccgcccagatggtgatggccgccagggccgcatccgccggcaggccgcccttcactgccatggcggcacacaggggcaggtactggaccggggtctccgggtggtcggtgcagatagcgatcttcacccccgccatcgccagcagcaccggggtctccaggctcatgttagccagctccggtttggaacggtcccccaggcaggggccggtgatgacccgggccccctcccgggccagctcgttggcgatgaggtggccttccgtaccgtggacgatgacatactccagcccgaactccttgcagatgcggatgccagtggcgatatcgtccgcccggtgggcgtggatatggacaggcagttctcggcggaccacagggagcagggcctccagctttgcgtcaaactccggcttctcctcgtctgggtcggcagccgcccgctccagcttgtcccggtactccactgccttggccagattctcccggataacggcagcggtggccatccgggtgatgggtccctcatgccgctcgtggtaggtgagcttggggttctctcccagcgccagcttcatggccgccggggccttgatgaccatgtcgtccagccagcggccggcggtcttcatggctacgaactggccgctgatggggttggcgctgcccggaccggtcaggaccgtggtcactcccgccagccgcgcgtcccggaagcagcggtccatagggttcactccgtcgatggcccgcaggtggggggtgcaggggtcagtggcctcattgccgtcgtccccctcaaagcccatggcgtccccgaacatccccaggtggcagtgggcgtccacgaagccaggcaggatgtgccccccccgggcatccagcgtctcccccttccagtcggcggggcactcctccatcggtcccaccttccagatctttccctcccgtatggctacaaacccgttgtcgatggccggtccgtccatggtgtgcaccgttccgtgaatgatcagcatatattgctcctttctggcaattctttagttgacatatttgtaattatatggtatatttgtcaggcagctcaaccaaactggttttctctgcgaatctgttcctgcatttgctgaacgcccttggatggagatccatccggggcgtttttgtatgccgggataaaaaaggaccgcgcaggcagctgcgcggtcccggtgcctctcaccggcgggagcggcgggagtttccctttttttctatgtagcgcagctcagacagcttactgtcagaggactgcataaactgcttcagccggtcctcaaagtcagtgggctccttgggcgcggcaggccggggcgcgaagccgccaggccgccctcccccggaacggggccgtccgccctgtccgccgccggccgggcggggagggggctctgtcaccttcttgatggacaaattgatccggttgttctgatcgatgccgatgacttttactttgacttcctgcccctccttgaggtgatccgacacctcgttcacataggaataagcgatctcagagatgtggaccaagccggatctcccttccggcagggccacaaaggcaccgaattttgtgattcccgtaaccttcccatccacaatggacccaacaccaaactccataagcgactgatatatcctccttgtaaatttccccctgaggccgtttcctgggtggtcagttggccacgtcgatgtagagggtctcccccgacttcacatagcccttgtcccgggcgaccgactccagcatgtcaggatcgtcgctgttttcgatggcgttggccagctgctggttttccagctgctgggcggccacctgctgattcagctcctcccgctccacctggatggtctggatctgcccatggagatccagcagggccgtggccatgtagatcagcaggaccatcaccacgaccttggtcaaaagaccggctcgcttgaaccgcatgcgcactccctcccgtctcccgccgctcccgtctccgggcggcggcatccagttcctcagttatctgatttattctaaaccattcctgcgcaaaatgaaagctattttttgcaaattttttagtttttttctgcaattttcccgccgccgccagggggagggtaaggatgcgccacaccagggccgccgcatctgccaaaaaatagccgattttcagcatccaggtactgatgagccagaaatagagcaccccgcccccaaagagaaagaagatcccgtacagccggatctccccccgccatgcctgctgagaccagacgaacagcgccactgtcacaatgatccagaaggacagatccagcaccgcccccagcaggggcagggccacccggacccggaggacacggaacaggtcatacagcagccccaccgccagccccagcgccgccgcctgggccagggcggcggcctgctgcgccaccgaaatggtcatgtcagcgcagcagacgggcgaagaatccgccccgctcccggctgtcgtcctcataggatagggaatcgaccacgccctccacccgcaggtctcccccgtccagagagagcttctcgatgtgcagatcctccccccggaccaccagggtccccttcactgtggtcatgatgatggtgttttcatcgaagctctccacctcctccacgccggagacggacagctgttcccgcccctccagaatgacatggtgtgccccctccatcctgggcatgttctcttcatacgccattgcgttcaccctttctcgtttttcccatttatatgggacaggacctggggttatgcctgtctgccagcctcagttgacaccacccagcccccacgggtataataaagaccacaagttctgattgccgatttaaaggagggccctgccttgagccgagaaaccgttctgtccctgctgctggcgcacccgggggaatatctgtccggggcggccatgagccgtacactgggcgtcagccgcgccgccgtgtggaaggccatcgaggctctccgccaggagggatatgagatcacctccgcccccaaccggggctaccgcctggagtccgcccccgaccgggtgcgggagggggagctgtccggccacctggccggctgtctggtggggagccgcctgctctgtctggacaccatcgactccaccaacacggaggccaagcgccaggctatggcgggcgcgccggagggcctggtggtgctggcggaggagcagaccggcggccggggccggctgggccgctccttccagtccccccggggctgcgggctgtatctgaccgcccttctccgcccccagctcccccccatagaggtggtggacttcaccgcctgggtggcagtggctgtatgcgatggcatccaggccgcctgcggcgtccgccccaggatcaagtggaccaacgacatcgtgctggaagggaaaaagctgtgcggtattctcaccgagatggggctggagaacgagatcaacgccctccagtatctggtcaccggcattggcgtgaatgtcaaccagcgccccgaggacttcagccccgacgtgcggcccatcgcagcctccctcttcaatgtcctgggccgcccggtgcgccgctccgagctggcggtccagatcatccgggctctggaccggatgtactccgcctttccccagggcaaggcggactatctggcccggtaccgggccgactgcctcacgccgggcaatcgggtacagctcatcacccccgcctcccgcaccgaggccaccgctctgtccatcgacgacgagttccgtctggtggtggagtacgatgacggccgccgggaggccctctccgcgggagaggtgtccgtccgcgggatgtacggatatgtgtaacaaaatcagtcaagcggtccgccccgtagggcggaccgctcgctttctctcaatatccgtagggccggccggtctccgggttgatgcccgggtccagcggggcctcctggccgttgggcagtttggggcgctctccgccctccagggctccgaaatagaggttcatgtccacctcgccctggatacccggcacactccccttggagctgtactgccacatctggaagtcatagtagaaactgggctgcgcctggtactgggcgaaccagaagctgtgatccagcagcttgctcaggtcgtacttcacatacccctgataggagttgaagtagatcatagactcatagcccgcctcctggatggcgccgcagaaagccagtgccacctcattcatggtgtcgctgtcgatggcgttggtgcgggcgctgctgtcgctgaccatctcccagtcaaagaccaccggcatggtcaagtcatagtctcggacccgctccaggacgaaccgcgcctcctccagcgcctcctccacggtaatggcctgggagaagaagtaggcccccaccgccagcccggcatccagcgcgccctggacgttccggtcaaagtatgtatcctcatagagcttgccctcggtgtagccccggccgcccacccggacgatagcgaactccacaccggcatcggccgcctgctcccagtcgatctccccctggaactgggacacatccaccccaaggtgcccctgaaccgtcccatcatcataggtgaggtagtctccctccatgcggaacagctgggggatgtaggagaaggcggggactgtctccagcacatccaggtagaaggtctggctgtacccctcataggcgatctgccccgcgtggacatcggtgttcttcatccgccagatgatggcgaccagctcggagcgggtgatgctgtcctccggatggtaagacagcgtgccatcctcctccagctccccggagagctgtatcttttcatagagcacggtgacatagccatcgtccacgtctccgaagggcgtctcgttccgggagggcctcaagttcagggctttggccgccatctgggccaccgtcagccggcttaccgcactgtccagatcggtcacctgctcccgggtgacaaagcccttctccagggcaaagtccgcattgccgctgctccagtgctccccggtggcctcccggcggtcaaagcctgccgccgccagcaccatcaccagggcctcccccaccgtaacggcgttgtccggccggaaggtgccgtcctcatagccgctcaccgccccgtcctgtttcaggtccgccgcgaagggggcgtaccacgcctccgccggcacatccgaatagggggcctccgtgactgcgggcggggtcccggccgctgtctcgaccgccagggccgcgggcaccgctgtcagcaccatggacagagccgccagcagagccggtcccctcatgtttcttctcttctgctgcaatgggatcatcctttcctgcccggcgccgcgggcccgtgatatgttgacataataccgcattttttgacccattgcaaccatatcccaccttcgaagaagagaaattttttcctgctgatctccctgggcaccgtcccccttgcggtcctgcccggcgccgcttataatagggacatgtgccggcaggcagtcctgccggaaattttagatcttcacacctggaaggagcccgtctaacatgtggaaggattgtcaagccctgcaagatgagatcactgccctgcgccgggagctgcaccagatcccggaggtgggggcacagctacccgagaccgccgcctgtctctccgcccatctggaccgcctgggtatccccttcgtccgctctccccgggacagcggcctgattgcctccatccagggcggcctgcctggtcgaacggtggccctgcgggcagacatggacgccctgcccatccaagaggagaccggacttcctttttcctcccgccgccccggcgtgatgcacgcctgcgggcatgatgcccacgccgccatgctcatgggggccgcccaagtcctgcagaaacacaggaaggagctccggggcaccgtccgcctcctcttccagccggccgaggagcagtgtgagggagccaaagtcatactggagcagggagcgctggatggagtggacgccatcttcggcttccatatcggcaccctgctgggggccgacatccccagcggcaccgtgattgccccctccggctgctgcatggcggcctttgacaagttcaccatccgggttcgggggcgcggctgccatggctccaccccggaaaaaggggtagaccccgtcaatgcggccgcccacatcgttctgtccctccaggccatcaccacccgggagatcagcgccgctcgctccctggtcctgaccatcggcaggatccaggggggcgaccagtataacatcatcccggacgaggtagtgctggaggggaccatccgcactctggaggacggtctgcggcagtacgccgcccggcgcatcggtgaggtggcccaggcagcggctgccgtattcggcgccagtgcggactgcaccatcacctggggcgctccccctgtcctcaacgatcccgctatggcggagctggccgccggggccgccgccgaagtcgtgggcccggagcacgtcgtcacccgcatcccagcccccaacatgggaggtgaggatttcgccttctatctggagcaggtccccggggcttttctctttctcagttcctccgaccccgccaaggggacggaccgcccccaccatagtccccggttcgatgtggacgagtcagtgctttggaaaggggccgccctctacgtctcccttgctcagacctttctcaacggctgaatcctctccacgactgggccttcatcgggaaattcttccagttgaggcatttccggcctcataaaatcctctcccccgcatatacatgtacagcagatgcaaaatccgggggagttgttgctgtgtgaaagggaatatcgaggaacgggcctgtcagctggccctttacatcatagagaaccggaccacggtccgcgcggcggcacagaagttcgggatcagcaagtccacggtccataaggacctgtccgagcgccttcccgccttcaaccagcctctctatctccaggtcaagggcgtgctggaggagaacaaagcggaacggcatatccggggcggcatcgccacccgacggaaatacaaaggagcctgagccgggggaggggcgctttcctcctggcgtccggcttccggaacaggcggcggggacgcggcaggatgccgcgtccccgccttattgcttt

SEQ ID NO: 13586 - DNA, 38069 bp, Unknown
  gut microbiota DNA sequence
caggccgaatttgagcaggctgtggcggatgcggtccttctgtgggaacgctaaaccaagcctacaagcagaatgcctgggcagcttttcgaggactgcccaggctcattttatatttcgtcttcccatacacaatgagcgcccgttctcctggcccgacaggagaatgagcgctcgttttcttcattttgcagttctattgagagcctccacgccagttcaaagccggcagtaaaactgtcgagggaggtctgttctatgatcaagttctgggcatcaatgattcgtagcaccagcttgcgttccggctttgccagcgcctcgatcaatgctttgtggcactcctccacttcgttctcctgttcatcaagctccgggcggacataaaagtaatcatacagctctttgagcagtttgttttccatcgtcatcatctccttgtgacccaaacatataccacaccttccgcagaatatccatcagaatttcagaagattatccagaatatttgccgcttccctaagatctgccgtggatgcttcattgggcttgctttcgctttttgcggcagtatgggccagatatggtgcatagttctgccgggtcattgcggttctgaagtggccaagcatctgagaaacctctttcgtgcccattccattctgcagcgacaggacggcgcaggtgtgccggagatctgcgaaccgaatgtgatccagtccagcctctttgatgatctcattatgcatccggcgcaccatctgaggtgaatagggcttctgcgtagccgggtgcatgaacatgagcggacttcctgggtgtttagcgtgttccaggcgcaggagttcaactgcttccggggtcagtctgacgatcctggtgccaccttcgtactccaccagttcccgccgttccactgagcgtttctcggtgatggtcagcgtccgctccttcgtgtccaggtcgctccatttcagggcgatcagttctccttgccgaagtcccactgtcagcgccatcaggaacatggggaggtggcccaaccgctccgccgcgtccagatagtcctccacctctgtcggtgtcagcacattggcgctgaccttcttggactttgggtagtgaaacccacgggcggggttgtccgttatcagtccgtcccgcattgcttgatccaggcattgctggagcaggcggtggatgtgccgcatggtatgctcccccaaccctggatattcggggctttccgggcgatgaccgccaaagtgttttcgctcctccaggaaatctcccacctgctctacggtcaattcagagagcggtatgtcccctaatccggggacgatgtggtttttgaagagataaccatgggctgcgtatgtggtcgggcggctctggtgcttgtcgtagacctcctgccagcgaaggatgtactctttcagcgtcatattcccacctccctgcactgacgctgcaggttccggaaggccacccatggaagcccagcttgtttcagaatccgcttgtgcagatagtagaactcgtggagttgatacggcgctccggtcttgggattgaggaacacataacggccggtttccggtatccgttccagaagatgctccgccttgctgttgagcgtcagcaggcgctgccctttgaggatgtagcggcagcggatatgaaaatcggcccacgacaaggtgatgagttcacattgccgcaggccgctggagagtcctgtgtagatgagagggagtgcgccaagcttctccgctgcgttcagatatcgctggatctgccccaggcgcaagggagcagtcttatattcctctgccgtcggttcctggcagagccgcaccggattataggggacgagttggtcacgagctgcttcatccatgcatcgccgcaggagcagatggacgcaccagacgcttctggtgctgagtccctgtctccgcagaccatcatagaagctggtgatggtgtcttcggtcagctccgccagccggatatccccgattccggggaggatgtggcgatagatcaggttgcggtatccgcccacagtactgcctctccatctatcctgattctcacagaaccagcagtcacacaactggcctaccgtgaagttaggttctttctgcatatcttcgcctccttttggcaaacgaacaataccacagaaagaaggaaatagccactactttatcgccacgcgtatgctcctgttgtctttggtgcagcggcatggtagaatgaaataactttggggaggcagtcattaatttgtgtggagatgggctgcgctcaggctactggcgggaagggctttattctttgtttatgcggcgcagtttctgcgcctctgtgccgaggtgattggcctgtcatctccccctcaacccgggcggaacatcttttaatacacagaatccaatcccacacaaatcccaaaagacgaaagggtttcttgaaacaagcagggcaaaagagtgttaaagaggaactgcccaagcacaggaaagggccaaagaggacggaagagtgtcggctgaaggttaagacaaacatttgggagctggatgtcgtgcgttcgagtctccccactcgggccaaacaatgataatctgaactacattgtccaagtgggtaatgtgaccggatttatcatttctatcgaaatgttagttaaaacatacaagggcagggagggccctgtccttgtatgttttatttcccatactataataacatttaacatctctctacaagaccattttattgggaggattgtgaaaccagaatgaattataagttttcaacaccaaagacaatttccgtaattattgtatattttttgctgtttttggccggtgatttattgggaagtctaatttttgatttcctattttctaccatagatcttccagtccgtgagttgtaccctattatcagaatgccgggctatctgttgctgacactaattttcttttggctctatacaacaaaagttctccatctaaaaatggaagacttcgggatttcattttccgttaaatggtggggagttagtttatctgttttgttacctgcttttgtagttactatctttctaatcattggacgggcacaagtaaatgttttttccactggtgacatcttcttaattattatttcatctattcttattgctttgaaagcggggatattggaagaaatactattccgtggtttcattatgagactgctcgaaagtaaatggaataagtacatcgctgtgcttgtcccatccgttttgttcagttttgcacatctcccatcaatggaaacttttacaatcggaggtgtctttcttttaatcatcagcggtactttggtaggcactatgttttcgcttgcctcctatgcaggaaattccattggtaacaatattcttatgcatacagtatggaactttgcgatagtaacggacattctgcacattacaacatcggagggtgcttatggcgaacctatttttcaactcattataccatcagacagcatcttgttaactggagcaggatttggtatagaggcatctttaattgccatcattggatatactctcgcttgtttaacactggcttttatttacagaagaaatcacgttggtattttagagggataaaggaggcgggagtgtataaaacactcccgcctcctttatcccttagactttccctgttgtgctttccactcagcaaattccctttgcccctcctcgctctcgaaaaaggcttgtatctccgggaacaggacacgggccagggcagtgaggaacttcctttgcaggcagtctgcgctgcttcggttgatctggtaagcctcggcatacttgctcatggacagtccgcagtccgttgcccaagcagcttcatagagttcttcttttgtaactacttcacctgtgagcttgccgaccatacatggggttcaatgcctctttttttgaatgtgacgcagcacacagaatacggcagccagaagcaacaggcaacctgttccggccgcgagccagacaagaaggctgctggaccgctctgtaatacagaaaatgatctcctccgtctgactggtgagcagcagatactgtccgtcgatctcaaaatccgcttctgaccagccgctttcctcctgtacccatagcgcatagtgttttccagagtccggcaggcggtagtgaaccgtataggacacctgctctaaatccgggtcgtccactgtgacggtataggcagtgccggtgtgcgtctttccctggcgatcactccaggtcacattctcaatcgtgtgtgagacttctgcccggctgctgaaactaccgtccacaaggatctccggcagttccccaccgtccgaaagggcggaggtatagggagtatattccgcttccaaggtttgactggcattcagatgggtatagtccagatccggccaggcggcggagtacccctttttcgccggaatctccggcagggattcgatcccttccccatactggaaggggaccacggctacggtgatgccatcggccacgaaggtcagctccagctgagaaaacagctccggcacgccctccgtgctgcacagagaatcgaaatccactggctccgccttcccggcatagctgataccgtccagagcgcccaggttctcgctggtaaaggtgttgccggatacggtgccgtcgctgtccacatctcccgctaccgcccccagataagcagagccctcatcgatggtcaccagggtatgacaatttatcagggtagcccctaatccagccgcaccgcccacatagtccctgccagacaggcggcacttgctccagctgtcccggacgctgccccaggaggcgccggcaatacctcccacatagtcgccgttgctgctggatacagcgccgtaattctcgcagtttctaacccgtcccaggtccatcagaccgacaataccgccggcgtagtcctgctttccggtgattgctcctgtattgatacaggatgcgacaactgccttggtctgatatcggaagtccagggagcggtcgccttcctggatcaaatcgtcctccgggtcaaagtcgtattcaatagccatagagcccacgatcccggccacattaacatcgccctccaccgttccgtcattcctggcgtcagagagatagcccgtatctgtagtttcaggcgcttcgtccgacacatcctcaaaccgatcctcaaatttctcatcagaaccatccagaatatcccgcatcaggtcggtaatgacaccgaactgccggttgatggcgtccagatcgtccagcaaaatgtccgtattgctggacatggactcccgaagagcatctccgctgtcgatcaggtcagtaaaaatactgtccagagcatccccctgttccttgatctcgctgctgatgggacggatggtgatggtgggcatctcagatagttcttgcagcacatgggaaaggtcttccatgatgtctgaagtcagagaagacagttcctccatggtatctccggcatccctcagttcatctatggcatccccggccttctccagcaattcccgcagtttgcggacggcactcccgccgctgtccacgctgcgggccaatgcgcgcagtgcggaggataaactatccctggcggcctgtatctcctgtctggcggcctccaattcctcgatattgatggaaggcaccaccaatttttccgcggctgcggcgatctcctgtgcagatagctttgcgcgctccaggctggtacggatggccgccagttcgacctggagtgtctcaacgacagtctgggcagattcgatcccggccaatgctgcgagggcatcctccgcctctgcggcggccagctctgcggcggcgatggcagcattcagttcgtccaatttcacctgcagatcccgctcggcttcagacgcgcctaaatctttcagaatgttttctacttcctcctgtgtgtctgtaagctgttgggacgcatcctgtaatttttggtaagcggctgtcaaatccggcccctgtccaggggcgacattcatcagcgccttggccagttccgcccccgcctgcccaaacgcctgtccggcggccagtagatcctctgcagcacttttcaactgcgccaatgcttccggggcagcggtctccgacccgatcacctgagcaagcgcatcgttgacctggtccaagcagtttggcagagcggcacaggcagactgaaacgcccccagcttttccagaagagctgcccattccggcctcccctgaagcacaccatctgcaccctgtaaaatttcccatatttgtacaaaacagctgtcaatatccgagagatccttggacagttcagaaactgccgcctgtatttccgccagggttgtgtccgtatccggattccccagtacattccgcaggtgcgccatagccgctttgaggtggtctgccgagtcccggccatgccgggcagcgaccctcagatcgtccataacgtcctcaaaccggtccgctgcatcgggggccagatcgccggcctcctgcgcctcgtccatcacatcattcatctgaccagccaacttctccatcagatccagcgcgtctgtggcatcctccataatgggagacagtttatccgtgagccaggagatccgggcagacatgctgttgaccgcatcaatgttttcattggcccagtctgtggtgagatctgccaagtcactgatagccccctggacctcccccgcccggtcggaaatagcctgcatccgctcagagatctcgttggaagcgctgcgggcatcatcattggtccggccgatcaggtctcgcagcacgtccagttcatccaacaggtcgccaacctggctctcagtgtagagcagacgcacctccggcaccaactgtccggtaatgccgcccacatccttccggcccaaaatcatcccggaattggtgcagccgttcagatatccggactgctgccctacgatgccgccaatgttatacccctcatgggcataccccaccgccccggtgttgacgcagctttgcaggatgcctgaggaaaacccggcgatgccgccaatgtcagtacacacaggtacattctccgcagcattgagctgctcacgattcaaagcgtccagatccagttccgtgtccacctctgtggtgttgatgctgccgctgttttcacactggataatagaaccgtagttctgtccggcaatgccgcccacatagtgctccccggtaacagagccggagaaagcacagttgatgatctccccctgagcttcgttgatgcctgcgatcccgccaatactgtccaatccgcttaccgtcccggaaaacgaacacatcgtgatggtcccctggttcttccctgccaggccgcccagaacgtttttgcggtcagcgggagagatgctgcccgagacgtggagatcccgcacagagccggtgggctgtatgtaccgaaacagtccccgcacattgccgctgccggtgatggacaggccggagatggtgtgtccctgtccctcaaaggtgccgccgaaggtagggatgggggcaaagtccacgccggtcagatcaatgtctgcctccagatagacggttttcccctgagaccagctgtccagggtgcagttccgggagaaccccgccagatcctctgccgtgcggagatagatggtatcggcggtcccagcggccagagcagcgggagcgataagggagaggagcaagaccgccgccagcaggagactcaagaatttactgcttttccgtttcatctgcttttggaacctccttggtctggtaacttccagtctccagtatcccggagacgtctccgtagatcacgccttggatgtgggcgtccaccacaccggacacccggccccggacccggccatttacatagacggtgccgctggcgctgtggctgacctccggaactttgatgttgaagcgggtcttttccacgatcttgtctcccacgtacaggatctggggcaggataaacatgactaaaaacatggaaatcagcgttccccggcacaggcactcgccgatgcccacaatggctggctccgtagtgatctgggagatcaggaacccggcggcagataggatgctccccgaggtcaacaccgttgggaaggacaggtccagcgcctggacgatagcctctgaccgcggcatcttctccttcagttcgttgtaccaggaggagatcacaatggcgtaatcgatgttggcccccatctggatggaggtcaccaccagatagctcataaagaagatgggctgctgggtcacgccggggaaggagaagctgatccaaatactgccctggatcaccaggatcagcaggaggggcaggcccaccgactggaatgtgaacagcaggacgataatgacaaaggccaccgacagcacgctgatcatcacattgtctctggcaaaggacacagacaggtcatagtcactggtggagtccccaaccagatagacgttttcggcgtcatagtatctctccgcttcgtcatggatggtctggaggaaagcaaaagtctcctccccctcctctggcagatccagactgaccagcatccgggtgtagtcctctcccagcagctgctctcgggcgtcagaaagctgttcatagagagcatccagatccgcctgttcctcctcgtccagatctacatagccctcctccaccttgtcataggcaaagaaaaacatatccatcagcggaactgtatagtcatccaggccacccacgatccttccgtactcttcgccctccgctgcataggcggcataaacaagacataccagctcgtagtccagatccgtcatctcggcaaactgccggggcgtcagggcgtccgtgagcatgtagccgtccatgacctccacattggaaaggcccatggcgtagtccacctggtcataggtctccagccgctccagcagggccttttcactgatatagtcgccctttggcacgatcagcgccattacgttctgggtgccgaaggtctcgttgactttcttctcggcgatctgggtctcattttgtcgggcggtctggatctgactgtagccgtagacataggggcactgattggacatcagaaagcccgccacaatggccgctgcgaacaagggcacgcctacatagcgcagtttcagggtaaacttgccccagcggtcgatctttgggacaaaactgcggtgctgggtttttgccatggccttggaaaaaagcatcagcaggcccggcatcagggtaaagaccgagagcatgctgaacagaatggccttgatgaggataatgcccatatcaaagcctatccggaactgcatgaacatcatagcggccagacccgaaatggtggtaaggctgctggcagagatggagggaatggcggcgctcaccgctgcgatgcaggcctcccggtcctcggcgtactcccgctcctccagaaagcggtggagcatgatgatggcgtagtcgatggccagcgccagctgcaaaaccacggtcacagagttggagacgaaggagatctccccgaaaataaaattggtgcccagattcagcagggccgctacgataaaggtgatgagcagtaccgggatctccgcataggagcgggaggtgagcagcagcaccagcacgatgatcaccgccgccaccgctagaatggtccccatctcgctggccagagaatccgcctgtgagttgcctacagcactgtcaatgtaatagtcgtagggctccagcagttcccggatggcagccagggcggcgaggctgatctcgtcctcctcctcgccgtcaaaggtcacggagatcagggcgtcagcccccttgaaatactccgtgatgtcctccggtgtctccggctcaccgtcacctcctgtgtccgcgccgacggtgctgctcccgaaggtggccgaggtgacgccctcgatctgctccatctgctccgccagttcctccgcgatctcataggtcacatgggagaccatgacccgggcggtgccgaaggtggtaaactcctcctccatgagggtcagtccctggcgggtctccgtggtctccggcagatactctgtaatgtcgttgcacacgctgacccagtttcgggaaaacaggcagaagatcagggcacaggcatagagaaaaaagatcaggtttcttttgtcgacgatgactgtggccagtttctcaaaaaaggatgacttttccgttcccttgctcacagttccgacgcctcccggggtccttgatggagaagtgcgccttcccaccgcatctgggcggattttgaggtagatgttccgcacaggctccctgcctgcagttttaaaacggtctcacagggaatggtgctcaccaccgtttggatgggatgaaagagatggagcgtcccatccgctgcccgcacgccctgcaccttgttgacatagcccaccagatccagtgatccggtaatgtagctctcctgataactgagggtcagaactccctcccgcggacccagttgaccctgtatggtgacttgatactgctctgtcatcgcgccgcgctccttccggtttggtttctttcagcataaaaaatctcttggtggaaaacaagatgcagaacaggggcaaatgtcagatttctgacacttgctcctaatctgcatctatgataagtcctgggatctgtgctaaaataaaatcaagaattcgaggaaaggtctgtggtcgttgggatgagacagcgaacatacgaagccagcgaggcggccaagcgggagatctgcgccgcactgaaaactttgatggcacaaaagcctctgaataaaattaccatcgtggaaatcatgcagtcctgcggcatggctcggcagcatttttactaccactttgaggatatctacgacgcagtgcgctggatgttcgaccaggaggctgtggcactgctgcgggagcatgagggtgtgatgctgtggcaggacggcctgctccaactctttcagtatcttcaggaaaaccggacggtctgcctgtgcgccctgcactccttgagccgggaacatctgaaacgcttttttcagacagatattcacgctatcatacagagtacgatccagcggatcgtcatagcactgaactaccacgcatccgatgacgaagttgatttgctgacgaaattttatgtgggggcgctggcaagcatgatcgaggagtggctgctgggcgagatccagggaacccctgaagagctgatccggtttaccgaccagcttttgaaagatcatgttcgcggcgctaccctgcggatgacggaaccgcgcccggccgcggagcagatttgtaaggaggattcgtaacatgaagatgccgatcattgctttgggccgtcagttcggcagcggcggccgggagattggaaaacggctggcagagaaactgaacatcaggtgctatgaccgggaactgatcactctggccgcacagaaagcggaactgcgggaggaactgtttgcgggcagagaggaaaaagcacccaatccctggctctttaccggagtctatgagggcggacctcaggtgcggaagggccagccggcggaggacatcctgtttgagatgcagagccaggtgatcttggaacttgcccagaaagatccctgcattattgtggggcggtgtgccgatgccatcctcaaatctgccggcatcccggtgatcagcctgttcatctgcgctcccttcggggatcgtatcagacgccggatggagatcgagggcctcgggccaaaagaagcggaggacaccatcagaaaaattgataaacagcgaaaaaaatactatgacacctataccggcagaaattggggggttccggagaattatgatttctgcatcaacagttctgtgatgggaattgaggagacggcagagcatatcatcacttggaccagaggcaattggtgacacattcggtttcatctttcgattttgtataagaaatttgtcttccgagccttttatggcatccccgggagtcttctccccctgtttatagccctgcaaatcctgcgttgcagacaacaggaatcatttacacattttttctgactgacctacaacgcaggaacagccgcatagaaatacaaaaaaacgctccctgtccgggccgctgcatgaccttcagccacgggcaggaagcgtttttgaccacatttccaaccgaaaaaccattcaaaaagcgtccccgttatttctgtgcgaatacaatatcacattttcactgcttgtacatgggaaaatgcagctttcaaaatccgcgatctcggcctctttctcatatggaaaggcaatgataagttttagttgataatttccatgcaattatgtatgatggaaaagagcgatttgaccccatcatttatgataacggcttgcactttacgcattcaatgatgtgcaatgcaggcggaagtttttgggagatgcacacgaatcagtcaaaaataactctgtttctatataaaaatggattttgtttatggagaaaatcacatctgtgggtggatgtgacttcttctttgcgcccttttcatgccctgcgtcagcctgtccaagtgacagggtctcgcagggcgttttttctattttctgaaaggagtctgagaatatgaatctgaaatacgcctgccccagctgtgggacgccccttgggtatcagggactatgttggaaatgcaagtgcgaacaagagcgacaagttgctctggcctggacgctggaacagattgccgaaaagcagagaaacttgattcagaacatccagcggctggctgatatggaggacccggaattcaccgacttttggcagttgcttggctgccgggacgccatccacccggagatccagcgggcggcgctggccgcagaggttttctggccttctgaactttactatcgcgccccagaggatgtgcgggacggcttgatccatgcgctgttgtccacggaaaattccagcgaagcgtctaacctgatgtgctgccttgccttccagggggatgaaaaggcaatggagacattgttggagttggagcggaatccccggccctggcgcaagggcctctatgtggacccgtccagctatgcgcagattggcggctggaccttcgacaaggagggccagagaatccaacttaactttgacacctgctatcccatggtcaagggaaccagcggtgagaagtctcccgtccgcattggccgggcacggaaggacacatgcccccactgtggcggacgcatagtggatatgctggtgctggacggacgggatgagcggctccggttcctggggctggacggtatcctgaccgccacctgctgccccagctgcgtgggattcctaaaaggccctgccttcaaccgcttttctctggacggcggcgtggagatttttccctccgagctctttgacggggcggagaagatggactgctatgtccatccggaggactacaaggcccttaccgaaaatcccttcgtgctgggtaaggcgcctgtgcccctgctttacggcgcggcctgcgaggatgtgaacacggtgggcggctttgccaactgggtgcaggacgcggaatataccacctgtccccactgtgggaagcccatgaagtatctggcccagatccagtgggatacagtgtttgactgtgcagagggcacgctctatgtggagttctgcccggactgccagatcgtatccatgcagcaccagcagacctgagaggagtgcatcaaatgaatttaccaaaacgaaatagtgcggacgggcgctgttactggatgaagcccgaggtacaggaggaactgcaaccgctctttgaccagtgcatccaggatgccattgacgggagaatcacgcggcttgattctctctggccgccggtagtagtcagcagtcaaggtgcgccctttgaggtgtgcgatctggtgagaaaatggattgaaacccagcgagcggaaaccatggatgcggaaaaagctatcgccttcagcgaaaacctgcgccgccagagccgctggggtgaaattgactattatttgattaacctgctgaaacgggaattacaagagaagtattttgtcggaacaggcagtgaagatgactactggaaagaacaggaatatttcctaaaaccgggtatccgtgcggaggatctttcagaagagctattgcgctttgcctgctatgtggcggtgagctataagatatatggagcgaactatgaatatttttcaaccaattatctcttgggcttggtagagaaagtccgtcctgatatggtgaaaaagctccgggaaaatggaaccggcaggctgccgatctctctgcaaaagaggaaaacagagcacttcactgcatcggccaacgatgcctttgccgtgatccgtattactgccagggacaacacagaggaatgctgccatgaagtgctgaactacctgtgtgagcttctggaacaggaggattttccccgcagctatgcggtggaattcaaaggaccggaaaagaggtatcttcccatcacaggactgcccaaaaagggagtaaaccagctctttgcttgtgccgtgcagtaccccggcctccatcccctgatggaacggtatgcccggcttgccatgcggcaatatgagcagtacaccaatctcagcgatgagcagtgcgcactccccggaagttttgccgtgttcgccctaggaatgctggggcaagagtggcggcagctggtatgggattatctcgacctctgtgatgatgagcactcccacttacaggaaaaattcctcaaagagtatgtaaaacagttcggatttaccgccgataccgtccctgtatttgtccgtggggtgctgtccatgcagaacatgaagtattccaaggactataccgcgtggatggcaaatgcagaaagcctgggcgctctgctggaggcaaaaatccacctgtccgagatagctgggtgtacgtaagacagtattgcgccgagattgacgaagcggcacgaaaccgcatggagctgatcgtgccagagctggcaaagcagtacggcgtgaccgaaaggctgaaagccgaaaaccaaatggaatgggtgcggcagatgaacgcttgcaaggcacaggcagaggagattgtgaaagcggaattgatttacgattgagcgaggaagtccgggcagaaaactgttcggacttttctcatatagtccaaagttgcggtagaactgttcacaagtttatggtataatttgaatacgaaaattgagcaacaaatttgaatttattaaggaggatatggatgaaactgtttttatgttcgcacttttcaagtgtaggaagtttgataaaagaagaaattgataacaaaaaagtcgcatttattccaacagcatcgctgcgtgaaggctacaccggttatgtcggctcggctcgaaagctatttaataaactgggagcagccgtaactgaaattgatatttcaacggaggcttatttaacgatacagtctgtttttgaagatgcggatgtgatatattttactggtggaaattctttcttccttatggaccagctccgtaaaacgggaacggatgagctattgaagaaggaattggaaaagggaaaactgatgatcggtgaatcggcaggtgcgattatatgcgctccaactatccaatatattgaacaaatggatgaaaagccggaggactactcacaagaagatgatgcagggcttgatttgattgatttctatgttcttccgcattatcttacagcaccatttaagaaagttaccgagaaaataatgactgaattttcggatttgaatctatccccaattaacaaccgtcagggaattgtaattgatggtgaaggttcaaaggttgtttgcaaagactaatttgaaagttcctgtttgacgaactgataaaatccctttaggaactaaagggcgcacttctatactctcctatcgggagtatgtgcgtcctgcggagcttcattcccggtcagcagaagaaaactgcccgaccgggaatgttgcgtcacttcgttccgtcaaggtggctacaccccccttgcgccgcttatgcggctatcccttgtggacttgccgtccgcaaacggttttgacaaaccgtttgccgccagcaagtttgaagattagacataaacaaatcctccgcatggtctaagccatacggaggattaactgttttacggacacccgtctatcgttccaagcggtttttcctccgacgaggatgacgatgatgacgaggacgaggaacccgccgaggaaacagaagccagcccggaggaagtgctgcaatacgcatgggaaacggtctgctatgtgatctggggcaaagccagcgccaagggtggtcagaaagtggtggaatcagctccggaggaactgaaggaactttacccacagatttttgttccgataacggagaacccggaagaaagaggcagtctgctatgagtttaccgaaacgtgacggcgtaaatggccgttattacctgatccataaaccggatacggaccccgaagtgctgaaacacgcagatcagtgcatccaggatgtgttggatggaactgcaaaagaaaaccattccggctccccgctggtcgttcggaaccaaagcggaacgccctttctgcccagccagctgctggatcggtatctgtccaaactgcctttgaagggattcccctatgaggaagctgttattttctgcgatgccctgcggcggttggcgggctggaatgagatccgctatcagttggagaagtacatagaaaagcaggtgcaggagcggtacttccttgtgggagagcgggaagatgggtttacagtgtttccgccctgcacggtgtggccggaattgcgagcggaggatgtggacgaagggctgctgcactttgcctgctatgtggcggtctgccatacagtgtatggacagagttttgaatccctcaaaaccgaacacattcttggcctggtttcccagctccgcccggacatggtgaagcagctgaaaaccaatggcagcggcaaattgccaaagggtatccagcggcgtaagacggagcatttcaccgcaacggccaatgatgcctttgccaccatccgcatcaccgccagggactccactgaggagtgctatgctgaaatcctggactacctgtgtgcggtgctctctcaggaggaattcccccgcagttactcggtggagttccgtggaaaggacaaactctatctgcccattcccggcctgcccaagaagggaatcaatcagctctttgcctgtgctgtccagcaccccaaattacacaccgatattgagcggtatgcacggctggctatgcgggagtatgaatggtaccaaaacctcgcggatgaagcctgtgcgatgcctggctctttcgctgtgttcgctctggggctggagggagaacagtgggcgacactggtggcggagtacctggatctctgcgacgacgagcactcctccctgcaagagaaattccttcatgccttgatccggaagtttggtttccaaccatggacgctgggggtattggtgcggggcgcattgtctatgcagtggctggagcctgccagggaattccgcagcctgattgccaatgcggaaagcctggatgcgctgctggcagttaagcgccgcttttctgcttatctcctgccggaagaaaacgaagacccgaaattccgggccatcgcttggcagagcctgctctgggctatctggggcccggcctctgaaaatggcggcagcaaggtcatcaagtcggcgccgaaggaactgaaagagaaataccagcaggtatttgcgtaaggagaacgccatgaaaaagagaaaagccaaggactttattgccctgtacgccctagaagacgaggaaaagctggtactgattcaggacggtatcagcgcggacaagacctttctggataccttctggacagcgcatacccacgcccttgctatggcagatgtaaagaccggacaggtgatctccggccaatgctacctgagctggccgctgacggataaggagcgggaggccggcgactattccaagcggtttgccaagggcaatacctatcgtatcaaggcccgtggttggaaaggcgatgccctcagcgaaccccagtggtatgtcaccgaagtgctggaggaggatgtgccctgtccggcactggaggaactctgggcggagtacacgaagcctgttcttctgaaggacgaagtgctggggaccctcatactgaatcgggagatgagcacattcgatgggtcctgcaagtggatgggaaaagaagtgcggatctcgttggatgtggagattgaaaagaaagcgtcctggacccgtgtcactaatgtgatgaagaagctggtggcagagcaggaagcgtgggacaagtccctgcgggcgatggcggcccaaaagctcaccgctcaggccaacgagtggctggcggacaatgaccagaccgacagggacccggaggaagaccccatcaccaaggatgagtttgcccggcgcatcctgctcaccgagtttacagtatctcccggcggccgttttaccgcctggtatgaggacgacgatatgttttggggccatgtgatcactgtggatggaacgctgaaaaaaggccccgttgacgctgagatacagggctgacaacaaccgtttacaggaggaggcatccattatgtgcgagcactgccgaaccattcaaacatggagaaaatttgatgcccccaaggactatctggcctgtattgcctatatccagcagttggtggaacaaggtgaatttgaactgatggcagaggaatccacctgttcgctggagaaggtaaagactgaggatggatgggcagatgaaattatggctcacacggtccgatgcaaacactgcggtcagatctttacctgtgtggtcaacacctggcgaggcagcggacacttcaaaaaaggcaaaggatgacacagaaaaggcggtgaaatgatgaatcagacagaagaaacaaaatttcgggagcaaattgaccagtggaatgatgcggacgagttctcacgatgtattgaggctatcgaagccatcccggaacaggagtggggttatctgctgaccgtcaagctgagtcgggcttacagcaatctggcggtgctgggggatcacagcgcccacggcagggatggtgaggtggatggagaactcctcggacacgccattgatctgctggagtccgttcgccttcagggagagaacgacccttactggaactcccggatgggctattcctgcctgatggcataccgctccgctgccaccgcctatgaatacgcaaaacgctggctgtccctggccccggatgacccggatgcccaagagctggtgcgggactgtgagaaatatctggaggaggaaaattccttggaactggattggaaagagcgggaggagatcatccggcgggagaccattccccctgccgacgatgacatcctcggccatgtgaaagtacatatcgaccagcagttcggtgtctatacccagctcctcacggacaacagcgacccggatcacccgctggagatcgccgtcatcccgccccggccggagcatgactactacaccctggtcaccgtcggcctgagccggcatcggatgggtttcccggaggagcgtcgggaggaaaaactggaacgggcggagctgctcatcaacctgccccgagattggaagctgacaaaggtggactgccgggaggaactgtggagctggcccatccggatgatgctggccaccgcccacttcgccatggaggacccggaggtagggctggaatccagaactacacttatggagggtgaggatggcatccccttcgcagagaacacggacctgcggggcgagatcctgctctgtcccggtgtgtttggggaggagtcctttttctgccgcctgccggacggggacgaggtcaacttctatcaggtgatccccctctaccgggaggagctccaatacaagctggagcacggctcggatgccctgctggacctctgcccagacgagagcctggaggtcatcaatccacaccggctgaatgtggtcaccgaccgagagaaaatcagctacgacccagcggagatggacaacgccgcagaccagatcaaaaagatccaggagcttcacctgccagtggacgaattggacgcctgcaatctgatggctttcttcctgggctgggctatgaagcggggccagatgagtaacccattcatctcccggtatcgggagatagtggatgcagtccagtccggaaaggagcctgatcttcgggtgttcatcctggacaacctggatgggaaattgtctactcagttctttgaccggagatgctccggttttgcccagtggtacgcccaggacaaccgttctaacccctatgtctaccgccgggactgtcggaatatcgtcttgtccaggctcaaataccgtgtctggaacagtattgcggaaaaagaagcggcctacctgctccttccatataccgaaaagaaccgtcagagtgtggagcacctgctggatgagcggtttcagcagtatctggaagcggaatttgcagatgaccccgaggagcgggtggcgcgggcagcggaaggaaaaccagctgtcattcctgactgggacggtcccctgttctgctacgcttccgaacgcgtcgcccaggatgggtgtaaggtgcagatcatggaccggctgttccccgagcgtgaggatatgggttgggagagcggttgggccttctactctggggacgagggcgatgtgtacggtgaaggggatgaatactacgagtcgcactgcggcttctatgatattcgggacatctgccgcatcgatccagacattatcccgctcctgaatctgccctatggtaccatgcagatgcgcggagaagatggagcgtggtatgaggtgatatgcgacgacgaaggcgaggaggaaacctaaatgaacagcgaacaaattacagcatttttgcaagagcattggtacattgcctcggtgctcatcggggccgtgattttaattggagcgatctgcaactggaactggctctgcgaccccaccggtacacgggatgcccatcgacacagcagaggataccggcgggtggttttctttctgctgggtgtcctcttgattgtggtgagcatctggggatttgtactgaaattaaaataggaggagaaagactataatgactgagaaatatcccacctggctcatcggccatgtgaaagaatgggcggagaagcgtctgcccaccgtgacactctgttccaccaccggcagtgaactgctggaggtctggtattacggagatctgctcacggtgaagggagagccccaatcctatattgtagacagcgatgaggcccccggactggtgacagcccgcgacccagagagcggcgaggaattcgtcatctttgacggtgggcggcatggctacgacaatctgttctgcgatgaacacgatccagcccagttggcgcaccgtcccctcacgcgatacgagatcccagcctccaagctggtgctggagctgggttacagcattgactatgaggacgaaaaagcaacatttgaaccggatgaggcagataccgtggaactgatcaacggtgagcgtatgccctgggagcaggtcaagcgggacggcattgactatatcgccctttactatgtgaacgcggaagagaaacgagtccagattttggacgtagagctggcataggtacagccattccatcctttgatgattcgaggaggtgccccatgacccaagaagaacagatccgcctctaccggctgatggaaaagctcaactggtttttccaccaggagatgcactatctggatggagatattgcggagcagaccgcacaggaatgttacccggagatccgggagtttacatataatattttgtggaatgatctgcccaaagagatgcaggagcagctcatggacgaggagaagctgtaatgtccataaccgcttataaaatagacgccgtcggccatgaccgaaccggcgaagactatggctatgtgaatatcatgtaccgctatggcaacaagcaatcctgcccccgaccggatcagtgcgaaaagatggaagtcatgtgggcggacgagagcgtctacggacctcctgcccctggcagtaaggtgggcgactttataaagacatggctgatgggctcctgggactgtggggtatttacccaccgggagatcgcccagcggctgatggataccttcaccggactgaaattcaaggaactggcgtggtttgagaaccccagggagaaaacgctgaaaaacggcaagccccgtgcgcgccgggccaagtggctgccggaccgggaggtggatctggtgtatctctactccgactactatattgacgcaagagatccgactcctgccgaaactgactttttcaccgtcacaaggatggatgcctggggtgtgagcacctggtttatgtgtaccccacaggccaccgagaagctgctcgccatggattatgacaatctggccgtccaggaaaccaccatagtgggataggagcaatacagcatgatcgggacagatgaaaatcgggctgtgctccatgtagaggtcatcttctggagcggcaagagaaagacttcccccagcctggtcagtggaaagtatagtccccattttgttgtcacaggaaccactgaatatctgggtgtgtgctttctggatggaacggagcgttgtgcatttgatgaaccggctttggggaatgcccagcccctctacccggacactgtggactacggcccgctggaaaacaatgcggaatttttgatctatgagggagccaatgccgttggcaagggccgggtgctgggccggaccgttccctatcaagtgaaacaacaacgaaagtaggtgccttatgtaccaaattgcatatattggccgctgggagactctcccggaaacggctgccgccatctgtgaccatgacattcccaagctggaggcgctgctccaaggtggtctggatttagatgttcccatccagctcagcgaatacatcaagctgatgccattggagatcgcggtttttcggaatgatgtgcccatgatccacttcctgctggagcatggagctgatcccggtctggcagaggaacagcccctgctgctcaccgccgcccgctgttgtgggccggaggtggtggcgctctttgctggacaggccgcaaaactcagctcgaagcagaaagagcgggccttccaggaagtgcgctggggcaagcgcccggagaatatccaggtgctggagcaggccgggatcacagtggacaagtttggcggcgaggcattccgggccgctgtgtccgagggcaataccaaacttgcccggctgcttctggaaaaaggggcagacatcaattaccacaagccggacatggtgtttccgaacgcctccaccactgtcaccgaagcggctcggcataagaatctccccatggtgcgctggcttgtggaacagggggccgacatcaccattgctgacaaatacggcgaccggccttacaccgtggcggtgcagaacaaaaatcaggagctggctgactacctgaaggcgctggagccggaggaatggcacaacgagcaggaaaagctccggcagctcatgccctataagctgcccgccaagctggtggaatatctgaagaccggccccctgcggctggagttctcggagcaaaaatgggtgaagtgggcggagctctactcctttatggatgtgcaggagatgacctggaaacggaagaagctgctctccctgatggctgctatggacaattacagcgactacctgctgctgtggagccccagagacaaaaagctgtggtatctggacatcgagcatgaggaattccaccctctggccaaatgggatgacttcatcacagaccccggcaggtatctgaacgggatgatcgagggcgagtttgaggaataaggagcaaggccatgacatccatagactttctgaacaaagtacataaaagcctggactcccaggaatacaacctctcttattccccggccaagtccaaaaacttcatgctgtacggcaacggcaattttatcggcggcctgttcgatgaggaactgtgcttcgtctatgccgacagtgtgagcgaactgctgggacacccggaacccgtctaccgcggctactccagcaccgcccagcacaggatgctggcgattccggaggaacactgggagaaggcgctgaaacttctttatgccgagaaatttgattggagtcgtttggtgtacgacatcacatacaccagcattggtgcggctgtggtggaggacttctacgacgagaatgtggtgtttctgcgcttctgttttgaaaaggagctgttgaaaaagaaccctctggaccggcagggccgtattctgcggatggtctatctcgatcaggacctgacaaaagcgggtaaatatctattccccagactgatgcagaagttccttgtttttacagaccgcaacggaaaaaccagtctggagaccatgctgaaacggtggtacacccagcttgaaaaggaataccgcagttagacagcgggataaggaggaaagcgacatgacagaagaaaacagaacctacatcacccatctcaaggccgctgatatcccgtggcaccggctcaccaccgcctatggccgggggacggacttcccggagcattttgcggtgctggaacagatgcgtgatctggcgtccgtcaaaaagtccctctacgagctcaccgccaacatggagcaccagagtaccctgtggcacgccacccccttcggcatggtgtttctgagccggatttgggagaaggccctcgcagagagcaagcaaaaccccacggcccatttcctggctggggaactgctggaattcttcgcctgcatcctccagtgcttccacgatggagacgagatggaacacgcctctcccctcccctgcttctccgatttgctgaaggaagaatacctgtggtcggaggaatacgacgaggaagaagatgagatgcgctacgaggaggacgaggtctttccagatgacctgttttacagcttctattactactcctggcaggcggcgctggcctgccgggatatattggagcaggccccggcggagtttgcccagcctgccgccgcagtgctgaaactgctgtaaaggagaatgatctatgtttgaagaattctatgagatgtacgagcctgaggagcaggaagtggtcgctctgatcaatcgctgcattggaggcggatataactggaaaggaaacttttgggaaatgaccgttgtgacgctgggcgtggtgttttgtgacaccgccaaggtcagcaccaaagaggagcggctggagtggccggtcaccgatgaggagcgtaacagcgaaaagggctgggaacgctttcaaaacgagcagatctgccgcctgaagatccgccggatgaaagaggaatgggcaaaagatctggtggcatggccctggtgtatctcccaggtggtcaaggcccatgaggactgcccggagcttcaggcggttctggacgagtaccacaagccggtggtgatccaggaccaggtgctgggtgagctgaagctggacaaggactacggttcctttgagggtgagatccagtggcgcggaaaggctgtgcttctttccctggaggtcaatgctgagagcaagccctcctggacccgcgcccgcagcgccgccaagaagctgctggccgactgtgaaacctgggacaaggccatgcgggagcttgcggccaagaacctgaccgggctggctaatgaatggctttcacaggatgatgaaaatgcccgcaacccggaaaccgatcccatcacagaggaagaacttgtccggcggatcagcatgaccagcctgtccgtcacctccggcggcagcttcaccgcctggtttgactgcgatgagatgttcaccgaccatgcggtgaccgtctatggctctctgaaaaagggcgtcaaggatgcctgcattgaggggtaaaacagtaggagaaaaaagaaaatgcagaaggtttatgtgctatggcacagccatgaattaaaagatgacctcggttcccacgatgaaataaaaatgattggcatattctccacggaacatcgggccaaagctgcgattgaacagctaaaggatcaggaaggattccgtgactatcctctttcctgctttgaaatatgtgaacaagggctggatcgaatcggttggaaagacggtttttatgtagccagatggaccgagtgataagaggatatgactatgaaaataaacagtaaacgcattgattttgcatatacgcccggcgaggagatctttgcctttcccgaagacacgggactgccctttctcttcgatgtagaggaagaactgaccggcgatcctgccgccatggatgcggtgggagaaatgctggatgaggcggagaaattggcggaaaaggccaaatccgccatcaaagcggcgctggcggacgaggacagccgctaccatagcgttgtgacattttttatggagttccaccgggacgatgtaggcccggatattgcgggggaactttttccgggaaccgacccggccaagctgtcctttgccgagatggcggactttttgaagctcaagcggttcggcagtctggtggatgacgagatgaaccagcaagttttcattctggatctgtccttcaacccggagatcaccgacgagctgatggtaatctactttgacttgaacaaggagattttttgtatcacccatgagagctgaggaaagagagttacctatggaaaaaacgactgctgttaatacctgtttaggtgttttgaagggacgggactgcatctatctggatcaggtgaagcaggatggcctgaacaatctgacctttacaggggacatcaatggccatctgatctcccagcacagggacgaaaaagactggtttccctacacactcaccttccggcgggtgctggcctattttgcctgtgaactggacacctatgaaaatctggctgagacggagcatctgaaccgcagctcctttgatttgatcgaggacagcacctggctgaagtctttgccagtgcgggaggactttgacaaaggcatctatcggcactaccggctgtttacatacgatgatgtttacaacatcattgcggtttcctatgcgtttgtggcagagttgtaaaagcccgaaacatggaacatcattggagggatcaaaccaggaaggtggtatggtgatgaaacagaataagcatcagctggagcatctgcccacgcttctgatccagcagatccgcctgcaatggtataaagactgccagggcggaaacaccgccgcacagcggaaccagtatcccagagcgatgcggctgccgaaagacttcttctcttactattcctttggcctgccaacacactttgtatcgattttacagaggcctgatggatttcagatcgatagggactgtcgtaggctgatggaatggaagccgaatggcacaatgcggcttcacccttttgaactgattcagcaggagtccggaatccaggtgcgttaccgctatgattggcatattggtgctatgccggagcgatatacctacgataagaccggacaaaaactccccctcaatgagctggcactgggtttgattcctggtgattatggtcgggctgtctgcaatgggcggtttcgggactgggatacaggaatctggtattatgtgctggacattttgaatgtgatgccgcttgcagaacccaccgactcattgaccagttttatggacagagaacccagtaagatatataccaagatcgaccggctgtggtgacgaaagacaggaggatacccacatgatttccacaaaagatttatctggccttcccaatgcggagcgcctgaaaaacttctgcaaagggctggcggctctggacatcatcatggtggaggaggaatggagtttcatccgccactatacatacaaccccgcatggcgaaaaggcaaagaggcattctttgccactgatggcagtgaccagagcatgatcgtcatgtttgcgccggaaggctgtgtaatcaacggtgtggattccgaactctacgactgggaggaaaaacttccccgtatcgaagacctgacagatggaatgccctccgctttacaaaagatcatgggcagccgtgaagtcaaaaagatgaaaagcaccttctgcgtctggacggaagatggcaccacatggcactgcaatcccatggacggcgaggacgcatccaaggatctgctctccacgattgatggcaatccgttgagctatgtggagtacgggaagtggttttatccggccgatctgcctttggaagctgtgcgccagcttgctgacggggttccggtgacaaaagaactggtcactgcgttgaacccgaaacgcagcgaatgggaagaaatcaaggcgggcctggataagattaggtatccacatgaactttgattcacagcagacaggagatgaattgaatgatcaaagaacgcatccccatctccggcaatctcaaaagcaaggtcaggcagctgatggagtacgccggatggcaggaagggcgaaaagtggacatctccattgcggagaagtattacgccgatcatggtgtcccgatgatgaagaccacccagcggttttaccgcaagtatttcggcctgtgctgtgagtggtatctggaacagaaaaaactgaactgggcagctgactttcaattcgctttgttcccttacctggtcaacggaatcaaaaaccatttggaggacgcctatttccgggatatgtccggctgtgagctggcggaaattgagcaggcagctggtcagaagtgccagcccatcggccacgtcggctattactacccggcagaggtctggatctctgagtatgggaaactgtatgcgaaatatgagtatcaggatgagatcgagtgctttccagatgtgtttgccctgatcgaacgggacctgcggcagtgtaaatttgattccgctgccatgaaaacggttgaggcactggatggaaagctgtaagaactcttcaaggaggaactgacatgagcatcaaagagaaactggagtcgttgggcagaaacagcattcagctgaaaattgccagaaaagaaacatacaaactgggcgccacccgcttcggcgggaagccggatgtgccgccggacttcgtttggcccacctatgagggcgagagctatgaccatgtggtgaaggatcgtcctctcactttcctggctcagttcaactgtgcggagctggcccagtttgacaaagagcatcttctgcccgatcacggcctgctctccttcttctatgaaacggacacccagtgctggggctatgaccccaaggatcagggctgtgcccgcgtctactggttcgaggacatgtccgcgctgtccgccgctgacttcccggcggatatggaggaagacttcaaatttcctatggtcaaaatcaagatggactcaaaatactcctatctttcctggcaggacttcagcgaggtgttcccggatgaggaggatgacgacgctttcgacgatgcatgggaggaactgaccggcgaggactcagaggacccggatgaccgttcccagctgctgggctggcccgatgtgatccagaacagcatgtttgacgagtgcgacctggtatcccagggctactatctgggcgacggctggctcaatatccccaaggaggttcgtcagcgggcggaagaaacggcccgtgaccgctggatgctgctgttccagctggataccgtggagcagggtgacttcgagttgatgttcggagactgcgggcatatctatttctacatcaccaaagaggatctggcagcccgccgctttgatcggatatggctggtcctccagtgctattaaaagtatgaaacagaactttactacttggcgcaatcaaatattgcagaatcctcagaacatttcaccgttgaaatttggaatgtcacaggatgagatcatggagatattcggcaagcccgatgctgtttccacgatgagaagcggcgggaagcccttaattctcaaataccatgacattgaactgcattttgatggaaaagcccatcatgggctccatttgatctatagcgacgatgagatcgagttgagcatcacagccgagcacggagaaatgctccaaccgatcaccaacacaaagccggtggacaacgagtttttcctcaaggatggagcggtttacttctccggcctatatgaaaacggcttgttgaagggtgttgcgcccaaagacttctgctgctggcgttactggggcaaatcctctacggcctgctttctcggcgggattcgcctgcgtggagcagacccggcatcgtttcgggtgttaaactatgcctacgcgatggataaaacagccgtctacaccaccagcgggagaatctcggatgcagagctggcagccttccaggtgttggacaacggccagaacgattcgggtgcgccccagggatatgcaaaggacagccggcaggtctacttccacaacggggacggaaaggtgaaggtcatcaagggcgcggaagtctcctctttccactcgttgggcaatacctattttgccagggatgagaaacggatctatgcctacggcaaacagcttcccaaagcagagctgacttcctgggaactacttgggcactggtattcccgcgatgctaagcgggtgtactacctcaaccgggagatcaagggggcggatcgggacagttttacggtatgcaccccgctggatgcacctccgctcgctgaccatttggcccgcgataaagaccacttttaccagaacgatgagataatggaagaaacacagtggctggaacagctgcgcaaaatggcccaagaaccgtaaagggaggaaaacgacaatggactatttgaagatattgcgtgaaaaccctgatttggcagaggaatttgattcgctgtttgacttcttcctgctggatgagttatccccgcgggatgacgcggaaggccgatgcaccttttccctgcccggtatggcctttgccagggatggctccggcggagaataccacctgttggaagatggctccattggatattacagcagcgaaggtgaggcaggccgtctggccgagaacatggatgacctcttttccctgatcgtgagctgtatctgctggcacgactgctgtgacgcaaagcactatgtagattccaaaacactggaggaatacgggcagagacagcgcaactgtaacttggaagatatggatatggacagctggcggcgggtgtctgatgctctcggcatccctgccgatgagccgctggctccggttctggagcggttccgcaaagcaacacagcgtcagcctctgtatcagtgtattttccatgaggatgatggcagcctcaccgaatcatacggtttgatgtttgaatgagaaaggagcaattcctatgaaatcatttgaccccaattacaaactgctggacgagatgtatcaggacgattactatcctgcttttctggtggacaaggtaaaggacgagctccagaaggtcatcgatctgctggagagcggcgaaaccgccaccggagtggtgcaggagacactggacgaggcggtctgcggcatcaatgatctccaggaggagtttgacgagaacgacagcgagatcgaaacggtggcacgggaatgcattgcggcagccgtggcctatattctggagtggttcaatatccccattgacactgaggaggccatccgggaaagagactggtgatacccatggcagaaaaagaactggtcatttgcgatgagtgcggcagcctgtttttcaaaggctcctcacagatgatggggctgtgtccggaatgtgcccatattctctatggctacccgaattgtccccatcattttcagaatggccggtgcgtgaactgctgctgggacggctcagaaagtgagtacattaaacacctaaaaaaagattgaaagaggaagctatctgcgaaaggagctggtgacgactatggcgtggggagaatgtccgcgatttgaccatatggctgtcactgtacccagcagaccagaaaaagaggagacttgcttatggctgacttcaagcaacagatcgacgatgcgctggacattctgaaatttgacggagctgtgcaggacactctggccgaacttcgagaaaaatggagcgcacaggtcccggtgctgctggaggaacgctttgatgccgtcggcgtccagtatatgaaactgccccacgaaaagggtgtggacgctctgggtcaggagctgtccgccttcggctgggcactatataacctggatgcagaggacgagtatctgtttatcctgatcccagaggaagaacgcagcgaactggaacacttttgtaaaaagcatgggcaatactgccgcctgatgaaacagcccggacgaaaatggggcgcccatgccaaagagcaggaccccggggctctgatgccctgcgaggaatacatccttgagaccgagcacgactatttcttcaattctctggcaggggactttgcggccggggaatggaaaagcatccattccgaggaatggaaatatggttgtgtggcagatctgcgctgccgtccgccgaaactgacccgctccatgagtctatgccatttcgggtgcatttcctattcgaatcaaaccgggctgtatgccgcttcaagggcctccgcaagtggagtgattggaaaggcattgctatgcaaaaaccccaatactctaaacttttttgagccttcccccatcggatatgagggcgcaccgaaatcttttttctgggccgactattccctctgggtgggcgatcccaccaacgctacacggattgaactgaccggccggggcacctgccaggatgtaaaaaactggccgctacacaaggatggctggagcggcacctaccactgcggcatcacggcggacgggcttggccggatctatttttccaatgagtggtacaaggggcacatttaccgctgggaaaatggcaaggtcacggagcaccccttccctttgtacggatacgaccacctctccgaagcagttcccgttcccggcacaggccgcatctacatgatccacgccgtcagcggcaagtggcgggtgaaggaatgcctgctggagctggacatggacaccgggcggtgccgaatcgccgacctgcccggaatgggagaggggctgaaacttcgctggtttaccgaagattggctgctggtgcagggaaacggcgagatcctctctgatgattttgcccagcttatcaacatgagcacaagggaggtgctgcgcatccgtccggggatgttcggaggcgaaaagatgcagcacattggcgtgctcaccgatggaacggtggtcatcgtcacccaacggaacggcgtggggccggtgtttcgttaccccaccgacttctggggtttcctgcggacggcgaacaagccccgaaggctggagccctggcgggagtatccagaaacttatccgaatctgcccttcttcctcccagggaaggaatccaaattgccacagaagtgtgcagacaaccggctggacatgggaaaaatgctgcttcgtccccagtttgaccagctctcccctgagaaaaaacaagctctcatggagcagctttcagagcagtaccacctggattttgtgcggatagagcactttgaccgctggagccagagctgcaccactggaatcttcaggaaagatggccgggagtttgtctttgttcccggtgataccgttacccttggctgggacaggtttgccgtgggactgaatcaggagagccgggcggaattagagtacctgtttcaagaatgggaactggagcaggacccggcagaattcattggagaaagcatggctcccgtccggcaggcggccatcggccccatgctggtgggccgggagttggaggaactttgctgggagccggttcagatggaaaatcccagattgactgcccaccctgactggctgaggcagttccgtgattttgcctggagtgaccttgacagccttaccttacatcaatcagcccgtatagatcgaacagaaacgggctttcagatctggatctataaccgtacagactaccatgcgcttcttgaacagttggaaaagcaaggtctttcactgcctacggtggatgagtgggcctacctgtgcggcggcgggtgccgcaccctgttcccctggggggatgggctggactactccatgcgcctgcgctggtttgaggacatggatgaggagcaggacagaccctatgacatggagcagcccaacttcttcggtctgtccatcgcctacgacccctacatgcgggaagtggtgcaggctgacaaactcaccacctgcggcggagacggcgggcgcagtatctgcggcggactggggccgttcctggggtttctgccctgttccccgcactgcaagccggaagtgcaggaggacaatgacctgaacggcgactatgacttttaccggcccatcatccgggtggacccgggaccgaaaggagataccgatatgcctaccacagaatggctgaacaaatacgaatctatcaaggacaagctggcctgcaaaacggacctggaagcccattttacagaaaaagtgattgggagcatgggggtggatgtgctggacatcggcaccgtccatttccccaccgggcagatattcgcctgcgatccgctggtggagctggaggatacaccgccctttatacagaccattcctgccgggacttatcccgtgaagatctgcgtggtgcccagtgagaaatacggcgaccgctacgcctgcgtcaaggtggaggtcagccaggaaaagcctgtccgctatgagctgggtatgacaggcagcgaggagctggacgcggcgattggagatgatgactacttcggctttggcgtagacgccgggatgggctgtgtggcggacatccagacccaggcggcctttaaggcatactggaccaagcggctggaggaagccccggatatcgacccctacaacgacctgttctgtgacttgctggaggaaaacgccaaagcccaccccaaatatcagggagactgcggcgactggctcaactggacagtgccggacaccgactgcaacctgcccatcttcgcctctggctggggcgacggttactatcccgtctacttcggctacgacgccaagggcgaagtctgcgccgtgtatgtgcggttcatcgatattgaagccagctacaaagaacaggaataaggaggtaagcagtggaattaccaaaacgggccagaacagcagactgggaaaacggtattctgaccttagacggagagaagcagtttgaagtcccggagctgaccccggagatcatggagcggctggctggttacaccctggtgggcttccatgtgaaagactatccagtgacggatgaactgcttgtgccctttgccggacataaaaatatggtcaatatcggtgtggagaagggcgcgctcacagacgcctgctttccggtctttgccgccatgcccaagctgcgctatctgcttctggacggcaacgccggaatcaacggcagcggcctggccgccctgcaaggctgcaagctggaccttctgaccctcaaccgcaccaggctggacgatgccgggctgcttcaggcggcctccatccccaagctctcccacatccagatggaccataccgcaattacctacgagggcctgctggccatcgcaggcaacaattacatcaagccggtggcccatgtgcagttcacccaggagcagatggaacacttctcccagctccagcgggaaaaggccaaaaagcccgtccagctggatgagcaggcggcggcggaatgccgcagggtgctgtccgctttctttgccgagatgacagaatgggagcagtacatggagcaggccgggtttgaagacgccgaggctgtgccccgcctgctggcgatctgggagaagtatgtgagtgaaaagccccgtccgggctaccggcccctgggcctctcgtacagcgctcagggcacttacaagggggagcagttcctggacgcggagcagatcacccggaacaagctttacatctacaccagggaggaaaatataggctttgaccgccgctttctcatgaagcgtgtgggcgagggctggaggatcgacgggctgcaggagcggctgaacggctggcagcgaacagaattgtgaagttcatgagaatcagattggaggtacaggaagatgggttcatggggtgtaaaagcattggaaagtgataatggcttagacctaattttccttttgaaatcagattatttacccaaacataagaaactgactttaggtggattgataggctttctgaaagaggaaggttttcttggagaaacagtgaacgaaattgactttctctatgataataccgccatcgcgctcgcagaactttattcagaatggcaggaaacaggaaagctaaactacgatgatgaggattctaatgtttggtcagcaataacgaatttctcagcttcagctactgctcgaaaagaccttcttaggcgattgaggagtattaaaaatcaagttcctgatgaagatggcgaaagagaaatcgtagaactttggaaagaaagtaatcactgggaatcgtgggataagcatttggattctttgataaaactcttacagcaggaataaaattgttgctttgtaggtaagtgcgttgaattgtgaggcatcacatggcatgggaatatgaaacctttggcccagacggtcaatgcaaattgttcggtgtgaacatctttgactacgactggcaaaccaccggcaagcgagtaaaagtcaaagacccgatctatcaccaagaccataccttcgaggtctggcaggtggagattgacgggcagatccaccgcttcgccgctggagagttctccaatggcgtgtggggattctatctggaaaagaacggatgagaggagcgtggcgtcatgaaagccagcaccggagaggtctatacggtctacaaccaatatctgaaacgctacaccgcctgccaggtggcctatattgcgccgccggacacggtgagtgagcagccctgggcggtggtcctctctctggactgggtaggtgacgcccctctgacggcggaggaacttcctcatctccgcccgctctacaaggacttcatgtactggtcccgtgacctccacctgctgcgggtgccgctggaggtcccgccccagtacgcgctggtgggtacacttccacccttcaccgaccagccctgccgctcctacggcggctggagtgacggctatgatgtgtatctccagatccggtggcaggccatcccggaggagcggcggcgggccttcaagaaggccatggagagcgacgagcaaacggagatcggcggcatcccgctgaaggtcagcagccatcgggtg

SEQ ID NO: 13587 - DNA, 15889 bp, Unknown
  gut microbiota DNA sequence
tcagtacgtgccattcgattcggcgctggaactaaaggcgctgccctgcctctccgaactcatctgcgagcggtggcacccggatctgctggagtttttgcgggaaaccccctttgttgatgaagtgactttgctgaaccacggtcaaaggacacttgatctgcggggcaccagcatcagaaagctgatgctggacatgaccgggctggaggagctgcggctgtgtgagggaacggagctgctcctgttccagaacaaggggccggacgcctgtgccatccatgcccccgaagatggcagcggtttgaccctccaatttatcggggaataccgcccgcacacggaactgccgaacctacgggggctgcatggcatcgagctgaaggactttgatctgaccggactggccgctgttcatccccacctgaaggaactgaggctctggggtgcgccgggaaacctggggaacttctccgccgtgggagggttccgggaattgacgaaactatccaccttcgacttgttcggtttcggggcggacgacatccccaccccggagcaaatgccggagcttcgctggttctggatgaccagcctgccggagacggcggcaaaagcggcaaagcggctctggaaaggcaagccgggaatggacctgcggatcaccaagccccggaaaccggagtggctggcgcaaaacctggacaaccccttccgaggctgggacggtgcggagcatatccctgcttctgccgcgaaaaaggcagccaatcaataccgcaagacccgctcccaactgatgaagctggccgctgagccggacgaggacgcccaggcccaggcgctggatgcggtggcaacctacacccagacctttaacaagatgggctttatcgaaaccgaggaacgggatgaaatttacatggccctgcgggggattctggatgctctgccagacagcacgcttcaaaaagaagccctgattgagaagtttgaggagcttcgagatttttgaggaggttgaaaaaacaatggatacaagaatcacagaactgttggaagaactgaaacaggcaatcggcaaggctgccactacaggcgacaaatatcagtttatagatccggcctttgatttaactgatgaactggaacagtacgaaacaccttttgatgctgtaagaccgatcttggaactgattgaatcttctcccaatattgattttggcggtcctgggccattgggtagctttatggagaaattttaccatgaaggctatgaggaagaattggtcgcatcgctgaaaagaaaaccaactgagtacacgatttctctcatgttccgcatcattgcagatgaggaaaatcccaatctgagtgaatacaaacatttgttaaagacacttgatagcacctctgaaattgatactttctggttggatgagattgcaaaactgtaaaggatttgaacccatttcggtttcggctgtgaaagcaatttcctgaaaggagtggaggcgcatgagccgaatcattgatgaaccctactttacatacagtgcatacaacgccctgacctccggcattcaggtaaaatgccccaagtgccacggcgcaggtgtggtgacagcggatgatgagaacgcctatttccgctgcctgagttgcggccaccggatgacgcaggatcggacgatctaccgctacgatgtccataaccagtgcaaaaactgcggcagatactaccgggttgatattgaagatacggcaaagcagcactttcccgtcctccatgtggcctgcccctattgtgggacaacgatgtcgggagaagtccataaaacagcggaggcgttttcatatattggcgaaatcagggatggacgagaaccttacttcggcctggaactttggttgttgacctccttccagggtaagccagtctgggcgctcaaccgggagcatcttgcctatctgattggctatctcagtgccgatttgcgggaaaagccgatgggaagagcgaaaaagacccaggctgaccatctccccacctttatgaaaaccgcaaagaaccgggagcggatcgtgaaactactgaagaagttacaggagggatgaggatggagcagaaagtaatttacaacggccaaattcttactctgactcacttttgggcaacgggagagccctgcctgtggatcaccgacccacagcagatcgagatgccccaaatggagtttgtgggaggccacccggacgaatactgcattttcctgaaaaatctgacggaaacagagttgtcacagatcacatctctggacggtgccccactggatataaaagaagaactgcgataacactgaacagaaaaggagaacccctatggcactacaagataagaaaatcatgcctcccccttggctggcccaccgggagatcgagcgatactccattggctggcgcatgggctatggggagaattacatatatcggtttggcgattggctggacacactctctccggaggagcgggcggaataccgcgccctctttcccgaaccagtgacctggaaaggctggtgggacgacgaggacagggttgaagtgctggagcacggcgatttctttgtggaggtgtggcagccggagggccggccaaagtacacccgccagtggcttcagcaggagtttgccgccgggcggaagagggagctgtgcctgttctggggccatcagctatccgaggacggccagctgacaaaaagctgcctcagccagtggtggatggaggacttctatacgacggctgactcctacctctgcatggagcagtatatgatggctgctaaggccgagctgttcagcgacaaagagatccgggaccagattttgaaatgcagcgaccaaaagcagatcaaagccctgggccgcaaggtgcggggctttgaccagaaggtatgggacaagttcaaatacgccatcgtgctgcttggcaactggtacaaattcagccagaaccgcgaactgcgggagtttctcctttccaccggggacagtgtgctggtggaggccagcccctacgatgccatctggggcatccggctcccagccagcgccccggaggcccaggacccgatgaagtggcggggacggaacctacttggctttgcgctgatggaggtgcgggacgagctgcgccgggtgacacagaatgaaacgctttgcgattggagtacagtatggcagaaatgaaactttatgaactggtcaaccactatcacatcggcacggaactgacctgcgccgaggcgatgttcccggcctgcaatgaatattaccacctgaatttgtctgaggagacccggaagatgttctccgtcatgggccttgggatgcagaccgagcagtcctgctgcggcgcctttaccgtggcggtggggatcatcggtctgatgaccaccaaagagggccagaccgatgtagacaacatggagggctaccagatgattgctgaattgacggatttcatgctgggcttctatggaacgctccactgtgtcgagctgcaaaagctggagatcgtggggtatgaaaacccatgccacgccattgtagaggcgctggccaaaaagctggaggagctgctggcgggccgcaggatcttccgcccggcaaatatggaacaaatcggttcatgatatgccggaaagaggtaagtccatgtctaaactatcacaggaagaagtacaatcacttcgcagcaggatctgccacagagaccaggaactgatttccactctgacaccggagcaattccttgccctgctgtcttacgactatgataccggcttcgcggccggcaaagcctccgcgcagaaggagattctctgtatgctggcggtggacgggatgcccccggagaaaattgccctactgctgcggatggaggcggagacggtgcgggagattctggccgccaagcaggcccacattgagaaatgcagaaagagactggaacagggggcgaagccatgaaagacctctcccaatacggaaaccggcgggagggcgaatgggagatccttccatggatacccgatccgcgcccgccattcaaaatctgggtggagccggagcagatcgcgccattttttctcattccccaccacccctatgcgatctcccttctgctgaagatcagcgacggattccggacagaggaattccgacggctgggactgaccggcagcagcggagactgggaacggctggtccagggcgtgatccgggagtttgaggaaaacaacagcggtgaggatctgtttcactttgactccgacgaagatgtgttctgcgtgtactcccaatatatcgatgatttgatgctgctatccaagatgatccgggcggcctgtgacaatgaaaaaacgatggggatgtatctgaacatgagtgaggctacgaaagcatgaaagagttgaccactcataaagggataacagtaaaatgcagtaaaacggccattgaatttttccaaaatgctcaatcagtggatttcttttctgtgttggagattccagaggaattccaaggtatagcggttgagttttatgatttgattctggaaaacgatcatcccacagctttgctgggctgtcagggcgattatgacattgcggtacagatgaatgagttgaccggcactatgtcgggttggcattggttcaaatgagggaaatggaatgatcgagtacatcaaactcttttgggaggacgcaccggagggagaaccgccggtcatcttctatgaagtggataccgaaaatgagcggctggcccatcgctccattgacatctttgcagacggccacacccgcaacatccccgacctttacgccggtgccatcgagatcacgccgatccccaccgtggaagaattcaacacccatgtctggggcgacgagttccatgcctgcataatagagaaagcggaatttgaggccatctgggaaagccgcacctatgatggagcgttaaaagaatcaggagggttctgatgaaacagacagatatttataccgaagctctgacctgtctgcgctccatccttctggcagaccatccagaatttcaaaactggatcgactggctggagagggatattcaggactggacccagcgccgtgaggtcgcccaccatcttcgggcatacggaggcatgggatctttcaacgacctgcccggtatgtgtggaaatcacgactacattttcggctttctcaagtcagtgtgctatgccttcggccacctttatggtaaacgggaaggcatttctccagaggcattgatggaggagtgcctgcacgatgtagagcaggcagcctatcacccacataaggcactgaaccaagccattgcccagcacttgatacagggcgatttacaggaaaatcgggataagctgtaggaggataaatgatggttcaagcgtggcgcaaggtggattttggcactggaacagtcacttttctggatgacacacaaaaagaagatatgctgcaagtggaatatccaaacggatttttactggatatgggctggtatcaggacagatacatcatttctatcattcaggattttgattgggcgcatccggtcaagcggtatgagacagcagatagggatcagcttcctgctctattgacaaaggcggtttgttttgtggaaaaggaatcacagactgccgagcccgacagaaaaggaatcagccttcctccactctatcttggagtggattgaaacggcattgacctatacctacgtaatcgtggtagaaggaaacctataaataaaaacagtgactgcatttcaccactttcagattgaggaggaagcaacatggatgtaatcaaactgcctaaaaaatttcgcatggtctgctatgagatcatggatggcaaaaaaggagccttggacactctggaatcctttgctgataaatacccccatcaggtagcagcagtcaaggccgaggtcgcctatttcaacctggactatgaaaaggcgctggctttggatctgaccatccttccctggctggaggagtggtattacagcaatgtgagcgatgaacacatgatcgccatgacagtggccgccatccagctccaccaggagcaggagctgattgaggcgctggcgaaggaacaggcccgcatccgggctgagaacggccgcccccagcgggatcggttctgtgacatcctgatggactacctcaagcggggcgtgatgccctttgcggacaacgacaagaactacccctaccatgaatcggaggaaccgcagacaaaggagcagctctgggcaaagctggtggaacagaataagaaactctcgccggacgatcccgatgccaagcggaagctctataaccactgctgtatgttcggaaccgccagggatgccgtagatctctttgaggagattcaaggtgtgcccatggctgactcctcctatcgggatgcaatcgcccgttatctctatttgggtgaacgggagaaggcgctccagacagcggaacggttggcaacatcgcggctgtgggcggttgccgggccgacgcaggtgcgtcccatgtccttctttgaggacccgaacctgcgggagtttttgctggagccggaatccctccggcgcatccgggaagctgcctttattgatgacgggagcttgatccggaagtaaattgcttgggaatggaggatctgccatgagcaaggcgctggaactgtataaagcatttattgacggccttgtggagcggaaagacagcatgacggccctttgtgtcaagggtggtggctttcccaagacggaggacaacaaggcgaagaaagatcttcttgcagcactgaccccggagcagaaaggtgtactggccgagatgcttcaggacgaacatattgcgggtatccataccactcttgcttatatcaataaaatgatggacttggatggtttggagcttcatcaggacggtgaatcctatcccaacgactattttgagagcctgcactatgacttcatcagccgttgcgacggggatgagtggccggaataaaaggaggcgtgacggatgtatatcgacaaatactggggcaactttatcggaggctcggatgacagcctgaaccttgtggcatttttggaagacctgaagaaagaagaaatccccctcagcgagatttttgccaagatcggcttggacaagcagaactgggacttccaccagaccgtggagtatctggagtttatacactccgatggcgtggagatggactttcacttcgccattgatgtggtcaccgacctggccgccatcctgctggagtgcagcgtcagcggcagtgtgagcctccaggatctggacgagttcaacacccccgcccgccgtatccgcatcaccgccacgccagaggagcatgacgccatgaacaaggctttggcggatttcgcgcagaacccactggaatatgacctcagtgagatgatggacgagggggagatccaggagatggctcgggatgtggaatccctgcggaaggaactgtacgacgccgctggccgcaaccgggactaccatgtgaaagcggaggatgtgaaacatttgcttcccgactgggagggtgccgatggctgcatcgccaccaaccgcatcacggtggagggctgcaaggttggctactgctatcgggagaagccggacggcggctgggacagcggctggcgcttcaccgctggtgacgagagcgaggcgtacatggacgaccccaacaatgccggaatctacaagctgaacacgatctgcaacgacgatcccgacatcattccgctgctacgcacacccgctccctgcgcctttgagcgggatgaaaatggcgtgttccagcagatcaaagactggaaaccggaacaggacgaggaggacccggatatggatattttgaagcagtgccagaagtggcatgaaaacgacgaacaccataaaattattgacactctggatgctattccttccgaggagcataccccggaaatcgatatggagctggcccgggcctacaacaacctggcggaccccagtgagccggagggaaggaagctgcttcaccgggcactggaattgatgaagtcccacgaggaggaactgggagaaacttattcttggaatttccgcatggggtatgcctattattatctggaccaggagggccgcgctctgcggtattttgaaaaagctctggaactgcatcccggtgatgatcctaagctcaacacccgacaggacattgaggaactgatcgactcgtgcaggaagggcatttccctgccgcagttctcggagtgcttccaaaagcggacagagaactggtgggaaacctttgccgagatggaagcagaattgcgccagatgatggacaatgacaaagaccacacccgcggcgcagaactcgtggcccaaatggaagaaaccctgaatctggtctttgatgagatctccttcgagatgggcttcaacggcgagaagtacgagctgatcctcaccccggagggcgacaaggtcaagctgtttgagctggtctacttccagaagcacgcccccaaggaggtgctggagcactggaaaatcctggttggccgtcagcccctccagaacatcggtctgcgtaccgaggatggccgggagatttccggggaggatgtgcagatctggctggaggagcagggtgaaaacagcttcgccatttttgcctactgtgaaaagctgctgcctatgcttcgggaggcggaaggccgggcctggtggatgctcactaccctcaccgaccaagtgctgggcgagatcccccacatgagatacataggcagctttgatgtgctggaggagcccaaggcggagccgtccttcctcctgtcccagttgcccgatatgctgaaagaaaagggagcgaccctctccactgatccaaatacctatctggagagctatcttggctacgaaatgaaagccaatgaagacccggaagccgactggcggctggatgtgatggccggttccaccaactgtgtgccgctcatcaacggctatttgaatgtcgacaatgattttatggacaatctccacgctgacggcgcggtggcaggcttcttctgctatcccctggataccctgcgggaggaggaaggaacggagaagatcttcgacttccgggacaaactggaggaagtgttcaccaccggggacggcccggaagtgctcaccctcaccggcggagccaccggcctctactgcggatatgtagactttatcgcctgggacatccgggcggctctggataaggcgaaaaccttcttcgaggacagtgacatcccctgggccagcttccacaccttccgccgggaggcagccacggtgaacctgaaaacgccgtccgaggaggagcaagcccctgagctggacgagacgctgacgggcatggactatatcccttacaccccgcagaacgaagaagcatttttccagcagctggagcagtggaacgacgaggacgagtacacccgctgcatccaggcattgaatgccatcccggaggactggcggaactaccgcacttcctacgctctggcacgggcgttggagaactatgccatcattggggaccacgacgagggtactcctaactataagggagataaggccctgcgccgagccatcgaagtgctggagtctgtccgggaagagggccaggacaaggcggaatggaacatgcgcattgcctatggctatcagtatctctatggtcaggaggaaaaggccatcccctacgcccagcgttgggcggagctggacccggaggatgaggacgccccagcggtgatccaagcgtgtcaggaggagatcgcaaagcggaccgaggcagagaccgaggacgagagtgaccacacaggcgtcttcaccggctttgtgctgctgtccaagggagaatgggacaaagagcagttcatccgggacatgaaggaaaaatgggacatcaccgtggatgaatacgacgccagtgaggagaaggatgacgacgcactggtattcgaggtaggtgatatactcgccgctgtcagtctggcggcctatcccattcccaacggcgaagcggaactgaacgcagaaaacaattatatgtgggaggatgcggtccaagttgccaaggaacaccgcgcccatatcatggtggctattctgggcaaagaggaaaagattctggagaagggtaagctcttcaccaagctggtggccgcctgctgccgccagaaatacgccactggcatctacaccagcggtgtggtatttgagcctcgtttctatgagggctttgccgatatgctcaaagaggacgaactgcccatcttcaactgggtctggttcggcctgtaccggagcgagggcggcttgaacggctacacctacggtatggatgtgttcggcaaggaggaaatggaggtgctgaacaccgacgccgagccggaggaactgcgggactttttggcaagccttgcctcctatgtgctggcgtgtgatgtgatgctgaaggatggcgagactatcggcttttctgcagacgataagcacaccatcacccgcagccccggtgtcagtctgccggaggagcagatgaccctgaagatctcctgggcgtcatcggacggtgaccctgacgatgacccggacgatgaagcacccgaggatgaagaaaccggtgttcccgaggtctacaccgaggaggagatggaggccgtcgaggggcacattgatcagtatttcggcaatgttgagaatgtgttccacgagctggtttcccccgacatccatgtggacatctgcgttgttccgccttcggaggaacgggactactacactctggtcaccatgggtatgggcgcccaccggatgaatgtgccggaggaactggcggaatataagctggagcgggcggagcttaccatcgctctgcctgcggactggaagctggatcaggagtccatgaaagacgaaaagtggtactggcccatccgcctgctgaaatccctggcccgtctgcccatcaactgtgacagctggttggggcatggtcatacagtggagaaccgggaaccctttgcagaaaacactaaactgtgcactgctatcctgatcgatccccagggtacggaggacggcagcgagttctgcaccctgccgggcggcggggaggtcaacttctatcaggtcattcctctttatgtggatgaattggactataaactggaacatgatgcagacgctctgctgaacaagatgagggggatcagttttgtcgtaaaccccactcgccagaatgctatcacccgtggcaccctttccaatgatgattttgacggtgagatggacgacgcttcctatcaccttgagagcattgaggagaaggaactgcctattgaccccatcaatgcttataaccacatggccatctacctgcgctggtgtatggagcacgacctgatgggcgaagaattccttgccgagtacagtgatgtggtagaaaaggtcaaggctgatccggctggcgtagatctgcgggagtttatccgggatgaactggacgggcagttgataggtccgctgttcaataagattggccgagcatttgcttcctactattatggtgcatattccaatggtcatgaaagtccattcttccccagagatattgatgattatgccttggaatacttcggctcagaaaaatatcactccgatgagttccaggatgaagcctacctgttcattccctttgacgaggactactatcaggctatggcagaggtgatcgaagaacgcttcaccaactggcagggacaggacttcgatgaggacacgctggagccttcccaggcagctcaggccatcatggagtatctggactgcgagtgtacctatttcccatccatggcagatgatgaccccattatgtcggcatacagctatgccaaacgggaaagtgtcaaagaaggctttgtgccggtgctcatcaaggcggatgatgaaacgctgttggagtgcctggtaatgaacgccgacccggagaatgatgcggactgctatgaatttgaccccaaagctgtggaggagtaccggaagaagatgctctccacctccgtcaaagacggaaaggcggttttggaggaattgaccggccagcgcagggaagaagccgaggacgacgatttggactgggaggaggaagtcctgggcgagatggagggcggctatgacaatgaccgcttctcctgctattgggattcggacagccacatgacctaccccctcattctggccaaaattccggtaaagaatccctgggagatcttcgcctacctgcccttcggcaactggaacgagtgtcctgacaccccggccctgatggcagtggcgaaacactggttcgagcagtatggcgccatccctgccgctatgagccacgatgagctggagttcctgctcccggctcccgttcttgaggagagggccatggaagctgccacagaacagtacggcttctgtccggacattgtggatcaggagcaggatgaccccactgtgggcaatctggcggatgtcctgcggcagtccaccgtctggtacttctggtgggattgatgggctgtatcggaatgacggaacagcaacgataggaggaacgttatgaaaaacttgcagatactgatgatgtgctgtttcctggtactgctgactgcctgcgggcgggagggcggcacggcccaaacccctgttgcttcagaggagatcacagagagcatcacgcaaatgccggatgaacaggagagtgaagccatgccggaaaatatggaattggggctgacagtgaacggtgtttattatccgatcccgatttctttgaagcagttgaccgacgatggttggaaaatcagcgggcagacaccctatttcctggagccgttcgtgggtgaagagtattacgaaacgcgggcagattggtccctatccaaagatgggcaggagatcctgccgggtgggtccatcatccggctcctggaaaaagacggggtgttgttagaggtgaccattacaaaccaggtgtccacagggtcggatacgccatctcaaaaaatcgaagatggtgtggtagattccatggtggttttttatgatgagaaacacaccagcatcaaattggataatcaggaactgaaccatgtaacccaggattatttgattgagaggtatccttccagtgatggttggactcatcttcccaacacatacagcgatcatccagagtttggaatttccacagaatataccatcgaaaatgatctggatcagtacagcagaagcatcacgatcgattttgatctggagaacaaaccgttcaaagtaagtgtatgtaatgagactcctctggaccgtgcagaaccctccccacagacttgataagcggacttgcgtttcccagaaacagtccgccgtctggtacttctggtgggattgatgggagattttgaccatgaacgaatacctgaagcaatatattgaactccaaaagcagtttcgagagacagaaggaaatccggacagtgtccgcgccctctatgccttcaaggaggacctggaacacgccgaggaccggcaggccaaggaagtgctggtggatgtgtatgatctgctggactttaagaaggacgcctacgaactgctctgccaaattggaaatcgttccgataaaaaggccctcaagcggctgggtacgctgaaggactatgcggagaactggggcaaccactatgccctccccaggccaaaaacgccggaggaaaaacagaaagagaaggagcggcaggcccagctgggcctgcccaccttccggtatcaccccacccctctggaaaccggcgcttttgaggagtccccagatggcgttgtctgcgactgctgcggcaagacgactcatattttctatacagcccccttttacgctgtgaaggatattgagcatctgtgcccggagtgtatctccagcggcgaggcggcccggaaatatgacggcagcttccaggacgatttctctgtggatgatggtgtggacgattctgaaaagctggacgagctcatccaccgcactcccggctactccggctggcagcaggaatactggcgcgcccactgcggcgattactgcgcctatctgggccctgtgggttccagagaactgcgggcgctgggtgtgatggaagatgtgctggaagatcctatgtgggacgaggagcagaaggaaatgattcgggaatctgtcaatggcgggcacctgcaatgctatctgttccagtgtctccactgcggaaaacacctgctttggatggattttgattgagaagtttttaaaaggtgggatacaaacgatgacaaccaaaacactgaccattcaattcaatgatgaacaactgcccatcctaccgttagaaccgaaagcccacctctcctttgccacccatgatgatggaaatgaattggaattaacgggaaaccgggcggggctgcttctattggcgaaagccgctttgggtatggcagaaaccgtgcgtgaggacggattccacatccatctggacgacttgtatagcatcaacgccgagggaaaaagcatcctgatccgaaaggaggaaaggtcgaagccatgattgaaaaaaccttcctcaaccccgccacaaataagaagtggcggatcgaaattgacggacatatcatccgaacctgcttgaatggcgggaaggtcaaggagatcctgtgtgactccgccttccaggtcaagagcaaggcggccagcgccatgatgggccagatgcggaaaggatttgtctatcagaatccggatgctgttgttgggcaggcgcggtgccaccggtttgttggaaaggacagcaacggttttatgcccctggctgccgccctcacacgggacgacttcttcctgacgagggtggccggagattttgaggacgagatcctctattacttcaatggcagcggagagatccttgaaacggtctctctgggtgccaggcggatgacctatgagcaggtcctctgccccaatgatactctgctgctgaacaacagctatcttctccagcagttctcactccgcacccatgaaatcacaccctttgccaacaagaaaaacagcatgaaggccatgctggatgtcagcggcgacctggccctgtggtacacgggcgaggagatcgtcgtctttgactttgtcagcaacacggaggtgtggcgggaaacggtaaaatgcaagaagtcaaaagacccgaattttgcctattactgcttcgggatgctctctccccggcagagcaaagcggcctaccgcgtcaccgagggtgagtatgtgctggtcgatttgaagtccgcccaaaaaacagtgatctccaatgagggctggcatccctttttctccccggatgaccagtttttctcggtgggcggcaagttctatctgacccagaccggagaggagatagccaatcctttcccattttctgtccggcaggggctgagtttttcagatacctgcgcggtgaagacaagggacagcctgatggctgttcagcaggatcgtggcaactctcccatagagctgtgggataccagcagcggccaactgctggctgccattgacgacccctttgtggtgctgcaggtgaattttgcctttacccaaagcgggcttgtcctgcacaccgatta

SEQ ID NO: 13588 - DNA, 35041 bp, Unknown
  gut microbiota DNA sequence
tatttttccacaaaaacatacggataatgatttggaatactttgaattgcccgttccgtaatttccccgatttctgtgagaggcggaatttccgatgcgggcgcacactgtgcgcccctacgcaaaattggctgccgcccagctgtgcaaatggtgatgaaataacaccccggctggctgtaatcgtatccggtcaaacggttcggcttccgtttcgggagcagctccatagaattcttctcacttcccccgcagttcgatgatctgatctctcaaagttgccgccagctcgaactccagcatcttggccgcctctttcatggccttctccaggcgggcgatctcggcggccttctcctgcctggtcatggccttgaccctgccctggcgctggttggaggccacgtcctccgccgtggcggagatctccagcagctcccgcaccgacttgatgaccgttctggggacgatgccgtgggccttgttgaaggcgtcctgcttctcccggcggcgctccgtctcgtcgatggcccggcgcatggagggggtgatggtgtccgcgtacatcaccaccatgccgtcggcgttccgggcggcccggccgatggtctggatgagggaagtctcggaccggaggaagccctccttgtccgcgtccaggatggccaccagggagacctcgggcaggtccaggccctcccggagcagattgatgcccaccagcacgtcgaaggtgcccagccgcaggtcccggatgatctccatccgctcgatggtgtcgatgtcgtggtgcatatagcgcaccttgattcccgcgttctggaggtaggcggtcaggtcctccgccatccgcttggtcagggttgtgaccagcacccgctcgctccgctgggtgcgctggttgatctccccgatcaggtcgtcgatctggccctccaccggcctgacctcgatcctggggtccagcagcccggtgggccggatcacctgctccacgatctggcccgagcgggtgcgctcatactcccccggggtggcggagacatagaccacctggttgagccgcttttcaaattcctcaaatttcagcggccggttgtcaaaggcgcaggggagccggaagccgtaatccaccagggtggtctttcgggcccggtccccgttatacatggcacgcacctggggcagggtgacgtggctctcgtcgatgaagaggacgaagtctttggggaagtagtccagcagggtgtgggggggcgagcccacgggccgcccctcaatgacccgggaatagttctcgatgccggagcagtagccaagctcctgcatcatctccacgtcgtacatggtgcgctgcttcagccgctgggcctccaccagcttgccctctccctcgaagaaggccacccgcccctccagttccttgtagatctcctggatagcggcgtccatcttctccttgggggtgacatagtgggtggccggccagatggggatgttgttcagccggcggatgggggtgccggtgaccacgttgatctcgctgatgcggtcgatctcgtccccgaaaaactccacccgcagggcggtgtccttccaataggcgggccagatctccaccgtgtccccccggacccggaacatgttgcggtcaaaggcaatatcgttgcgttcatagcggatggccaccagctttttcagcagctcgtcccgctccagggtggcccccacccgcagggagaccatcatcttggcgaagtcctccggctcgcccagaccgtagatacaggagacggaggagaccacgatcacgtccctccgctccatcagggaggcggtggcggacagcctcagccggtcgatctcctcgttgatggcggaatccttttcgatgaaggtgtctgtgtgggggatataggcctccggctggtagtagtcgtagtaggagacgaagtactccaccgcgttgtggggaaagaactcccggaactcggcacacagctgggcggccagggtcttgttgtgggccagcacaagggtgggccgctggaccttttcgatgatcttggccatggtgaaggtcttgcccgagccggtgacgcccagcagcgtctgctcgtccagccccatctccagtccgctggccagggcctcgatggcctccggctgatccccgctgggggtgtattctgaaaccacttcaaatctgggcatagccgtccctcctgttcctcccgggccgctcttcgtccgccctattataataaaacaaatgttctaagtcaaggccctgtccacagagggacagggcccaggcatcacttcatcatcccgctgtcccgcatggacaccatatccccgtccacaaagaccaggtgatccagcagctcgatgcccacccccgccagggccgtccgcatagtctgagttgtggagatgtccaccggggaggggaaggccaggttgctgatgtggttgtgggccagatagatctggggcgcccggagggcggctgcctcctccatgatccggcgcagattgatgttggcggcgcagatgctgccctccgccaccttccgcacccccagaggcttgttcttcccatccagcgcaagcaggtagatcatctcgttcctggccccgaagaagtagggctccagcagtgcgtaggcgtcttccgtccggcgcaccggctcccccaggtccgcccggctctggaggtagcgcgcccctgccgccgggatcagcttgagcaggacagcggtgtgctgccccactccgggcacccggcacagctcctcctccgcggcgtccagcaccccggccagcgagccgaacctctccaccagctcgtgggccagcccgttcacatccccctgggggatggcgtagtacagcagcagttccaggacccggtggtccggccagcccgccagtccccgggcggagaattcatctttcacccgctgccggtgccctgtatggatggatctgcgcctctccgccatccctgctccctctctttctctgtcctcttttgccgtgctcaggccctggccccgtactcctccagataggcctccattcaaaacgcgggcggtccctgcggggaccgctttgcgcattcgcgcgccgcgttttccggggggcaccagttccccccggaggcccccctccgctctccgaggggacggggaattttttggctcagcccttggccccgtactcctccagataggcttccattttcgccttcatctcgtcgtcgatatagaccttgccgtcgatggagttgttgtggaggaaagcgatgacctcccgcacggtgacgatggggaagacctgaatgccgtagtcctggcgcagctcatccagggtggagcactcccgagtgccccgctccatccggtccaccgagacgaacagggctttgatgttcacgtcggccacatgcttgaacagctcgatggactcgcgcacggcggtgccggcggtgactacgtcctccacgatggccacgtcgtccccgtcctggggcttgtagcccaccatggaaccgccctcgccgtggtccttggcctccttgcggttgaagcagtagggcagatcccggtcataattgcggtacagggaggcggcggcagacaccgccagggggatgcccttgtaggccggtccgaacaggcaggtaatgccgtctggcatgtgctcctggatacaggcagcgtagtagtcccccagcttggccgcctgggcaccggtcttgtagtttccggtattgacaaaatagggggtcttgcggccggatttggtggtgaagtccccgaaggtgagcacgccggagcgcaccatgaacgtgataaattcttccttgtaggtcatacaaaatccctcattccattcattgtcctcccctgtcaggcccgccgccccgacgggcctgatctcttgggggaaatcgtattattataccactttttttgctcaggtacaagaactccgtcctgtggaagcccggaaagttttttccgttccgcctgcctccctgtgaaatactggtgacagcatctgttctgtgtgttataattttcagacagcaggcatatccgaatccccagggtcgggcctgtccgttcctcattctgttttctgccgggacgcctcatactttgtgctgacacctgaaaggataccgtatcatgcagctggaacatctgatccgcagcgttctccctgttatcctgctcattatttttggcttttggctccaaaaacgccattatttttcggaagagaccgttcagggtgtgacaaagctggtctcagattatctgatcccctgtaccatcttcaccacctttattgggctggatctgcgccccgagcattttgggctggccgcctgcacctttctgatccagcttctgctcctggggctgggctttctcaccgcgcgcctgttccatttcaaacgccgcttcgctcccctctatccttgtgcctttgccttcggcttcatggccattcctctcttctccactgtgttcggcctggaaaatatggggtatctcaccagcatgggagtggggcatgagctgtttatcggtctagtcttcatgccggtcgcccggatctatctaaagggagagaccgccggaccgcgtcaaatcggaaaaaaccttttatctccactgtttgtcatgatcttcctggccctggcacttcagcttctgggtatacgggacgccgtttccgccacagacctgggcggcggcgtgatcgacaccatctccaagctgggcggcatcagctccaccctgatcctgatcacagtgggctaccggatccatatggacaatccggacaagatccgggagagcctgcgcctggtcgcctggcgctatcttctgatcttctccgtcagctatggggttaaatttttcctgatggaccccatggtggggcaggatttctattttaatgccgcgttctttaccttgatctcccagcacggttccgtcatcctcaacgcctacatctcggagtatggctctttggaggactcccagatcgccagcaacgccttcgccatcaacgcagtcataggtatggccctgtttgtcctctatgtgtgcctccttcccctcctctggtcctgaaggaggacgccctcattttctgcttgcaggccgggccgttccttattataatgggactaagaatacaagagtcgtgtcatcctctgaccggccgctggaaggggggctccttttgaaagaatggaaagccaagctccatgatctgaccgccattgtcccgcggggcgtgatgaattttctgatcaccgcctttttcatggccggggcatactacctcagccggctgctgtttcagttcggcgtggagaacaactccgccttggtctatgtgctggccgtcacattcgtatcctggctgaccactggatatttttatggtatcctggcctctctgttcagctctttctgcatcaactactattttatgtacccctactccgccttctctctcagctatgccggatacccggtggccatgctgagcatgacggccatcgccatcatcatctgcaccctcacctcccggatcaagctccaggccctggaggcggaacagcgggagcagaacaccaaggccctgtatgagctgaacgagcgcctgaaccaggaaaagaatgccattcagctggaggccgcccgggagaccatccgcagcaatatccttcgctccgtctcccacgacctccgcacccctctgactgctatctccggggcggccgcggtactgctgtccagcgaggagccccgcagtgagaaggatgtctccctgctcaacgacatcaaaaacgacgccgaagctctcaccaccatggtggagaatctgctgtccatcacccgtatccaggacgcctctgtccctttgaagaagcgggaggagatgctggaggaggtggcgggggacgcggtgctcactacccgccgccgtttcccggacgccaatgtgcagttggacctctcagaggacatcctgttcctgcccatggagcccatgctcatcaagcaggtcatcgtcaatctgctggaaaacgcggtccgccactccggggacactcagcacatccagctccacctgttccgccaggaggagtgggcggtggtggaggtccgggaccatggcattggactgtctcctgacatcatgcaggcagtccagtccggccgtcccctcccccgggacctgtcaggcgactccacccgaggcatgggcatcggcctgtccgtctgccagagtatcatcaaagcccacggcggcttcttcgccgccggaaatgaccctgagggcggagcggtcttccgcttcggccttcccatggaggagaaagcatatgagtgaaaaacgtttgatcctggtcgtagaagatgagcgcaccatcagcaacttcatctgccgcgctctgaccgccaacgactacaaggccatgtccgccaccaccggcaaggaggctctcagcctattcttttcccaccgtcccgatctggtgcttctggacctgggcctgcccgacatggacggactggacgtgctcaaggaactcagcggactgccccaggaggtgcctgtcatcatcatttccgcccgggatcgggagtctgagaaggtcaaagccctggacatgggggcggatgactatgtggtcaagcccttcggcgttccggagctgctggcccgcatccgaaccaccctgcgccgggccgaccggatcaacctcagccagggcgagcagaaggaccgctatcaggtcaaagacctagtcgtggacactgcccgccaccaggtcttcgtgggcagcgaggagatccacttcacacagaacgagttcaagatcctggagctgctctgtctccatgccggcaaggtgctcacctatgacttcatcctcaagcatgtctggggtccctacgagggcagtaacaaccagatcctgcgggtcaacatggccaacatccgccgcaagctgaaggaaaacccctccgagcccaaatacatcctgacagaactgggcatcggataccggatgctggaggacagctgagccttccatacacatcagcacccccggaggctaaggctccggaggtgctgtttttctcccctgtttttttcttaacaattatttagcgaccctctgtttcagtttaacacccattttatagcccagaggctataataacagacagaagagaatttgaggaagtgagcccacatcatggaacagagattacaggaagtgcttctggacggtgagattgtccgctggagcggccgtccctcccctttcaaattgatgtccatcccctcccgtacttctctgctcctgacctgggtcctctgttccgcggcgctggccgtgatcctgggcggtctgatcccctttttcctccgcactcatcaggccgtcaccgatctgaccgtgatcctcatgatcgctgccttcctccccgccatgatctccatccgccccctgttggacaagtggagcttggagcatgacaccatctacgccatcaccaactaccgggtgctggctctggtgaagaacaacctgatgtatattcccctgggccgcatcctcacccactccattgaagcccgggacggggagagcggcaacctctgcttctgtgaagcggtgggccagtcctcctccaaaatgctggacaacgctattttgggggtccgctgcggcagtcctgcccagtccggcgtccccggcctgctgttcttccacatccctcagccagaatccctgcttggatatctctcctaaacggccggagttttctcacttttctctggttcggtttttcttctccgtgtggtgagggagcgggcgtttctctctcctaaacgtccgccccataccggctcaccgcccggccgatccgccgcctccccttccgccaaaggggaggcggtattcttttattttttacatcatttatttgattctattttttattttttcgctttcttaacgtcaatataccccctatttataccgtttttataaatgttgtggtaatcttttatcaagataagaattcattcttatttatgaaaggagcaacatatttatggaacagatcctccaaaagactctgcgggacaacgagaaggtcctctggttcggccgacccaccaagacgaagctcctccggtcccctgaccgtgtctcccagtatgtggcctggatcatcaccgccgtcatgaccctgttttccttcggtgtcttcctccccttcgccatcgcggacaataagagcatcgggatcatcctgatcggcctggtgcccatgatcggcatcccgctggcggtggccgtccgtccctatctggacaagaagctgctggagcagaagaccatctatgccatcaccgaccagcgcatcatcgccgtggtcaaatccaacgtgatgaccatgccccgtgaccagaaggtgacctgtgcggtggagtgccgcgacggcggtgccggcaacgtctgcttcaacgcagccatcggccgtgaggccggcaagagccgcgccaacgctgtgatgggcatcaagaagggcaacgaccgtgtggtgggcctgctgttttttcacgtcagcgacccggacgccgtcgtctccgccctcgcctgaccccggagctccagacatcatttcctaaaattattccgtaaatactccgggcccgtaccatctctggtacgggcccggagtatttacggctgcgaaaaagtcctccagggactttttccgcagcctgcatcctattatttttctgccccgtctggggcagagaagtctcagaacgcttcttcctcgcacaggatcttccgcagccggtccaccgcccgccgctccagccgtgagatctggacttgggagacccccaggactctggcacactggatctgcgtgaggtttttgtaatagcgcagcagcagcacttgctgttcccgctccggcagctcctccatggcggaacggagggtcagccgctccaccacgtcctcctccatcccgccggtgcccagcatcccctccagggtcaatccgccctctcctgtctccgcctggagggatgccactgcgtcagaggcggtctccgccgctgcgatctcctctggcgtcaggccggtctccgccgccagctctgacagggtgggctcccgtcccatctcggccaccagccggcgtcgggcgccccacactgcggccccccgctccttcatgccccggctcaccttcacagtgccgtcatcccggagaaaacgccggatctcccccgcgatcttgggcaccgcataggtggagaactgggtcccgaaggatgggtcaaagccccgcactgccttcaaaaagcccagacagcccagctggtacaggtcgtccggctccacgccccgtccgtaataccgccgcacaatgctccagatcaggccggcgttttcctccaacacctgctcacaggcccggttgtccccctgtctggccgcctccagcagctctggagccgttggcgtgccattcatcgtccgcctatgcggggggagatccgcttccgcatggtcacctgggtccccttccccggggtagagcgcacctttaccacgtccatgaagctctccatgatggtaaagcccatcccggagcgctcctcgctcccggtggtaaacagcggggtccgggcctgctccacgtccgcgatgcctaccccccagtcccgcaccaagatctccaggatgccgccctccttcagacgcagcttcagggccaccttgcccagccggtccgggtaggcgtggacgatggcgttggtcactgcctcgctcacggcggttttgatgtcgttgatctcctccagcgtggggtccagctgggcggcaaagcaggccgccgccgcccgggcaaacccctcgttggctgaccggctgggaaattccagcgcggcgtaattttccaccttcatttatgtacgtcctcctcccccgccgcggcgggctcctcctgttcaaatcggatcagcttgtgcaggccggccgcctgaaacaccttccacggctgcggaggcacgccccgcactatcagctcgcccttgatctgctccatccgccggctgacccggatcagtactgcgatgcccgagctgtccgtaaagctcaggcctgacaggtccagagtcagccgccggggcagagccatgtcgatctgttcatccagctctgtcatcacctctttggcccggtggtgatccagctccccccgcaccgccgctgtcagggtccgcccctcggacacgcaatctacggtcattcagacttcctccttggcccggtcctctctgccgggtgatatgaggagattataggacaagccccctgcaaaaccgggcataagctgtcgaggctgggaagaaaatccatgtttgtccttgacctcacccctcccatctgataccatacaagaaacaatcacgtttcacatagacgggttttataccatcagctatgaggagcctcctctttccttctattttgaattttgagagcccctgttctgcttcccgcagagcaggggctctcctgcataaaatctcaaaaaatctccatgataagccttgacaaacttcttcccccgcgctatgctgaagataccccaccccaggggggtgtatcgcatttgctccgctccgaatttgcgccgcttcggcggcggggcgctggggcgcccatgggcggagccctcctctgaaaggatgtgtttcccttgaaacagaaatttgacgtcaccggtatgacctgctccgcatgctccgcccatgtggaaaaggcggtgaacaagctggagggcgtacgcagggcggaggtcagcctgatgaccaactccatgaatgtggagtacgacgaggccgcccttgcccccgaaagcatcatccaggcggtggtccaggcaggatacggcgcctccctgcccgcccaggctggggtcccagcccggggagccgctaagaggccggaggcccagatggaagcggagctctcctctatgaagcgccgcctcatcctctcctttctcttcctgatccccctgttctatatctccatggggcacatgatgggcgcccccctccccgctttcctggtgggtcacgagaacgccatatccttcgcctttacccagctcctgctcaccctgcctatcctgtatatcaacgacaagtactacaaaaacggcttccgctccctgctccacggcggccccaacatggactctctcatcgctgtgggctccatcgcggctgtgatctatggcgtctttgccatttaccagatcggctacggcctgggccacggggacatggcccgggtggagcagtaccatatggacctgtacttcgagtctgccggcatgatcctcaccctcatcaccctgggcaagttcctggagacccgctccaagggcaagacctcccaggccatctcccgcctgatggacctggcccccaagacggctaccgtcctgcgggacggggccgaggcagagatcccggtggaggaggtccgggtgggcgaccgggtagccgtccgccccggccagtccatcccggtggacggtgtcattgtggagggcagctccgccgtggacgaatccgccctcaccggcgagtccctccccgtggacaaaggccccggggacaaggtggccgccgcttccatcaaccgctccggctacttcgtttttgaggccagccgggtgggcgaggacaccaccctggcccagatgatccggctggtggaggaagcctcctcctccaaggcccccatctccaagctggccgacaaggtggccggcgtctttgtccccaccgtcatggtcatcgccgccatcgctgccggggcctggtggttcgccactggcagcgccacctccgccctcaccgcgggcgtggccgtgctggtcatttcctgcccctgcgccctgggtctggccacccccgtggccatcatggtgggcaccgggaagggagcggagcagggcatcctcatcaaatccgctgaggccctggagaccctccatctggtggataccgtggtactggacaagaccggcaccctgacccagggcaggccggtggtcaccgacatcctgccgggcgaggacatggacgaggagggcctgctcatcctggccgcctgcctggagggcccctcggagcaccctctggccgccgctatcgtggaggagagcagaaggcgtggcctccccatcacctcagtgggcgggttcaccgccgtccacggccggggcgtccgggccgccctgggagaccgcacctgcatgggcggcaaccgcgccatgatggaggaggccggggtggagctgggctccttccccgcacgggccgaggagctggccgcccagggcaagacccccctctactttgccgacgagcaccgggtgcttggcctggtggctgtggccgacacccccaagcctaccagcgcccaggcggtagccgccttccggcggctggggatcgacgtcatcatgctcaccggcgacaaccagcgcaccgccggcgccatcggcgcacagctgggcgtctcccaggtgatggcggaggtgctcccccaggacaaggagcgcaaggtgaagcagctccaggatcagggcaagaaggtggccatggtgggggacggcatcaacgacgccccggcgctggcccgggccgacgtgggcttggccatcggtgctggcaccgacgtggccatcgagagcgccgacatcgtgctgatgaagtcggacctgctggacgctgccgctgcggtggaactgtccaaggccaccatccgcaacatcaagcagaacctattctgggcctttttctacaacagcctgggcatccccctggccgccggcctgttctatgccctggggtggacggatgtcatgctcaaccccatgttcgccgctgccgctatgagcctgagctcggtatgcgtggtgaccaacgccctgcgtcttcggttcttcaagcccaagagcgtccctgcctcccctgttccctgccccagcggcacctgcccggtccagcctgtccctgacccctcggagcagcccacatatgaaccacaacatcaggaagaacgaaaaggagcgaatgaaacgatggaaaagaagatcatgattaacggcatgatgtgcgcccactgcaccgcccacgtggagaaagccctgggcaccctggagggggtggcctccgtcaaagccgacctggagggcaagtgcgccacagtcaccctcactggtgcggtgagcgaccagtccctcaccgacgcagtcactgaggccggatacgaggtggtgtccattcagtgaaagcggaccacgcccaggtcgcccggctgctgaagacggcccgtggccagatcgacggtatcctgaagatggtggaggaggaccggtactgtctggacgtctccaaccaattgatggccacccagtccattctgaaaaaagccaaccgcctggtactgaaggcacacatgaactgctgcgtgcgggaggccgtggacagcggggaccccgcccccaagctggaggagctggccgccctgctggataagctggccgactgagatcccgctcccccggcaggcaaaatggataaaacgcccccctgcctggcacactagaccggcaagggggcgtttttttgaagcatagatctacctggaagtccgtgcttgccggggcggcagccgggctgaccaacggctttttcggcgggggcggcggttcggtgctggtccccatgctcacccgggtgtgcggactggatcagcggcgggcctttgccacctcagtggcggtcatcctgcccctgtgcgccctgtcggcagccgtctatctcctccggggcggactggatctctccgccgccctgccctatctcatcggcggcactgtgggcggctgggccggaggacggctgttcaagggcgtccggctcccgtggctgaagcggggcttcggggccctgctcatctggggcggcctgaggtgtctgttgtgagcggctggctgatccccctgctggtgggggcggctaccggggtcctgtccggcttcggcgtggggggcggcacccttctgctggtctatatgaccaccctggccggactggaccagcacctggctcagggcatcaatctgctgtactttctccccgccggactcaccgccctgcccgcccacctgaaaaacggatatgtggaaaaggggcttctgttccctgccatctccgccggcctgctctgcgccgcgctggcctcatgggccgccacagccctggacgtggacctgctccgaaagctctttgggggctttctcatcctcatcggcctgtccgagctgttcggtcgggtaaaagaagaaacgtgaaggccgcggggaagatccccgcggcctttgaatcagtcaaatcccgatctgcatcccgccggaggaggacagtccatccttctggagcatctgctccagaaccgccacgtcggtggtgatgtccatagcatccccctgaaagagctgatccagctgtttctcgaagccttccaccaccttgcccatcatcccctcgatccggctcatggcggctgcaatgttctccccctctacgccctgggactccagctgggcataggcccggaggatcttcagggttgtgggcaggtaatagctcagaaaggcatggagctgggcagacctttccgggtggctcttctgatactcgaagatcttggcggtgatgaccccgatgcggtcgatctgcgccgagagggccgcgtcttcgatggagtcgttcaccgcccggatctcggccagcaccgcgttctcctcgtccaccggggcagccttcttctcctccgtcttttcctcctgtgccggggccgggtcgttcagcccctcaccggagaggaccagccggtccccgccgtagtccaggaaacccagggggaacagcccgtcatccagcatatcctccaggcagtcccgcaccttggccggggaggcaccggtggcggacgccagcgtcgagatggagatggtctggcggcggccgatcatggccagatagtttcggtaggtgcgcacctgcttctttttccgcaggccggcccacagcacgccggcaccgccgcccaggaagcagagcagggggatggcgttcagcagctggtcccagaaccagatcgcgtcgccgtggaggagccagtaggacgcatcacccaggcaggccagcaccgtgaaggcgaagaccgccgtaatgatcccgcccacctggatcagcctccggccccgcttggccatcttctccactacgtccaggcacaccggggacatatcctgttccgctttcccttcctggcgctttttctccctccgaccggtcttttcctggctccgtgccggctcactgacagtggtccgggcccccacgggggcctgcccatcccgctgcatataatagggatggcgcccccgggccacgcggcgcttcccgccgccgaagagcctcagagcgatcatcagcacgcccaccggcgggaaggcaaacagaaagaccagcgccaagatccagtacggcaggtcactcatccctccgccagagctcctgcggggctcccattttccgccgtagttctcatttccctgatctccgtaatatgccatcattctgcctcccctggtgttctgctgtatagaataccagacccatcccaaaacaacattgattttttcttaaaattccttgaaaatttctcttctgggtctggccctctctcttccacatacaccattctatcatactgccgggaaggtgaaaagtaaacctcctaaaaatatttttcaaaattgaggaaatccggggaaatttggacggtcaactgtaactgttctgtaattacattctgaaacgtaggatgctataatatagtctgaaattatttgacctgtccgtgggttcttgggctgagtgggacaggaaggggagttttcatggacggagcacgtgtacagaaaaaaagcggcggaaagcccggcccagccgtctgggtcccggccgccatcctggctgtcctccttgccgcctacctgggcctgtgcggctgggtcagcgcctcggacaccatcctgcccaacgtcaccgccgccggactggacctgtccggcatgacccaggctgaggcggagcaggccatcaacgagaatctttccgtcgcccagcaggctggctccggctgggccgtggacctgagctgcgacggctatattggtacgctggacggctcatcctttcaggtggacgccgcctccctggcccaggcgtccctgtctgtgggacgcggcagcttcttcaccgggggggcccagtacctgcgccacctgttcggcgctgcccaggaccttggtgccgatcaggtccaactgacagaggcgggccgtacagagctggagcgccagctccaggccgctgacagtgccctgggcagcggcggcagcgaggatggctacaccgcagacttggaggcgggcaccctgaccctggtaaaggggcacacccaccgctcggtggaccgccagggagcggaggaggcggtgaagtctgcctacgctcaactcctggcccagggtcaggcggacacggtccagctccccatcctggattccgctcctcaggagccggacttccaggccatccacggggagctgtacgcggaggcggccaacgcagccatcgatccggatacctgcgaggtgctgccccacaccgtgggggtggactttgacaccgcccaggcccagcgcctgttccagcaggcccaggagggagagaccgtggaggtccccctcaccgtcactcagcccgacatcacccaggagatactggccgaccggctctttgccgacctgctggggcagggtaccagccaggtgagcggctcctccaaccggaagttcaacgtgaagctgtccgctgaggcctgcaacggcgtgatcctgatgcccggcgaggaattctcctacaacaacaccaccggaagccgttccgccgacaagggctatctccccgctcccgtctactccggcggcgcctccgtggacgagaccggcggcggcatctgccagacctcctccaccatctactacgccgtcctccacaccaccctggagatcgtggagcgccacgcccacatgtactccgtgggctacgtccctgacggcatggacgccaccgtctacttcggcctgtccgacttccgcttcaaaaacaacaccgactacccggtgaagatcgtcactgagagctacgacaagaacggcctgcgctacctcactgtcaagctctacggcaccaatgtggacggccggtacgccgtgccggagcgcacccagttcgactttgtatcccccaccacccagtaccgggccgacgagtccatcccacagggcaccactaaggtggatgccaagcagaacgcctacaccggccgctctgcccgcgcctggcgtgtcatctatgagaaggacggcaccttggtggagaagcaggatctgggggtcagcacctataagatgcgccccaccaccatcctctacaatcccgctgacggcgatccctccacctgggtagacggggtcccccccaagtccggcgcccagcccgggacagagaccggaacagagtccgggggaggcaccggcggtgagcctgccgtcggcacaggaactgacagcgagacgtctgccggggagtccggcagcagctcctccgctcccacggaggatatccccgcgcccgacacaggggacggggcggctgacggccccgctcagtcctccccggaggaggaccactacgggtatgagatccccgccggggagcttccgcccggctattgagcacatatcttaccatacagaagaggtccgtttcctatgtttcaaggtttttctcagggcgccgtggattttctgtggggcgtccgattcaacaatgagcgcagctggttcgaggcccacaagcaggagtatctggatctggtcatcgcccccctccaggagctgggccgccaggtccatgccgccatgaccgccgcctatccaaaggagcagctgaacctttatgtctcccgcatctaccgggatgcacggcggctccacggccgcggcccctacaaggaccacctgtggttcaccatccggcccgagcaggaggggtggacccatgtccccgccttctattttgagatcgcgccggagtatcacagcctggggatgggctattacggcgccgagtccgtcaccatggccaagttccgctcccgcatcgaccgggacccggcccctatggagaagctggcccgccggctcagccggcagcaccgatttgtgctggagggcgagatgtacaaacgccccaaaggggaccccggccccctgctctttccctggtacaaccggaaaaacatcgccctgacctgggaccgcaactgcgagggctccctgttcacccccgagctggctggggaggcggaggagagcttccgcttcctcaagccctactacgattactttctctccctccgtggcgacccagccccggatgcctcccgctgatacccgcggcccctgggatagcccccgggggccgtatccttttcgaaaatttttatatttttcccacaaaacctcttgacatccccccgcctttgtggtacattatagccagaaaggatgagtccaatgttttaagaagtctgatcgatcagatgtcactcccccagacaaggggatgcgtaacatgcatcaaatcttttcctgatgtaagcggttccaggcgatgaagtccatgccggcagtggtcagcaaaagaacagcatctcagcgaagcgcgcgcacgacatctgaaccccacgcgttgccacagaaaaagcatctcagcaagcgaaaaggaacgttccaacagacaatgcctcatgtatgagggagcaccgaagcgttgggtgcaaaatgaaactggttgtgcaacagtgttccggagactgctaaagagcaaaaaacgtggtcgcgcgaatctgtagaaagagaggtaaacaattgatgttagataacaagaatggacagaaataacccctgactgtgagtgaaccgagggtgcaacagtcaggggttatttctttttattcttgtatctctgaggaaggccggcggagcattgctccgccggtcctgatttgtcgaaaaagtggtgctgtcactttccgaatagacttgattttttgtacctgcacatgtcaaactctgtgaagccctttttgcaggctgtgcagcatgactcactcacttgtccagcatggcactcttctgctctcctctgctgtcgtcacatctcaataaaaatctcgctgtccgcccgccgggcatagagctcctccagctcgtgctgatggtacagatagccctcgtggtcaaagtacttggcgcccttggggcacttcttcacgcaggcacagcacttgatgcacttccccaccacactggacacgtcgttggggtcgatggctgccatggggcagagacgggcacacaggccgcacttgacgcacttgtccgagtcagtcaccggcttggccttcaaaaagtccttgatgggctccccgtggcggtccctgggggtatagtaggggcggatggggtcacagcccgccacataggcagggatctctggggcccgctccagacctttcaccttctccgccgtcttgtgagccagctcctctaccagtgccatatcctgggcgtcgggccggcccgcccccagggtcctggagaaagagtgctcccccacgaaagcgccgcccgccacggtgtgaaagccgtccgcctccagcacgttgcgcagttcgatcagcccgtcgtcaaaattccggttgccgaacagagacaccggcacagccagggccccgtttcccttcaccttgtcccggatatagggcagcagcagattgggcacccgcccggcatacaccggggtgccgaaaatcaccagatcccccggcccgaaggacagctccccctcccggtccttaggcaggttgaagcagaaggtcttatactccgcccccagatcctccgccgcgatcttcgccatccgggtcactactttttccgtggtcccggtaccgctgaaatagaccgcccacacgcgttgcatctccattttctgttcctccttgtctttctccctgtgtcattaccgcgggtcaggcatcaaatttctccaccaagctgtctgccacgcagcgctccttgatctccttcagggggaccatatggggctgagtcatatggacctcctgggccgttcgttcggtccaccgctccaccagcagcagcttgtctggttcgtccacagcctcaaaatactggtactggaggcagccctcctctgccagcaccgccttctggatgccgtgctcggacacctcccgcaggaactccgcccgcagcccgggcttcatggtataggtcacgttgagaataaatgccatggaatcattctcctttcttctgtccataatatagggggctgagaggcctcctcagccccgcagccttctgtgatccagatatccctccaaaatcagggaggccgccaccgcatccaccgtcttttttcgctttctggcgttttttcccgcctcaaacaggatacggtgggcgtccacggtggtccgccgttcgtcccagagcacgggccggagccccgcggtgtcctccaccagggctgcgaagtcccggtacagctccgcccgggggccctcggtgccgtccatgttccggggataccccatcaccagctcctccacaccgtgctcctggaccagccgggcgatctcccctgccacttcctccgcctttctgctgtggatagtcgtggtagtcccggtgaggaagccggtagggtcggaaatggcgatgccggtatgggcatcgccgtagtcgatggccatgatccgcataaactcccccctctcccgctccgcgtttttttgtcaactgtactataccgcactccccgcaaaaaaacaaccctgtccgcccaatttcctcttgacgccgcgctttccttgtgttatagtgatactacctgtgaaaaggggcttttttgttctgcgcatttttacggtgtatgcgcaggcacccctcccccatctctcgggacacagggaggcaatcgccggatcccaccgtgagcatgtcagacacagccctgctgtgtctcgtatggctggattcggctttcagagcctgatccagctttttttgctgttggctcacatcagcggggcggcccggaccggccgttctccgcaatacttaaaggaggtgccgaacatatggcaagcaaggccggtgctcgcatcaagatcaccctgcggtgctctgagtgcaagcagagaaactacaacaccatgaaaaacaagaagaatacccccgaccgtctggagctgaacaagtactgccccttctgcagaaagcataccgtccacaacgagacgaagtaatgcgtctccagatggctgaaaggaaagaagggtaactgaatgtctgaaaacgaaaagatggagcagggccagggctctgcctccgcttccgaaaaggccgacaaggcgaagaaggacaagaagcctgaaaagcagaagaagcccagtattttcgcccgcatcggcaagtggctcaaggacatgaagagcgagctgaagaaggtccagtggcccagcttcaagcagacgatgaacaacaccgggatcgtcatcctctgcgtcatcgtggtgggcatcttcatctggctctttgacgcggtggccggcgctttgatcgagttcctgctcggcctgttccgctgataggtggcgaatatgtctgacggcgcgcagtggtatgtggtccacacctattccggatacgaaaatacggtgaaggccaccattgagaagtacgtggaaaaccgcggtcttcaggatctgatccacgagatcagcatccccctggagaccgtcaccgagatcacagacaacgggcccaaagaggtggagcgcaaggtcttccccggctatgtgctggtgaagatggtcatgaccgacgagtgctggcacatcgtgcgcaacattcgcggcgtcaccggcttcctgggctccggcaacaagcccatccccctgtctgagagtgacatcgccgccctgggcgtggagaagcgcgagatcgtggtgggctacgaggtgggagacagcgtcaagatcaccgatggcgccctggagtccttcctgggcacagtggaggagatcgacctggaccgcagcaaggtccgtgtggtggtgtccatgtttggacgggagacccccgtggagctggagctggaccaggtggagcctgttaaagcctgacccatcgaaacacaatcctgccgcgtgcagacgcggcccgtgggagggacggaacggtccgtcccgccagttggacccgccgggcacggcctgagctggtccatatccaaccacatttttcatatggaggtgctctttcgtggcacagaaagtaactggatacgtaaaacttcagatccccgccggcaaggcgacgccggccccccctgttggccccgctctgggccagcatggcgtgaacatcgccgctttcaccaaggaattcaatgagcggaccaagaacgatgtgggcatgatcatccccgtcatcatcaccgtctacgctgaccgttccttcactttcatcaccaagaccccccccgccgccgtgctcatcaagaaggcctgcagcatcgagtccggctccggtgtgcccaacaagaccaaggtcgctaccatcagcaaggaagacgtgcgcaagatcgctgagaccaagatgcccgacctgaatgccgccagcatcgaggccgctatgagcatgatcgccggtactgcccgctccatgggcgtcgtcgtgggcgagtaaggagggtgtgaacaatgtttagaggcaagaaatatcaggagagcgccaagcagatcgaccgcgctgctctgtacgataccaatgaggccatggagctgatcgtcaagaccgctcccgccaagttcgacgagaccgtcgagctccatgtgaagctgggcgttgactcccgtcacgccgaccagcaggtccgcggcgccatcgtgctgccccacggcaccggcaagacccagcgcgtgctggtcttcgccaaggccgccaaggcggacgaggccaaggccgccggcgccgactatgtgggcgagatggacctggtggagaagatccagaaggaaaactggttcgacttcgacgtggtggtcgccacccccgacatgatgggcgtggtgggccgtctgggtaaggtgctgggtcccaagggcctgatgccctctcccaaggccggcactgtcaccatggatgtgaccaaggccgtcaacgagatcaaggccggtaaggtggagtaccgcctggacaagaccaatatcatccactgccccatcggcaaggtgtccttcggcgctgagaagctctccgagaacttcaacgccatcatgggcgctatcgtaaaggccaagcccgccgctgccaagggccagtacatcaagagctgcgtggtggcttccaccatgggccccggtgtcaaagtcaacggcgcgaagctgatgtgatcatctgattgccctcccccgcagtttcccggggactgcgggggaggctttcttccctgtgcatcagattttttaaattttcggaaaagtccttgacttttcctcctttttcggatatactatcatctgcgttcaaagacagcaggcggcgcaagcggaagtcctgccgaggatgcagccagaaacatgatccatattgtgtttttacgctgttttcacgctttgggcgcggaaaacagcgttttttcgcgtttcccactattctctggaggtgaacccaaaatgcctaacgcatctgttctggaacagaagaaagccattgtggctgaactgaccgaaaagctgcagaacgccgccagcggtgtgctggtggattacaagggcatcaccgtggctgaggataccgctctgcgcaacgagctccgcaagaacaacgtggagtacgctgtcgtcaagaacaccctcacccgctttgctgctcagaatgccggcctgggcgatctgtccgactccctgaatggcactacttctctcgccatcagccacgaggaccccatcgctcccatgcgcgtcatcaacaagttcgccaagcagttcaacggcgccaagttcgtcatcaaggccggcttcatggacggcaagatccttcccctggatgagatcaacgccatggccgagctgccctccaaggaggtcctgcaggcccaggtcctgggcaccatgctggcccccatcaccagcctggccatcgtcctgaaggccattgccgaggagaagggcggcttcgtagaggccgctgccgagcccgaggccgcccccgccgagtaagtatcggcacccataacattttgactgaaaacaacttttaggaggtacattcattatggctagcgagaagattaccgctctgattgaggaagtcaagggcctgaccgttctggagctgtccgagctggtgcatgccctggaggacgagttcggcgtttccgccgccgctatggccgctcccgctgctggtgccggcgctgccgctcccgctgctgaggagaagaccgagtttgacgtggtcctggccagctttgacgccgccgctaagatcaaggtcatcaaggctgtccgtgagatcaccggcctgggcctggctgaggccaaggctatggtcgagggcgctcccaagactctgaaggaggctgtctccaaggatgaggccgaggagctgaagaagaagctggaagaggccggcgccaaggtcgagctgaagtaagcttttccccagacagaagtcaacgggccccagggcaaaatgccccggggcccgttttttctttttctccctctgtcctccgccgctgtttcgtgttatcctagtaccatcacagcatccccgatcttaatataatgggaggaatccatcatgcggaaaaactttggccccaagccctacctctatccccagccggtgctgatcatcgccacctatggagatgacgggaccccagatgccatgaacgccgcctggggcgggatcagcgacagcaaccgtgtcgctatgtatctaagcgcgggacacaagaccgtacagaacattctgtcccgaaaggctttcactgtaagcatggcggacgaggaccatgtggtggagtgtgactatgtgggtatcgtgtccgccaaccaggcgcctgacaagctggcccgagccggcctccacaccaccagaagccaatttgtggacgcccccctcattgacgaactgccaatggcgctggagtgccagttcctcagctttgacgaggagacggagctgctcctgggggagatcatcaacgtcagcgccgaggagtacatcctgggggaagatgggaagatcgatcccgccaagctgcgccccatctccttcgacccggtcaatcacgactatctggccctgggagagaaggtgggccgcgctttccaggatggaaaaaggctaaagtgagctctccgggaggggtttggggccctttctggagcggccgccctatttccgcagccggaacacctggctgagatagactccctgggcgctcagggcggccagatacagcactccgccgaagagtaggctggccgccccgcctgccagcagggagacgccgctgtccttcagccaccgaaagaggaggttggaggtcagggccgccagcagtgcggccagccccggcgcggtgacccaccggaacaggctgggccgcagcccggtgtaacgcaccaccagccagccgttgagcagggcccccgccgccgctgagaccagagtccccgccacgaagccgcggatgcccacccccgggaggcccacggtgaaggtgaaggccagctgtatgccgtcacagatcaggtccgccatggcgtggctccccggccgtcccacgccgttgagcacgcccccaagggtggactggtagcagctcagcgccatggccgccgccagggggagcaggtgttcccccgccgagggctggccgaacatcatccgggccaggtccggcccaagcaccaccatcagcgccatggagggaagaatgagcaccgacaccgccagcatggcccgcccggcccgccgcctcacctcttccgggcggttcagtgccgtggagtaggccagcctggggaccagcaccagattcagcgcccccagaaagacagtgggcagggccagcatggggagggtcatcccgcacaccacgccgaactccgacatggccgccgcccggtccatgccgctctccacaagcttctgtgggataagggcggcgttcaccgccgacatcagattacccagcagggcggtggcccccacagggacggcgatggaggtcacccgccgggccagagtcccgccccgctcccctggccccgtccggccgatccgcgccatccgccggcggtagagcactgtcagcgccacggcggaaaagatctcacaaatcaccatgccggtgacgatcagccccaccgtccgctctgggttctggggcagaaacagcaccagcagccccagcaccgccgccgcccggatgaactgctccatcagctccacgacagcaggcgggcggaccactccggtcccatagaaaaagtgcttgtggatgttctccaccccggtgagagccacgcagggcagcagcaggatcagccccagctgggtccgggcatcccccagcagatagaccgagatggggtcatagaaggccaccactgccgccgataccggcaggagccccactcccagggcggtgaggcacatccgcctggtctgcgccactccctttccgtttcccagggccagatactgggagctgaggttggacatggctgcggtcagccccacagcggtgagggacagcagtaccgagcacaccggcatcagcagctgatacagccccatcacctccgcccccaccagccgggacagggccacccggtaacagaacgacagcccctgtgatactgccgccaaggcggtcagaaacagggcgctgcttccagcggaccattcatcgtgacgcagcaaatccagtccctcctccccgccccagcgggcggtcctcccttcactgtattcacgccgccgccccgccattcctgcaagaaattcgttatctttttcacatatttctctcgttccaggggagaatcatgcctgaattgaccaaaaactggcgtatctttacctttgtcaccagacgccttgcttccgcccgggaaatcgtttatagtacgattaagaaagagatcccgtcccctttatccccgcgattttctggaagaagaatgagacactgtaaaaaggaggatacccctatggcttttgtagaatttgagcaacgcggccacgtgggcctcatcaccatcaaccgcccggaagtcctgaacgccctgaacctggaggtcatcgaacagctggacgatatcctgctgcgcgcagaatcccaggaggatgtccacgtcatcgttatcaccggcgccggacgctccttcgtggccggtgccgacatcggcgagatggtcaactataccgccgacgacgccaagcgcttcagccatcatggaaacaataccatgatgcacatcacccgcttccccagcccggtgatcgccgcagtcaacggcttcgccctgggcggcggctgtgagctggccatgtcctgcgacattcgggtagccagtgaaaaggcaaccttcggcatgcctgaggttgggctgggcatcactcccggtttcggcggcacccagcgccttcagcgcatcgtaggcatgtccaccgccatggagctggtgctcaccagccgcaccatcgacgcccaagaggcccttcagatcggtttggtcaagcatgtctaccctgccgacgtgatgctggacaaggctctggagctggccgacctgatcgcctcccgcccccaggtggcagtccgccaggccaagcaggccatccgcatcggcaaacagatcgacatcaactccgccatcgcctttgagtcagaggccttcggcctgtgcttttccactgaggaccagaaggacgccatgcacgccttcctgaacaaggagaagatcaccaccttcaaaaaccgctgaatccgttccgccgccccagcggcagggcgctttcccaatatcacttctgaaagacaaggagatcgagatgtcatgaaaaaaatcgtagttgtaggcggcggcaccatgggcctggacatcgcccacacctttgctcgcagcggccatgccgtcgtggtccgggagatcagcgatgagctggcggagaagtctcacagccggctggtggccgcgctggataagctggtggccagaggcaagatggacgaggccaagagggccgagatcctgggcaacatgaccttcaccactgacctggccgccgcagctgacgccgacctggtgctggaggccatcgtggagaacctggacgtgaagaagagcctgttccaggagctggacggcatctgcaaggcagacaccatctttgccaccaacacctcctccatctccatcaccgccatcgccgccgccacccagcgggccgaccgcttcatcgggatgcacttcttcaatcccgccactgtgatgaagctggtggaggtcatccggggcgtccacacctcccaggagacctatgacgccatctgccagctgtccgccgacatcggcaaggaggccgtggaggtagctgaagcccccggcttcgtggtcaacaagatcctgatccccatgatcaacgaggccatcggtctggtggagaccggcgtggctacccccgagggtatcgacactgccatgaagctgggtgccaaccaccccatgggccccctggccctgggcgacctggtgggcctggacgtctgcctggccatcatggataccctgtatgccgagacccacgaccccaagtaccgtgccgccctgctgctgcggaagatggtccgtggaggcctgctgggccgtaagaccggcaagggtttctacgattactccaagtaagcggcctgctgacaaaaacgtcgggaaggaaagctttcctccccggcgtttttctattttcctttgttcttcttgtacccgctgtgctccagcctccacgcggcgtccagcagcgccaccccggccagcatcaggagctggtccaccgcccccggggcccctctcaggctgtcatactggctccccatcggcgttgaggagacccccaggcacacaaggcccagggcaatggagatatatgtcacatatcgatttgcaaaattaaaaactttaccacttctgtattggaatcccttctttcttgttcaaattaataattcttttttatcctttttactttttttcttttttgaaggtcaagaaaagcatactttcaagcaatatccgcaaatatcatcattttgcccaaaattttgtcgcaaaaactgtacattttaccgtatttgtttttcttgcgcccatatgggaaaaacgatataatttgagggacaggaagttatctatcgcagcctgattggcgccgcaacaacgggtccctatccgtcgttgcgctttttctggtcttcttttgttaaaaatctaacgaaagagggcggagcgccccggctgagcccccatgggaggcggagatctgaggaaaaaacggcggacctcagatcaccgtcttgcttgcatgtcctgtctaggtggtccggccctgctgctccgggacatcgcgcacggtggcttccgggcagcgcagtcggaacagggcttccatgattgttccaagtaaataaaattaggaggacgaaaaaatggattttcatctgtcgaaagagcaagagatgatccgcaagatgtaccgcgaattcgcggaaactgaggtcaagcccctcgccgaggagttggacgaggaggagcgcttccccatggagaccgtggagaagatggccaagctgggcatgatgggcatctacttccccaagcagtatggcggcgccggcggcgatgtgctgtcctatgccatgtgtgtggaggagttggccaaggtgtgcggcaccaccgccgtcatcgtgtccgcccacacctccctgtgctgcgcccccatctttgagcacggcaccgaggagcagaagatgaagtatctgcctgacctgctctccggcaagaagatcggtgccttcggcctgactgagcccaatgccggcaccgacgcctccggccagcagaccatggccgtgctggagggcgaccactacgtcctgaacggctccaagtgcttcatcaccaacggcaacgtggccgataccttcgtggtctttgccatgaccgacaagagcaagggcaaccacggcatctccgctttcatcgtggagaaggatttccccggcttctccaccggcaagcacgagaagaagatgggcatccgcggctcctccacctgcgacctgatctttgaggactgcatcgttcccaaggagaaccttctgggcaaggagggccagggctttaagatcgccatgatgaccctggacggcggccgcatcggcatcgctgcgcaggcccttggcctgggcgagggcgccgtggatgaggccgtcaagtacaccaaggagcgcgtccagttcggccgccgcatctcccagttccagaacacccagttccagctggctgacatgcacacccgcatgcaggccgcccagtatctggtctactccgctgccatgaagaagcagaaccacgagccctactccatggacgcagccatggccaagctgttcgccgccgaggctgccagcgatgtgacccgccgcgccgtccagctgttcggcggctacggctacacccgtgagtaccccgtggagcgcatgatgcgcgatgccaagatcaccgagatctatgagggcacttccgaggtccagcggatggtcattgccaatcacctgggcgtgaaataagataggaggcagtttcgaaatgaaaatcattgtttgtgtcaagcaggtccccgacacctccggtaaggtggcggtcaatcccgatggtaccctgaatcgtgcctccatggccaccatcaccaaccccgacgacctgaacgccgttgaggccgctctggctctgaaggatcagaccggcgctgaagtggtcgtgatctccatgggcccccctcccgcagagggcatgctgcgtgagattctggcccgcggcgctgaccgcgcggtactggtctccgcccgcgagttcggcggttccgatacctacgccacctcccagatcctggccgctgccatcaagaagatcggcctggaggacgacgacgtggtcttctgcggccgtcaggccatcgacggcgacaccgctcaggtcggtccccagatcgccgagaagctgggcatcccccaggtctcctacgccgccgacatccagaaggagggcgagaccctcaccatcaagcggatgctggaggacggctacatgaccatcaaggtcaacaccccctgcctgatcacctgcatcaaggagctgaacaccccccgctacatgagcgtgcccggcatctttgagtgctacagcaagccctatgaggtctttggctatgagaccctgaaggatgatcccctcatcgaccccaccaccatcggcctgaagggctcccccacgaacatcttcaagtccttcactcctccccagaagggtgccggcatgatgctggaaggcgccgacaaggccacctgcgataagctggccggcattctggccaccaagcatatcatctgatagaagggagaatgaagaatatgtctacttttaatagtgctgatatcgctgccttcactggcggcgtatgggtcttctgcgagcagcgccagggcaagatgatgtccacctcctacgagctgatctccgagggccgcaagctggccgacgagcgcggcaccaagctgtacggtctgctgctgggcgacggcatcgagggcatcgccaaggagctgggcggctacggcgctgacggcgtgtatgtctgtgaccaccccctgctgaaggagtacaccaccgacgcctacaccaaggtcatctgcgacgtggtggaggagttcaagcccgaggtgctgctgatcggcgccaccaacatcggtcgtgacctgggtccccgctgcgcggcccgcctgcacaccggcctgaccgccgactgcacccacctggacatcgacatggacacctatgtggacttcctgcgcaacagctccaccttggacgtggacaaaatcaagtttgacatggaagacaccaacctgaagatgacccgtcccgctttcggcggccatctgatggcgaccatcatctgcccccgcttccgtccctgcatggctaccgtccgtcccggcgtaatgaagaaggccgctttcgaccaggccaaggctgacgcctgcgaaatcattaagcccagctttgccctgtccgccgacgacctggacacccaggtggtggaggtggtcaaggccgccaagaagctggtggacctgatcggtgccgacgtggtcgtctccgtgggccgcggcatcagcaaggatgtggagggcggcatcaagctggccgaggagctggccgaggtcctcggcggcgtcgtgggtgcctcccgtgctgttgtagactccggctggatgtctgctgaccaccaggtcggccagaccggcaagaccgtgcaccccaagatctatgttgctctgggcatctccggcgccatccagcacaaggccggcatgcaggattccgagtgcatcattgccgtcaataagaacgacaccgcccccattttcgaggtcgcggactacggcatctgcggcgacctgttcaaggtcactcccctgctcatcgatgccatcaaggctgccaaggctgcgaagtaatatctcttctggctgttctgcgggctgctctctttggagagcagcccgctttttcgatttcgccttatttttttgcatgttttgttttttcttccgtcattttgcacagctttgggagacgccatagatttcaaagaaatttccgttccaaatgtaacatactttatattctttctctcctctccctgttccatgacggcaaatttgcagtttttccgcaaagtgcagggctttttttgaaaaattttttctttttcttcctttttttcgccccatcaccatttgaagccatcccatccgctccccgccttgtgtattttccccattgacagttgtccttcctgccaatataatgggctccaaacctgaaaattcccttattttattcaggtctgcgggccgctccagacccgcctctgtttccatttgacaggaggttatgaagatgaaaaagtttcttgccatggccctgaccggcgtgatgtgtgtcggcctgctggccggctgctccaacggctcttccggcaccaccagcgccccttccggcggctcctccgcttccagcaccgctggcgcggatggcgccatcaagatcggcggcatcggtcccctgactggctccgccgccacctatggcatcgccaccaagcagggggctgagatcgcggtggacgagatcaacgccctgggcggtatccagctctccctggagtttcaggatgacgagggtgacgctgagaaggccatcaacgcctacaacgccctgaagggcaacggcatgcagatcgtctatggctgcaccaccaccactccctgcgtctccgtggctgctgagaccttcaacgagcgctactttcagctgactccctccgcttcctccaccgacgtcactgccggcaaggataacgtcttccagatgtgcttcactgaccccgaccagggcgtcaccgctgccgactatgtggcggaaaatggcctggctaccaaggtggctgtgatctacaacaacggcgacgcctactccaccggcatcgcccagggcttcatctcccaggccgccgaggtgggcctggaggtcgtggctgagcagaccttccccgatgacaccaacaccgacttcaccgtgcagctgaacgccgccaaggacgggggcgctgagctggtgttcatgcccatttactacacccccgcttccctgattctgaatcaggccaagagcatgggttatgagcccaccttcatgggcggcgacggcatggacggcatcctggccatcgagggcttcgacacctccctggcggagggcctgctgctgatgacccccttcaacgcctccgccactgacgagcgcactgccagcttcgtctccgagtaccagacgcgctacaatgagatccccaaccagttcgccgctgacggctatgactgcatctacgccatctacgaggcctgccagaaggccggcgtcaccgccgacatgagccacgaggatatctgcgccgccctgatctccaccttcacctcctccgacttcagcgtagacggactcactggctccggtatgacctgggccgccaccggtgagatctccaaggctcccctggtcttcgaggtgcaggacggcgtctacgtcgcccgctgattttccgaactcccctttttcccgggaaatccatggaacgggctgccggggtcccctcggcagcccgtgtcccttattcttgcacgcatggcg

SEQ ID NO: 13589 - DNA, 694 bp, Unknown
  gut microbiota DNA sequence
tgtatgtcagtcacgctcagctctcatgtgtgatacagaaaatctccttgttcaaatcaaagtagattaccatcagttcgtcggtaatctccgggttaaaggacagatccagaatgaaaacttgctggttcatctcgctatccaccagactgccgaaccgcttgagcttcaaaaagtcaaccatctcagcaaaggacagtttggctgggtcggttcccggaaaaagttccgccacaatatccgggcctacatcgtcccgatggaactccatgaaaaatgtcacaacgctatggtagcggctgtcctcgtctgccagcgccgctttgatggcggctttggccttctccgccaatttctccgcctcatccagcatttcgcccaccgcgtccatggcagaaggattgtcggtcagttcctcatctacatcaaagagaaagggcagtcccgtgtcctcgggaaaagtaaagatttcctcgtcgggcgtgtattcaaaatcaatgcgtttactgtttagtttcatcaggctatcctccttatcctgcaaggttggcataggtaatgcccttcttcaaagagccgctaacctctaccgaatggccccagaacatatcgtcatcgttataataggcggtaaaacggccgccgggagaaacggaaacctcggtgagcaggatgcgctgggtaaactcctcct

SEQ ID NO: 13590 - DNA, 7048 bp, Unknown
  gut microbiota DNA sequence
ggcttttccgctttttggacagaaaggccgcccggctcacgccgggcggcctttctgtcttcttattctccgtaataggccttcaggtacatctccttgatctcactcatcagggggtagcgggggttggcgccggtacactggtcgtcgaatgcctgctccaccatctcatccaggtggtccaggaaatacgtctcgtccacgccgtagtcccggatggtggccttgatgcccacccgcgccttcagctcctcgatggcggcacacaggttatccagcttctcctggtcgttcccgccccggatgcccagggcgtccgccacctgggcatagcgctccagggtgtgggggtggtcatactgggggaaggtgcccatcttggccgggacctgagcggcgttgaaccggagcacgtggcagatcatcagggcgttggccactccgtggggcaggtggtggaaggcacccagcttgtgggccatggagtggcacactcccagaaaggcattggcgaaggccatgcccgccatcgtggcggcattggccatcttctcccgggcctccgggtcgctggggccgttgtcataggcccggggcaggtaagtgaagatcatctggagggcccgcagggcgatgccgtcggtgtagtcggtggccatcatagaggcgtaggcctccagggcgtgggtgacagcgtcgatgcccgaagcggcggtgagccccttgggggcgttcatcatcatgtccgcgtccacgatggccatggtgggcatcagctcatagtccgccagggggtacttcaccccggagcgctcgtcggtgatgacggcaaagggggtcacctcagagccggtgccggcggaggtggggacggcgatgaaggcggccttctcccccatcttggggaaagtgtacacccgcttgcggatgtccatgaatcgcatggccatgtccatgaaatcggcctctgggtgctcgtacatcacccacatgatcttgcccgcgtccatggcagagccgccgccgatggcgatgatgcagtcaggtccgaaggcccgcatccgctccgcgcccgtcttggcacaggccagggtggggtcgggagccacgtcatagaacacgtcataggcgatgcccatctggtccagctggtcggtgaccggcttagcataaccgtttgcgtacaggaactggtcggtgacaatgaacgccctcttcttgtccatcacctcccgcagctcccgcagggccacgggcaggcagcccttcttgaaatacaccttctgaggtgcccggaaccagagcatgttctctctcctctccgccacggtcttgatattcagcagatgcttgacgcccacgttctccgacacggagttgccgccccaggagccgcagcccagagtcagggatggggccagcttgaagttgtacaggtcgccgatgcctccctgggaggagggggtgttcaccaggatgcggcaggtcttcatccgctgggcgaagcggtccagcttctcccgctgagtcaccgcattgaggtagatggaggcagtgtggccgtagccaccgtcggccaccaggcggtcggccttgtccagcgcgtcgtcaaagtccttggcccggtacatggccagcacgggggagagcttctcgtgagcgaactcctcagagggctccacgctgtccacctcgccgatgaggatcttggcggtctcaggcgtctgaatgccggccagttcgccgatgcggtgggcgctctggcccacgatctgattgttcagggagccgtcgatgaggatggtctttcggaccctgtccgtctcctctcctttcaggaagtagcagccccgggcggcaaactccgccttcacctggtcgtagatggggtccaggacgatgacgctctgctccgaggcgcacaccatgccgttgtcaaaagtcttggagtggatcaccgagctgaccgccagggccacatcggaggagctgtcgatgatggcggggacgttgccagcgcccacgcccacggcgggcttgccggaagaataggccgccttcaccatgcctggtccgccggtggccaggatcaggtccacctccgccatcagcaggccggtgagctccaggctgggcacgtcgatccatcccacgatgccctccggcgcgccggcggccaccgccgcctccagcaccagcctggcggcggagacagtgcatcccttggcccgggggtgggggctgatgatgatgccgttgcgggtcttcagggccagcagcaccttaaagatggcggtggaggtggggttggtggtggggatcaccgcaccgatcacccccacaggctccaggagcttcttcacgccaaaggcggggtcctcctccaccacgccgcaggtcttcacgttcttataggtattatagatatattctgaggcgtagtggttcttgatgaccttgtcctctacgacccccatgccggtctccgccacagcctccttggccagagggatgcgggcctggttggccgccatggcagcggccttgaaaatggcgtccacccgttcctgggaatagcgggcaaactcctgctgggcctgacggacccgggtcaacagtgcctcgaagctctctttgctgtctaccacagaatactgggctttctttgccatatcgctgtatctcctttccaaatggagcggtggcccgccccttagaatcgttaattttttaacgattctattgtcaatattttaataaacattttgtcatttgtaaagaggagatttccatgatatcttttctctttttttgtgaaaatcgcccaaaatggagaactccgctctggtgacctgtttccgcatgtcttcttatttccggaaagatctgaaaaacctctggtgtaccgtgccgccgcaggtgcccccttccatccagtcaggtcagcagaacggacgtggcccccgccgcacggtgaacggaaggctacgcaccatgcagaggccggtctccccagtgagccgccccccagtataataagcgcatgatatgcgcccctgcacaggcccccggaaggccgccgggcgctccctcgatccggggcgcttggcccggggccggaaactgcatcattttcgcccttgacatttcctcggaacctgttataaaataaatgccgctcgctcggagggcaagtcattcgctggaaatgatgagccggataaggcggcagactgagatgtctgctgaacttatccggcttttgttatggcgcggaccacccggactgccggggcacagcctttctccgggccgcgacaaaatactcaggaggaatgataaaatgggacgaccgcgcagcttgacggaggggaacatcttcagctctctgatccgttttgccgttccggttctcttcacactgttcctgcaggcgctctacggcggcgtggacctgctggtggtgggccagtttgcccagacggcggacgtctccggcgtagccaccggcagcatgctgctccagactgtcaccatggttgtcaccggcctgtccatggggatcaccattctggtgggggagcggatcggccggcgggagccggaggatgcgggccgcgccatcggcggcggcatctgcctgttcgcctgcttcgccgtcctgctcactgccgtcctggtgggtggagccgaggtactggcccggctcatgcacgcgcctgagcacgcgttccatcagacggtgctgtacatccgcatctgcggggccggctccctctttattgtggcctacaacgtcctgggctccattttccgggggatcggcgactccaggacccctctgctcaccgttgccatcgcctgcgtcatcaatatcttcggggacctgctcctggtggccgggttccacatgggggccgccggggccgccctggccaccgtggccgcccagaccgtcagcgtgcttgtctccctgttcctgatccgcctgcgccgccggtctctgcccttcgctttctcccggcgacacctgcgcttccaccgggacattatcggcgctgagctgcggctgggcacaccggtggcccttcaggagctgctggtggggacctccttcctgctcatccaggccatcgtcaactccttcggcgtggcggcctccgccggcgtgggggtggcggaaaaggtgtgcgtcttcattatgctggtcccctccgcctatatgcagtccatgtcctcctttgtggcccagaacatgggggcgggcaacccgatccgggcgaaaaaggccctgaagtatggcatcctcacctctgtggcggccggcctggtgatggccctgctcaccttcttccacggtgaccttctctccgccatcttctcccccgacccggaggtcgtggcggcctcccacagctatctgaaggcctatgccatcgactgcatgctcactccctttctcttctgcttcaccggctactacaatggctgtgaaaagaccctgttcgtcatgatccagggtatcataggtgccttcttcgtccgcatccctgtagcctatctcatgagccgcatggcgggggccaccctcttccagatcggtctgagcactcctgcctcctctgtggtccagatcctgctctgtctgtccatgttcctctttctggagcgccgctccgctggacagagccatgcttctttgaaaggaagtgccgatccatgaaaatcattaccgtcagccgggagttcggcagcggcggccgggagctgggcaagcggctgtccgactgcctgggctggccctactacgaccgcgagatcatctccgccgttgcccggaggaatgcactggacgagggctatgtggaggatgcactggagcagggcgactttcgcggcgtcccactgaccatcggccgcacctttgcctatctcccctccatgccccatgactcccggcagctgcttcaggagcagcgccgcgtcctccgggccctggccgcccacggggactgcatcattgtgggccgcaacgcggacctgatcctggcggagcaccgccccctgaagctgttcgtctacgccgatttggagtccaggctccggcggtgccgggagcgcagctccgacgacgagcgtttcactctccgagagctggagcggaagctccggcaggtggaccagcaccgggcccggcaccacgccatgctctccgacctgccctgggggagccgggaggggtatcacctgtgcgtgaacaccaccggcctgtccctgaagacgctggcccccctggtggcggagtatgcccgctcctggttctcccatcaggggaccccctgacccgcggccgaaaaagagactgtcgaaaaagtctcaggctgcaagtgtttcccctgacgcacatgccgccggggaaaacaggtcagaacttgattcgcgcctgcgggcgcgaactacgcgagtctttttccacaagctgagcgccccggacgcctgaaaaggcgtccggggcgcttttcccatcaccgcgtcagctgcggatcaggcagatgctcatcgcgctgatctggggcgggatactggcggtcatcacaccgttataggtgatgaacacctgattgcctacggcaaaacagcccgcgatggacgtattcacaaggacctgctgggatgtgctctggtcttggaccaggagctgaccgttccccacctggaggacggtggcttgcatcgttgtcaaaaggatcacctcacatcaagtggatgcacccccattatatgccggagccgggcgggtgtgcctcccggggcccgccaggagatcctggggcaaggtgtacggcaccgggcaactgagagggccgtcccgccacacttagggggatatccccggccgcatggcggcacaacagttcagagaggagagaacacaatgagcttgtatccaaacaagatccaggtggacggcgttccctgcgggctgatcctgcggggaagcgccaacgggacctatctggccgtctttgagcgggagatggcggagctggcccgtatcgagcagatcgactggtcccgccccgccgttgtgggggaaagcccgctgcccgcagggtatggctttcaggtccgggacatccggtacgcccacgctacccgcagctacacggtgcttctccagacagcggagcagtatctgggggatatggccggcttccaggcccagttgggggagctggaggatactcttcaggagaagcaggcgctcctccaagagcaggagtcgatgatcgcggcgcttgagcaggcaggcagcgccgcccagctgcgctcagagctggaggatgcctatcagaagggggtggagctctgtggctgacatcgtgaccctggccctggaggagctggaacaccggggcggggcagacgccctggccctggcagggcggtctgtgtccggcgaggccgacggcaccgccctgatcgcggaggagcaggccatccccacctggcgcccccgctcctatctcacggaagagactccggtgggcaagccctaccggtggaacggacaggtctaccgcctctggcagcagcacgacgccaccggtcagccgggctggagcccggacttggctttctccctgtgggacatctgccacaccacggaccccgcccgggccaaggactacctcccgcctcagggcagtcggggactgtggcagacgggagagtgctgtgtgttcggcggacgcgtctggcgttcccgtcaggataggaacgcgtacagtcctggcgaactgccggcaagctgggaggatctaggctccgtccaagggagctccttctcctgacaggctgttccgatcctattttctctcgtaccttatcgatcgactgggcgccgtcgcaggacggcgcccagtcgtttttattttaaatcgcgaattttatcttccattttattcttttttatttttatttttccattttttctttgcgttttttcggaaagcgcggctttcagacaggccatgcttgacgtctt

SEQ ID NO: 13591 - DNA, 22500 bp, Unknown
  gut microbiota DNA sequence
ggccgggacttttttaaaaaattttgtactcccctggacaaaggggggctcccgagggtctaataggcagaaaggggggagcagcgtgaacgaccaggagtactggcagggggtggaacagtgccgggaacggctgtggcgcatcgcgcggatgtggctgtccgatgacagcgcggccatggacgtggtggacgaggcggtgttccggggctggagggcctgcgggagactgcgccacccggaatatttcaccacctggctcacccgcatcctgctcaacgagtgcagccgggagaaaaaacggcaggaccgggaacaggcggtggaccagctgccggagcaggcctgggaggacccggaccacctgcctctgagggcggcggtccaggcactgccggagcagctgagagcagtgatccttctgcgctatttcttcgactgtactttgcgggagacggcagagctgctgcggatgccgaggagcacggtccacacacgggagaaaaaggcgctgaagctgttgaagctggaattgagtgaggaggtctgaagatggagcgcatggaggaataccagagaatgcgggaagaggaggccggccggcccgtcccggcggagctggcctgcctggagaccagggtcagggcccgggcggcggagcggccgaggaggagaagaggaccggtcctggcggctgtatgcctgtgtctggtcctggggaccggcatggcctggggcatgggcggtttcgccgcgctggaccggctgctgggggaaaacgcgggacagttgatccccttctatcaggaggtgggagagacggtccgcctggaggacgggatggtggagatccagggcgtcacctttaccagccacagctgtaccgtggtctaccggctgaccgccccaaacggagaagaggcggcggaaacgcctcccttctactggaagctgatccagggagaggcgggcccgaaggagtcccccttctcctcctttgtggagcccagccggaatgggcaggatctgggaggaaacctcggctgggaggaagtgctggagggagagaagcgggggagcacctatcaggtctttaccgtcagcgtggaggaggacatgagtcaggtggaagaccccaagctccttctctacttttccagggcggtggacggggtcccctctgccgatgacgtgcccggcggcactctgctgactatcccggcggaggaggtgctggaggagcgggtggtccgggtaccgggggacggggagatccggcaggtgagagtcagcccggcgctgatctccgcccagacggctgtgcctgccgagggaaatcccgtcaacctcgaagtgctccgggaggccccggagatccggctgctctaccgggatgggacggcctgggagctggagcaggagcatgtctttcagaaagaaggacggcccgactactgtgccaacgcgggagaggacggtctgctgatcctgaactggttcctgcgggaagcccccccggatctggaggatctggaggcggtggaggtgaacgggatccggtgtcccgtcgagtaggcgcagaaatgccgcgccgcgtacaggaaagctgtacgcggcgcggtgttttatcgtttcagggtggacaggcgcccggctcacttgccaggcttgaagctgtccttcagggagaccgcccggttgaacaccagagcgccgggcttggaatctttgctgtccacgcagaagtaacccagccggaggaactggtagtgggcgggggcctgggcatcggccagagaggcctccagtttgcagccctccagcacctccagggagttggggttcaggcagtccaggaagttcttatccccggcgtccgggtcggggtcggtgaacaggttgtcgtacaggcgtacctgggcgtccacggcggtggcggcgtccacccagtgtagggtggcccctttcaccttgcggccgtcggcggggtctccgccccgggagagtggatcatactccgccagcacttccaccacgttgcccgcctcgtccttgacgcagccggtgcaggtgatgaggtaggcccccttcaggcggcactcaggcccgccggggaagagacgcttgtacttggggaccggggtctccagaaagtcatcggactccagatacaggtgacgggagaaggagactgtgcgggtgccggcgccgggatcgttggggttgttctccacctccagggtctcgctctgaccctcggggtagtttgtgatggtcagcttgatgggatggagcaccgccatggcccgctgggcatgctcgttcagatcctcccgcaggcagtgttccaaaaaggcatactccacggtggaggtggccttcgccacgccgatgcggtcgcagaaattgcggatggagacgggggtatagccccgtcggcgcaggccgcacagggtgggcatgcgggggtcgtcccaaccggagacgtagtcctcctccaccagcttgcgcagcttccgcttggacatgactgtatagttgatgcccaggcgggcaaactcgatctgccggggcttgctggggacgtcggtgttttggatgacccagtcgtacagggggcggtgagcctcatactccagggagcacagggagtgggtgatgccctccagggcatcctggatggggtgggcgaagtcgtacatggggaagatgcaccacttggtgccctggcggtggtgctcgatgtagcggatgcggtagagcaccgggtcccgcatgttgaagttgccgctctccaggtcgatcttggcccgcagggtgtacctgccctcggggaactcgccgttcttcatccgctcaaacaggtccagagactcctcgatggggcggtcacgccagggggagcgggcgggggtggtcacatcgccccggtactcccggaactgctcgggggtgagctcacaaacataggccaggcccttcttgattaggcccacagccagctcgtaagtcttttcaaagtaatcggagccatagaagaaccggtcgccccagtcgaagcccagccagtggatatcctcctggatggcgtccacgtactcggtgtcctccttggccgggttggtgtcatccatgcgcaggttgcagatgccgccaaacttctcggcagagccgaagtcgatgataagcgccttgcagtggccgatgtggagatagccgttgggctcgggcgggaaacgggtgtggacctgcatcccggcaaagcggccgccgggggcgatgtcctccgcgataaattcatggatgaaattctggctgggggcggggccttccctgctctgagtggaaataatggtttcgtcggacatatcgggtcctcctcttgcgtaaacttaactctaattttataccatatttcagaggaataatcaaccgattcccacgtaaatgggagaaaaccgggggaacatacagaaaagaggggaagagaggagacagctccgttcagttcggagaaaagcgggcgggaccggcctggcgcgccgcggaaaagcgttgcctttttgacaaaaggcaggtataataaaacaaaccagaacacaggtccgggagagcacccggaggcggagaggaggcgcggccttgaactacgatgtgctggtagtgggcagcggcccggcgggcctggcggcggctgtggccgcccggggacgggacaagagcgtcctggtggtgggcaatccctggcaggagagccccctggcccgggcggagcggatcgacaactatctggggctgcccggggtcaacggacgggaactgatggagcacttcagcgcccatgcccagcgggtgggggtggagttccacaccggccgggtggtggcggtgatggcctgggaggggtttgccctcacggcgggcagcgaggtgttccaggggcgcactctggtgctggcgccaggggtggcccggctggccaagtacccgggggaggcggagctgctgggccggggggtgagctattgcgccacctgcgacgggatgctctaccggggccgggcggtcacagtggtgggccggagcaaggacgccccccaggaggccaactacctgaaaagcttgggctgtcaggtggtctatgtctccccccaggagcccaaagggctggaccgggagatcccattcgtccgggccggaaagctggaggtgcgggggaccgaccgagtgagcgccctggtggccgacggcgcggagctgccctgcgagggggtgttcatccttcgggacgccctggcccccaccgatctgctccctgatctggagctgaggaacggggccattgcggtggaccgggagatggccaccagcctgcccggcgtgttcgctgcgggggactgcaccggcggccctctccaggtggccaaggcggtgggcgagggccacaccgcgggcctgagcgcggcggagtatgtggaccggaaacgcaatgaacaccaatgagacagaagggaaggatcaaaaatgtcattgaagcattttaccagagagacctttgagaaggaactgaacggcggcgcgctgatgctggtggatttctgggcggagtggtgcggcccctgccgtatgctgggcccagtgatcgagggactggccgacgagtatgagggccgggccgtcattggcaaggtgaacgtggacgaggagggggagctggccatgcgctatggcgtgatgaacatccccaccgtgatcctcttcaagaacggcagggagatcgaccgcaaggtgggcgtgatgcccggcgcggtgttcacccaggcgctggacgagaatctgtaaaagccaaagcgggccccgcaccaccggtgcggggcccgcttttattcatgcatccggggaggcgaggagcaggtccagctcctcaagggtgtcgttgggcagaagggccaggaggcggatcacctgcccgtcctcaccggcgagggccaggacatggtaggcgttttcgtgatacgggatcagagaaaagcggaagaccgccccgtcccggccggtcagagacagggcgcgggcacgctccaggtcgtaccactggtccagcgttccctgggactgataggccagccactctgacagccagagggaggagtcctgaaagtcccgctggaacaggcgctccatctcccgggcgaaggcggggtctgaccgccggacctggccgcggacccacgcctggggggcctggatggcggcgcggatctgttcggcctgggcctcttcatagtccagctgcgcgccccgaaggccgtccagggcccggacttgggcggcgggcagctgccagcaggagcgggcgccgtccgccccctggaaggagaccgggcggacgtcctcctccccggagggggcgtggatggtgaaggtgcccagctgctcctccccccgccaggcggtgagataggacgccggcgcgggcagctcctggggagcgggggagagcgggaccatagagcccaggatctcccgcacctgtgtcaggacctccgggctgttcaggcaggggggcggggtggaggagagggtaaggtgcacaaagaagtcggcctcctccgccgtctgggcgggggcggcgggggcactcctgccgccggacaggcgggggaggagcagggggagcgccaggaggcacagcagagcggcggccggccagagccggcggcggggcggaaattttttcatggggcacctcccggcaggtatatttgaggggcctggaacatagacttgggataccattgtatcccagaacggggaaaaagacaagctcagggagggcggaggcatgggccggggcaattctgtaaccaaattttcatcttctcgtaacgaattcgataggatatctccgccggaagatgctatactgaatacacaacaaggaagggaggttccctcaatgaagaaatggatgatcgcgctgatgatggccgcactcctgatcgtacccatgggcggtatcgcctatgccgtcggagagggagcgcccgccgccccggctgccggggaattcatacccggcgacgtgcccgcccagagcggcaccatggatgccatggtggcccctgtcaacgccctggtgatgtgcatggtggaacagggtctggcctacaacgaccaggatgacgtgttcctgtggaacagcctgtactatatgctcagcctgtgcggccagatggacgagcgggcggagctcaccgatgacatgctgatcctgcccgcggagacggtggccgactacgccggcgctctgttctccaacttcgacggactgcccgccctgccccgggagatgaacggccgggtgagctatgactggcagaacgacaccttccgtctggcccggggcgacgccggactgaccgagacccgcctgggtgagatcaccgagctgggcggcggccgtgtccaggtggccggagccctggtgagcctggaggatgagtcggtgctgtgcagcttcacggtggacctggtccgcaacaacagcatgtttggctatgcgatctccggattggatatcctctgatatgcccctcagcccagaaacgcgccgcagctgcggcgcgtttctggctgtccgccccaggctttttcccgggacggaggtatgaaatggggaggatctgcctatattggaagagataccttgctattttggggagcgcatattataataggccctgttcgcggcggagacgccgcaggatcttgaaaaactggggagaggtgcttgaaacatgaccctggagatacatgactatattcagcccgggcggaccgcccatctggtggggataggaggggtgtccatgtccccgctggcagaggtgctccacggggcgggggtgcgcatcaccggctccgacgcccacgagagcggggcggtggagcacctgcgggcgctgggggtcccggtgaccatcggccacctgccggagagcgtggagggggcggactgcgtcatccgcaccgccgccgtccatgatgacaacccggagatcgccgccgcccgccggctgggcatccccgtcttcgagcgggcccaggcgtggggagccatcatgcggcactaccacaacgccctgtgtgtggcggggacccacggaaagaccaccaccacctctatgtgcacccacatctttctggccgcagggctggaccccactgtgatgatcggcggcaccctgcccgccatcggctccggctaccgggtgggcaagggggagaccatcatcctggagtcctgtgagtactgcaactccttcctctccttcttccccaccgtggcggtgatcctgaatgtggatgcggaccacctggatttcttcaaggacctggaggacgtggagcactccttccgccgcttcgctgagctggtgccggcagacaccggtgtagtggtggccgaccgggacgaccagaacaccatggagaccctggccgggctggagcgtccgctgatcaccttcggcctggaggagggggacgtccacgccgccgggctggagtgggtgaacggcttccccagctttgacatcgtcttccggggggagaaggtgacccgggtggagctccaggtgccgggggagcacaacgtgcgcaacgccctggccgccgccgccgccgcgctggccctgcgggtgccggtgcggggcatccgggaggggctgggcgccttccggggagcgggccgccgctttgagcacaaggggacataccggggggcgcaggtctatgacgactacgcccaccaccctgaggagctgcgggccctgctgaccatggcccagagcctgggatatgggcgggtgatctgcgcttttcagccccatacctattccaggacccacgagctgttttccgattttgtggaggtgctgaagctgccggaccaggtgctcctggcggagatcttcgcggcgcgggagcagaacgagctgggcatctcctcccgggacctggcagaacagatccccggcgcggagttctgccccggtgtggagcaggtggcggaacggctggcccagctggcccagccgggggacctgattttgaccgtgggagcgggagatatcttccgagccggagagctgctgctggccggacaagagaagggcccggccggaaactgaaaaagaagtttgcaggggcgcaccatgtgcgcccctgctgctgtgatgcggcccggcggaaagccgcccccacatccgtcgcggcatgcgccgtatcaccttccccgggagaaggcttttgggagcgatctctgctggaagaggcggaggatagaatgatccccacaggagcggcggggcccctgtggggatcgctgtctatttcaaactgcgcggttcagggggtctcttcctgtatcggcgttgggatggaagcggggcagcggccgttccggacaatctggacggtgtaggcgataagcatttcgtagatctggagcgccaggggggatagcttggagacgggggtgaattctttggcataagccaggtcaaaggtcagatccttctcaagagagagcttcgaaagcgactttctgaccatcctggacagctgaagaggggtgtgagagccgccgaggtggatggaggcccgcagcatagctgaaaagaggaactcgtccatccggttcagatcgatcggctcgatggcgggatcagtcaaggtaaagttggtttgactatctgacattaaaatcacctcgtcaccattataatctgtttttccgataataacaacgggaattctccatataatctgtttaccagataaaaatggaggtatcccccgtgagagtcaggagggactatggagataagaattgtattggaagaaatgtggtttcgcttcgcaaggaaaagaacataaaacagaaaatactgttggcgcagctccaactgaaggggatcgacatcgggcagtccagcctctccgccctggagggtcagcgccgggaggccagtgaccgggaggtgctggctctctcccaaatctttcaggtgcccatggagcggctgttccagccgcatgaggagtgagtcccatttcagagggggcggcatcccaccggatgccgccccttcggcccagggaaggccgggttttcggttgacctgccccacggattacggtacaataggagttaactgtgaaactgaagaaccgaggacagagagatatgctggatcaagaacaggaactgagattttccaaggcccgccggggggccatcgcccgggagttcgcccatctgaacccggagcagcagagggcggtgctggccaccgaggggccgctgctgctgctggccggggctggcagtggaaagaccaccgtgctcatccaccgcatcgccaacctgatgaaatacggccggggctccgacagcccggaggtgccggagcgggtgacggaggatgacctgcgcttcctggaggagtatgctgcctccggcgcgggagacagggcacggcaggaggcactgtgccgcctggagcccgccgccccctggaccatcctggccatcaccttcaccaacaaggctgccggtgagctgaaggagcggctggagcggatgctgggcccagccgccaatgacatctgggcctccaccttccactccgcctgtgtgcgcatcctgcgccgggacatcgagaagctgggcttctcctcctcctttaccatctatgacaccgacgactccctgcgggtggtgaaggactgcctgaaggacctgaatatcgacgaaaagcagttcccgccccggtccgtgctgggctacatctcccgggccaaagacgctatgaagctggcggaggagtatctggccgactgcgagcgggcgggggatttccgcctgaccaagatcgccaaggtgtacgtggagtaccagcgccggctgtgggaggccagcgccctggactttgacgacatcatcctccacacggtccgcctgctccagcagcacgaggacgtgcgggccttctatcagcggaaattccgctatgtgctcatcgacgagtatcaggacaccaacaatctccagtatctgctggcctccactctggcggggggatatgagaacttctgcgtggtaggggacgatgaccagtccatctaccgcttccggggagccaccatcgagaacatcctctcctttgaggagcagtacaagggctgccgggtcatccggctggaggagaactaccgctccacccgccacatcctggaggcatccaacgccgtcatccgcaacaaccagggccgcaagggcaaggaactgtggacccgggcgggggagggggagaagctccagctctacaccgccatgaacgaaaatgacgaggcccagtatgtggccgcccgtatcctggaggattacagccagggccggcactggaaggaccacgccgtcctctaccggatgaacgcccagtccaaccaggtggagcaggcgttcaagcgcaacggcatcccctaccgcatcatcgggggcacccgcttcttcgaccgggcggaggtcaaggacatgatcgcctatctggcggtgctgaacaacccggaggacgacctgcgcctcactaggatcatcaacaaccctccccgtggcatcggggccaagacggtggagaccgcccaggagatcgcccggcgggagggggtgtccctctttgccgtcatcgacaacgcgcggatgtaccccgaactggaccgggcggcggctaagctggcccagttctccggaatgatgggggagctggcccagcaggcccagaccatgcccctgcccgacttctatgaggagctcatcgcccgcaccggttacgccgtgatgctggagagcaagaacaccgtggaggaccggacccgtctggaaaacgtgcgggagctgctcacctccatcaacggctatctggagaatgcgggggaggagccctccctggcgggcttcctggatgagatcgccctgtacaccgacctggacagccacgacccagatcaggactgcgtggtgatgatgaccatgcactcggccaaggggctggagttcccggtggtctttgtggtgggggccgaggagggcatcttccccggtatccgggccatcggagagacggaggagatggaggaggagcgccgcctgtgctacgtggccatgacccgtgccaaggagaagctgtacctcacctgcgccaatcagcgcatgctgttcggccgcaccagctccaaccgtcccagccgctttgtggacgagatccccacggagcatctggagcgctccggccgcaccttcctggacccgggcgtgggggactgggggggcatccccagccgcacctccgggtacgggggataccagcggggggagcagagctacggcggctacgcggcccgggggagcgaggcgccccagcggcccgctccgccttcctacggcggtttcacccgggccatgggggggcgcaccggcggcgtctatcccgccgcgcccgcggccggccgtccccagcgccccctgggctgccgcccggctgccgccgcagtaccagcggcgctgcccaccttccagaagggggacatggtgcgccacaaggcattcggacaggggatgatcctgtccgtgcagaagatggggggcgatgccctggtggagatcgcctttgacaacgtgggcaccaagcggctgatgctcaaatccgctgccgcccacatggagaagatatgaggaggagcggctgtggaccgaaataaaaggacggccaggacgctgacggcggcgctctgcctggcccttctggctggatgcggcgcggaaacggccggggagagcctggatgccgatgagatgcacccgggatggagcaccgtgaccaccgatccctccgcctacggcatcacctatcaggagctggaggatctgagcggcatgcccctggaccagctgacggcctactgcctgggggcggacggggtctacggggagaacggctttgaccagctgtaccaccggttcctggaggccccggataccgtgctgtcctacctagctttgatcgacagccgggaggagcgggagctgttgtgcacacacttggcttccgctgatgtgtcctggtacggcgggaccgaggcgtttggagcgattttggaccgcctggccggagagagcgggaccagtggggagctggcggagctgatccagacagagtggaaatctttgcaataaacagaaatagctgcgcgccctcccgaaaggagggcgcgcagccgttttttggataagggcccgtgggcatccatgtcacacagacagagagacggaggggacggcctgctggggcgcggcggcggggatgggcttcgtcccggcgtgagcggtgtgcagcagcagcaccccggcgccggccagcaggatctgggtcagggggacggacagccagaccccggacagccccagcccagtgcggggcaggatcagggagagggccaccagcacaacgggctggccgtagatcagcaggtcggcccgggtgatctgctcggtggcgcagaagtaggaggtcaggatgcgcactaccgacatgaacgggagatagagcaggaacaggggcaggatcacctggaacagccgggtagcggcattggatgccccaaacaggtgggggatggcggaccgccccagaaagagggcgatgccgcagagcagggcggcggcgggggcggaacggaaggtcagtgtacggacctgagccagcgcctcctgttctccggcgccgtaataccggctgagaaggggctgcgccccgtccccgatgccctggatgatgaagtggaccatgcagatggcgtagctcatgaccgcatagcaggccaccgccagggagccgccgtaggccagcgctccccggttgatgaccaccagcgtgaccgtgttcagcatggtcaggccgaagggggacagggaggtggcaagcaggcggagaacggtcctccggttcagacggaagctcaccccccggaacacccgcttcacccggaacagatagaccagccccagggcggcggacaccccctgggcgatgacggtggcagcggcggccccggcggtgccccagcggaagacggagatgaacagagcatccagcaccacattggtgaggaagccggcggtcatggagcacatggcggcgtccgccccatcataggtgcgcagcagggggaccagcccggtgcccagcacctggaagagcgagcccagcacgatgacccgggtgtagctgtcagcataggccaggacggagccctccgcgcccagcagagggagcagggggcggtagagcagggcgagcagggcggtagacagcacgccggccagcaggagcagcacggcagtggagcccagggcgcggtgctcctccgcggcgtcccggcggccgatgcacacggacagcaccacggcggcggccatgcccagcccggtgcctagggcctggaccagggcggtgaccggccaggccacattgatggcggccagcccggcatcgcccacgccctggcccacgaacatcccgtccacgatggagtagacgccggagaaggcaaaggcgatgacggaggggagcacattgcgccagaaatttctttggatcatgagaggggcctcctcaggctccgaaagaccggagcagatgtgatcagaaagagggagcggcctcgggcattttcacaaaaataagggtctttctttgtctaaaacagaaagtgcccgattccgaactatatatatagtgcggaatcgggcaaaagtcaagaaacatcttaacaaaacattaacacattttcaggggcaggaaagagcaaaattatggaatctgccagagggtgggagaggcatccgcaaatcgctccaggcgatggtggcacagggcctccatctccccccagcggggggcaaaaagggggtcaaagacccctaccacagtgaagccagcctgtctggccgcagcacagtagctgggagaatcttcgaagaggaggcaggactggggagggacgcccgaccgttccgccgccagacagtagagagccgggtcccgcttttctattcccagctcagcggtggtgtagacggcctcaaagcagtccagaaggcggtggtgctccagggcggcgcggcacaggggaggcatgcaggaggtgagcaccgccatccgtgtcccccggcggcggcaggcgtccagaaaggcgggcacgccgggcttcaggggcagagtgtgagcataggcggagcgggccatggacatccagccctccatgatctcctccggcgtctccgggagggagaagcgctccctggtgtaccgggccgcgtcgggagcgctgtggtgggtgacgtagtcggtgtagtcctcaggcaccggcgagatgccccgccggcccagaaattcaatgtcgatgtccagccagatcccgttggagtccagcagggtgccgtccagatcaaaaaagtacatggcgggacctccgtgcaggatgggggcctcctgcctggggcggggccagcccccgggttgcggccgggacggttttctggtataatagctccgtttttgacagaccggcccggcatgcttctttcctatcataccacgccgggggagactagttcaagatgggaagtgaagccatgtctccgcatgtgatgaaaaaactggccaagcccatgctgttcgcggcagccattatctggggaacctccttctttgtaatgaagaacgccctggacgtgatcccggtgttctacctgctggcaatccgctttactgcgggcgcggtcctgctggcggcggtctgctggaagaagtgggcgggctttacctgggactatctgtggcgtggggcggtgataggggctttcctgttcctggcctattcggtccagacttttggactggaccggaccacaccctccaaaaatgcatttttgacggcggtgtactgcgtgatcgtcccctttctctactgggcagccgcccggcggcgcccggaccggtacaacatcctggccgccctgctctgtgtcaccggagtgggactggtctctctggacggggacctgtctgtcaacgcaggggacgtgctcaccctgatctgcgctttcttttacgctgcccacatcgtggcggtggccaaagtgtccccggagaaggacatctacctgctcaccgtattccagtttgcctttgcggcgctgtatgcctgggcagggggagcgctgttcgagaacttccccgctcaggcgttcctggccccggcggtctgcctgcctatggcctacctgtgcgttatggccaccactgtggccctgctcttccaaaacgtggggcaggtgtggtcggacccggcctccgcgtcggtgatcctctccctggaatcggtgttcggcgtcatcagctcggtcctcttctacggggatctggtcactctccccatggcggtgggctttgcctgcatctttgtggcggtggtgtgctctgagacgaagttctctttcctgaccgccgggaggcagaaagaacgccgctgacgggcggaaagggcttccaacattttcagacgagaaaagaggattgcgcttttgaaaaaaagcgtgtagaatcaaatcgaggacaagagggagaagggaacgggccgccccggcggggcgcgcgacaagaagaaggaagtggacctgatgaaaagaaaatggttgtccgcactgctgagcggggccctggcggccgctttgacggccgcgccagtctccgcggcgtcggtatttacaggcgagaccgtggatgagtgggcggtggagcgggtggagtccgccatccggctggagctgatgccggagtgcctggagggacaggacctgagggcggagatgacacgggcggaatttgctgccctgaccgtgaagctgtatgaggctatgagcgggaagctggcggaggtgccgaagcagaatcccttccgggacacccaggacccggaggtgctgaaggcctatgggctggggttcgtgacggggctgacggaggacactttcggcggcgaggagccggtgacccgagaacaggcggcggtgatgctgactgtggtgtaccagtatcggaacgaggacaacagaaaggcattcctgctgtgggtggcgctgtacggcagggacaacgacctgaacgatgactccaacctcacggagcagcaggcgtcgaatatgctggccggtatctaccataagctggatactgtcatcagctcggtgggggccaaggagttcgcggacgacggcgagatctctgactgggcgaagaacagcgtctattttatggagaagaacgggatcatcaccggcgtaggcggggaccggttcgatccccaggcggatatccaggcccaggccgccctggtcatgtcggtccagatgctccaaaagctggggtgagtgggacccccagaaaaaaggcagcaaaaagagaggcgctcagcgcctctctttttgctgcctgccgggcaatggtcaggaggaccggcgaagcgatttactggacctggtactggatcacatgccagtaggaggcgtattccccctggcccagatcgcggacaaaccgcagcgccaccttcagggaatcgccctgaaagtcctgggcagtatcgatcttgatgtagacctggtttccgtccagggtattttcattataaagggagttgtttacattggggccgccgccattggccagggagacggtggcggggcggaggagaggtgtctcgctggcttcgtgtgtcagctggatgtcagtgacgcttccctccaaaacagcccactctacatcccactcctgatcaaaggcgtcccagtcatcgccgtagccgccggtgtagccttggacagtgacagcgacggagtcacccgcctgaatggtgacaacaggggtgtcctgtgtggcatcatcataggaggtggcagtctcgtccccgatacggaccttgctcagccaggtctttccagtgccgccctctccctggaccagagcgttggcaccggccatcacctggtcccaggtggcgttgtcggcgggctcggtccaggaggaatagggattggcctcagcccagccctccacagaggaaaggacctgaacgccggcccagtcatagtccgcaggagtcccctctgtggtgacagtgggggaggcggtgcaggggacgcctttgacctgatcgaagagccactccatgtaggaggtagggaccgaatcagagaacatgtccgatttgcagtggcctccctgctggatctccaggacaagattggtcatgcccaggctggtcagggtattgaaggcgcggtaggcctcgttcaccgggatgtaggggtcctcatagccgtgccagatgtagacattgacgccagaatccgcaatggcctgcatgtcgcactgatttccccaggtggtgtggacggtagtgccggcgttgatgagaatggcagccagcagctcgggctggacggaggtcagctcatagctccagcctgcgccctgagacatacccgtggcgtagatacgatccatgtcgacgttgccgtagctttccgcaatggcccggatgatctcaccgaactgatagatataggccagctccgcctcatagttgacgcaggcctcataggggacggtgatattcaggacataacaggggtgctctgcctgaaatgcgtcggaggcaaaggcggagccgttggaggcgtagccattgttggcgaaggaattggtgctgcccagcccgcccagggtagccacgagagggtagtcctctccctcctgaatatgttccgggacgtacaggcggaaacggagcaggcccaggccatcgccggcggtgcccacggtgtccatggcggggtcgatctggaatgtccaagtgtaccagtcaaaaccggactggagagcggtctcaccagcagcaaaggaggcgcggttttctgtgtctaccgagagggcaggataagcttggcggtccagcgatgcggtgcgggcggccccgtcccagctcacttggtacccgaaagtctcagccagatggtagagggggatatagagctggccgttctgaagggcagctgtggtatcccctgccgcagtaccggcgctataggtctgagaacggccgcacagcgagaaggcagcgctgtcgccgtcagctgtacagtctaggcccagcgcctctgcgatggtgacagggaccatggtgcgggagtctgcgttgatgtaggcggaggtgtccactgtgcctccatctacctgcacagcgggagctgagacggcgctggcggggggcaccatgccggcggagagcgcggcggtcagagacagtgcggcaagcttgcggaagagtttcatgttctttctccttcctttcctgatttgagatgctgatcccctatggaaggccgtggtccagccaaagagatgcatgcatctggtgctttgatcctatcacgaaagaaaaacgaggtcaaggacaggatgttgcattttggtgtgttattttatgagaaagggtacggcataaaaaattccgtccgcgtttgccgcggacggaaagcgaagaggggacggtcagccgcccagataggcttttttcactgcctcgtcctccagcagctcctcgccggagccggtggtgacgatcttgcctgtctccagcacatagccccggtgggccacagacagggccatctgggcattctgctccaccaggaggatagtggtgccgtgctggttcagctcctggatgatgtcgaagatctgctccaccaggattggggccagacccatggagggctcgtccagcatcagcaggcggggcttggacatcagggcgcggcccatggccagcatctgctgttcgccgccggacagggtgcccgccacctgtcggcggcgctccttcagccgggggaagcgctggtacacatccgcgatgccgtcatcaaactcagaagaggggcgggtgaaggctcccatctccaggttttcctccacagacatctggaggaagatctgccggccctccggcaccagagccaggcccttggtgatgatcttatgggccggggtgccccccaggcgctggcccaggaactcgatggagccggtatgggaggtgagcagacctgcgatggtcttcaggatggtggactttccggcaccgttggcgccgatgagggtgactacctccccctcatttacctgaaaggagacgtctttgatggcatggatggcgccgtaatagacgttgatgccctctaccttcagcatggcgtccatatcaggcccctcctttctttttctgactgcccagataggcctcgatgacctttggattggcctggatgtcctccgcggtgcccttggcgatgatctgtccgaagttgaggacacagatgccctcgcagatgcccatgaccaggttcatgtcgtgctcgatgagcataacggcgatctggaaggtgtcccggatcttgacgatgttctccatcagctcggcggtctcggaggggttcatgccggcggcgggctcgtccagcagaagcagggaggggttggtggccagggcccggacgatctccaggcggcgctgtgcgccgtaaggcagggagccggcctggtggtgggccaggtcctgcatgtcgaagatggagagcagctccatggcgctctctcgggccagcttctcctgcttccagaacttggggaggcggagcacgccgtcccacatggggtagcggatctggttgtgcaggccgatcttcacgttgtcctccacactcaggttggaaaacaggcggatgttctggaaggtgcgggcgatgccggcccggttgacttgggcagtgctcatgccgtgggtgtccttgccattgagcaggatggtgccccgggtgggctgatacaccttggtgagcaggttgaacaccgtggtcttgcccgcgccgttggggccgataaggccggcaatctctgtgcggccgatggtgaggttgaactcattgacagcggtcaggccgccgaagtcgatgcccaggtgctggcactccagaacggggagcttgttcacatcccgctcaggaacgatggagtggctggggacggggaccatcttgcctttcttaaattccttagccattctgagcgcctcctttctcggtgccgcggcccaatatcttccggcgcagggaggagaaaaactccttggagtgctcgttgttggtggccagcatgaccaggatgagcacgatggcgtagatcagcatccggtagtcatagaaatcacgcagcagctcgggcaggacatagagcagggcggcagcaatgaccgagccccggatgttgcccagtccacccagcactacgtagaccaggatcaggatagaggtattgaagtcaaacttcttggcggcgatggaggagtagttcatggcatagagggcgccggcggctccagccagcacggcggaggtgacaaaggccatcagcttgtatttggtggcgctgatgcccacgctctcggcggcgatgcggttgtcccgcagggccatgatggcccggccggaacggctgttcaccaggttgaggaccacgatgagggctaccatcaccagcagaaagcctgcggtgaaggaggagagcttcacgttggccgtgactcccatgggtcccttcaggatggccttgccggtctcagacaggttgagggccgcctcactggaggtggagaagtggaggccgttctcgtctacgcccacatagaggatgttgataatgtttttgatgatctcgccgaaagccagggtgacgatggccagatagtcgccccgcaggcgcaggacggggacgcccacgatgacgccggcgatgccggcaaagaaggcgccgatgagcatggagaccagcaggcgcagggggcccatggggatcagctcctggagggagatggaggccaccacgccggagaaagcacccacgctcataaagccggcgtggcccaggctcagctcgccggagatgcccaccaccaggttcagtgccacagccatggtgacataggcacagatggggaccaactgcccctgaagggagggggagagcatcccgccggcattgagaagctgaaggatcacaaaggcggcagcaacgatacagtaggtgaggagattgccgaaaaggcgcttgcggcggagggaacgtgttttcatatcggtcacctcacactttctcgggcacatacttgcccagcagtccggagggcttgaccagcagcaccacgatcaggacggcaaagaccaccgcgtcggagatgttggtgttgaaggccttggcaaagatctcgatgatgcccagcaggatgccgcccagcatggccccagggatggagccgatgccgccgaagacggcggcggtaaaggccttgatgccgggcagggcgccggtggtgggcatgagggaggggtaggtggagcagagcagcacaccggcgatggctgccagggcggagccgatggcaaaggtcatggagatggtgctgttcacgttgatacccatgagctgggcagccgccttgtcttccgaacaggcccgcatggccttgcccatgcgggtatgtccggtgaaccaggtgagccccagcataatgacgatgcaggcggccaccgtcaccagggccacgtgggtgatggtgagctggccgtccagcagtttgatagagccggtgcccactacggaggagaaggacttgggattggaggtccagagcagcagagcgctgttctggaggaaatagctcacgccgatagcggtgatgagcacggccagggagggcgcctggcgcagcggcttataggccagccgttcgatgaccatgcccaggacggtgcacactaccatggccagcagcacgccggccagagcagggaccacggcgccggccagagagccctcctcaaagctgccggacaggccgctcatggtgaaaaaacagatatatgcccccaccataatgacgtctccgtgggcaaagttcaacattttggcaataccgtagaccatcgtatagcccagggcaatgatggcgtacacgctgcccagactgatgccgttgatgagattgttgagaatactcaagaccagtcacctctttttcttttgctgcgcagatgcgcgcgaaaaactggacagcatggcgaaaacctctgcggcaacgtctgccgcagacgttttcgccatgcgtgcaagaataagggacacgggctgccgaggggaccccggcagcccgttcaatggatttcccgagaaaaaggggagttcggaaaatcagcgg

SEQ ID NO: 13592 - DNA, 439 bp, Unknown
  gut microbiota DNA sequence
agttcaatggtagaatcccagccttccaagctggtcgcgtgggttcgattcccatcacccgctccataagcgcctgtagctcaggtggatagagcaactgccttctaagcagtgggtcaggggttcgagtcccttcaggcgtgccatcgttttctaaagccattcgatatggtgggtgtagttcagttggtagagcatcggattgtggttccgagtgtcgcgggttcgagtcccgtcacccaccccataagcccttaaggcggaagggccggagcgtccgctccggtcctttgcttttagaaccagccagattggggtgtagccaagtggtaaggcacgggactttgactcccgcattcgctggttcgagcccagccatcccagccaaatgactcgttagctcagtcggcagagcaactgccttttaagcagtgggtcc

SEQ ID NO: 13593 - DNA, 17583 bp, Unknown
  gut microbiota DNA sequence
gctggttcatcttccgcttccgggcggcggagaaggccagcttgtccgccagctgacgggtgtccccggactggatgacctggcggtagaggcgaaggttgtcctccaacgtctccagcgcctgggtcagggcgggagcgttcagggagaagagctgggtccacagggggacgtccagggcggccacccgggtgcagccccggaaggagtccccctcgaagccctggtaggcgaacaggctggggtcgtcgcacaccgagacggcgatgatgtgcatcatctggctggtataggcgatgatggcatcgtgctgctccggggtggtgcgcaccacatcggcacagcccaggtgcctggccacccgctccatcagcgcaagatgctccggctgggtcccctcgtccggggtgaggatgtagtgggccccctggaacatgttgggcagggcgtgctgaatgccggaaaattcagtgcctgccatggggtgccctcctagaaaggatacactggagggcagggtccgggcggcatccacgatggcgcccttcacgccgcatacatcagtgaccaggctgccggggcggaagtggtcccgatgctcagagaggaactcctggatgccccggggatgcatgcagaggaacaccagatccgcctgggccagggcctcccgggggtcctcgcagacctgatccacaattccctgctccagggcgtagcgaagggtgggctggctcacatccacccccacccgcttaaaatcttcaaactctttcagccccatagcgatggagccgccgatcaggcccaggccgatgaccgcgatctgtctgctcataaacgatctcctcgattccaaagtgcgtctgtgggaacgatagcactgtaccacggtttggggcgcaaatcaacactttaacacaaaaaagcgttaaatttttattttgcgcaccggtaaacagtcccgtcctggggctggattcccttggcctggaggagctgctccaccgtgacaaagcagtagccctgcccggagagggcatccgcgatctggagagcggcgtccactgagctgtcgtagatgtcgtggagcaggatgatgctgccgtcctccacatggctgaggacggagcccaccacccgcccagtgtcctggtccttccagtcctccgggtctacggaccacaggacaacgggggagccggcccaccggagccccgcatcgtcaatgattccgtagggcgggcggagccagaagtcaccggagcccagcacggcggagaggacgccccgggttctgcccacctggaggtcgaagtccccccgagagaggtcagagatgcagctgtgatcgtaggagtgaacgccgatctggtggccgtcttccgccatgcgccggacaagggcctcctgaccttggatgcggtcgcccaccaggaagaaggtggcctggatctcccggagagccagaccgtccagcaggcgggaggtggtggaggttctggggccgtcgtcaaaggtgagagccaccagggggggctcctccggcaccgtcaccgacacgccgccccctgcctctgcggctggccctgggccgggccggcacagggccgccagaagcagtgcaggcacaaggacccgccagtatttaaaaaattttttcctgcaccacatgatgaccgccgcctttcccatcgcgctcactgttcagtatgtgcgctttttccggcagcttgctcagaaatttctgacagaaaaaatgccctccggccggggccggagggcagggaaagcggatggggcggcagatcagtggttcagcacccgcacccggatcacgccggggatggcgcgcagctcgttggctacctggtcggtgatgcgggtgttcacgtccacgatggtgtaggcgtagtcctttttggatttgttggtcatgttctccacgttgatcccgtcgttggacagggtggacatgatgttggtgagcatggcgggcacgttcttgtggatgaggcagaggcgggagatgccgctccactcctgctccagattgggcaggttcaccgagttgcggatgttgccgttgaccaggtaatcctggagctgacgggcggccatgacggcgcagttctcctcgctctccggggtggaggcgcccagatggggcatggcgatgacgttcttcaccgtggcgatggtgtcgttggggaaatcggtgacatacttggccacccggccggtctccagggcggcgatcatgtcctggtcgcacaccagctcgccccgggccagattcagaatgcggacaccgcctttcatcttggcgatggcgtccccgttgatgaagtccttggtggaactggtgtaggggacgtggatggtgacatagtcagacaccttgtacagctcgttcacgtccttgaccacatggacatggcggtccagccgcagggcggcgtccacagacaggtaggggtcgtagccgtacacgtccatccccaggtccaggccgatgttgcacaccagggcgccgatggcacccaggccgatgacacccagggtcttacggtagagctcagggcccacaaaggcggatttgcctttctccacggcggcggctacatccacatttggagtatgagcctgttcctggacccagtccacgcccccgacgatgtcccgggaggcgatgagcagggcggcgatgaccagctcctttactgcgttggcgttggcaccgggggtattgaagaccacgatgccggactcggagcagcggtcgatgggaatgttgttggtgccggcgcccgcccgggcgatggcacgcagggcatccgggaagacgtagtcgtgcatcttggcgctgcgcaccaggatgccgtcctcgttctccacatcctcccccacctggaagcggctcttgtccagctgatccaggccggcggacgcaatcttgttcatggttttgatgcggtacatatggcaattacctcgaatcctgatttctgatggaaggggcggatcactggggagcgatcacaggcttcccgtccggccccagcagcggggtgagcccagaggcatttccgtcccggtgaaagagatactgcaccccggtgacagtatccacccagatctcggtctggaccagggcaccctgggcgtagatcttgacgaagcggttgttttcttttgcggccatggaagcacccctgtttggtctgcaagcggaagatcgaatgggaacagggcctcagttggccttatcgaaggcccggatgaagtcacagagcttctccacgccttccacagggacggcgttgtagatggaggcccgcatgccgcccactttgcggtgccccttcagattgacgaagccggcttcggccgcctccttgacgaacttggcgtccagctcctcactggcggagcggaaagtgacgttcatatcggagcggaagggcttctcggcggcgcaggtgaacagcttggagctgtcgatgcagtcgtagagcatctgggccttaccgtgcttgatctgctccatgccctcgatgcccccctgctcgtccagccagtccagggtcaggcccagcatgtagatgcaccagcagggcggggtgttgtacatggagtccttgtcgatcatggccttgtagctcatcatcacgggggtgtagggcagctcgtggccggccagatcctcccggatgatgaccacggtcaggccggcgggggccatgttcttctgggcgccggcgtagatgatgccgaacttggagacgtccacggggcgggagaggatgtcagaggacatgtcgcacaccagggggacgctgccggtttcggggacatactgccactcggtaccgtagacggtgttgttggcgcagtaatagaagtagctggcctccgggtccagcttcagctggtcctggctggggatataggtgtggttgcggtcctcggaggaggcggccaggctgatctggccgtacttctgggcctccttgtaggccaggttggagaagttgccggtgacggcgtagtctgccctgcccgtcttgccgatcaggttcagggggatcatggagaactggccggtggcgccggtctggagaaacaggatcttatagttgtccggcaccttcatcaggcggcggagcttggcctgggtctcctcaaagatctgaatgaacacctttgagcggtgactcatctccatcacagacattcctgatccatggtagttggtgatctcggccccggcacgctcaaggacggacaggggaagcatggaaggtcctgcggagaagttgtaaacacgctggtcgctcattttgggagagcccctttcaaattaagatcttgccagctctgctcccgcacaggggaagggaaacaaaaatgacaatgtatccctattatagtgaaggaaaatttctctgtcaatgcccccgtccgtccccaaagaggccttttgggataaaaaagcccgcgttttttggaaaataattttcaaatgcaggatatggggaaaaaagccgcaaaatccggggagagaacgggaaaaaagtgggaaaaatgccgcccctgcatgaaaggctgcagaggcggcatgaagaaatgagatgggtccatgggattatttcacatagggaccgggccctcaggtccgcaggacccactggagcatcaggagcaggcccaggccagggacacccagcacacccaggatcagggcgttgaccaggttcacccccagccccagtccgatctggttcagcagggccagcgctgccagccccacagaggagcgcaccgccagccggagcagcctgcccagcgggcggtggagcaggagcagggcggccagcgccaccataactgccacgccccaggccccggccagggagccggtcatggctgggcctccagctccttgacccggcgcagcagatagttgtaccgggactggagggcattgatctcaaaaacgtaggattcaatgagatctccgtcctccgcactgttgaagccccggtaggcctgctggatcagggcccgggtgtgggccagagaggtcaggagctcctgccgctccacattgtcagcgcgctccagacggcgcagggaaaacatgcgggccgcttccgccatgagattgtcctcctttcggccccggcacaccggggcacggctggtcttgtcccttgtcaatgaaaggtatgatatagtctggtcaaatattccattgattaaacacacataggaggaaaaggaggggagatactaaccccggaccgtgtatcaaacttcctgacctgtgctccagagggcccgatggcgaaaggcgaaaaggagaacggagaacgctggggccgtcccatccgggagggctgaacagccgccggacttttccggcccatcctttttaagccggtgctggaccgcttttgagccgcagaccggggagggcgtgggggaccccgcagaaggcgggccgacccgcaatgccgaagcaccgtccacacagacccagtccctccccgtcccggacggaggagctgacagagtcaaaacggggccgccgggacaccggcggccccctgagactgtcggaaaagtggctttgccgcttttggaagaaagatgcagtctgcaagtgttttgctcggcgcacatgtcgccggggaaaacagatcagaacttgatccgcacctgcgggcgcaagctctgcgaggctttttccacagacagagggggccgccgatatcccggcagtcccctctgctgtttcacaatagtaaaccgagaaaaaataaagttgacaatccggggaagcggtagtaaactattgcagaaaaatggtttacaattgagagaggggataggcgtgaaaaagctggcagtggagatcatctcaggcagaaggctgaaccgccgggacgacctggccgtcttcctgacggcggacctggaggagctgcgggcgggagcggaccagatccggcaggccctgtgcggggaccgggcggacctgtgcaccatcatcaacggccggagcggccggtgcagcgaggactgcaagttctgcgcccagtcctgccactacggcacccaggtggaggagtatcccttcctccccctggagaagatcgtggcggagtgcagacggaacgaggcggggggcgtccaccgcttctctatcgtcaccgccgggcgcagcctgaaggggatggagctggagcaggccctggaggcctacgcccggctgcatcgggagagcgggctgaagctgtgcgcctcccacggcctccagaccgaggaggagttccggcgcatgaaggaggcgggggtggagcgctgccacgccaatctggagacctcccggcgatacttcccacagatgtgcaccacacacacctatgaggacaaggtgaccaacatccaacgggcccgggcggcggggctggaggtgtgctccggcggcatactgggcatgggagagagctgggaggaccgcctggacctggcggtcagcctggcagagctggagatcagctccatcccgctgaacctcctgcggcccatcccgggcacgccctatgaggggatggagcccatttccaacgaggacgtgctgcgcaccgtggcttttttccggtacatcaaccccaccgcatggatcaggatggcggcgggccgggggcagttcctggacggcggagcggagctgttccgctctggggccaacgcggccatcaccggggacatgctcaccaccaccgggaccagcatggcgggggaccgggccatgctgctgggactgggctaccaggtatgagcgacagcggggcaggagaaacgccccaaacgataaggaaaggaaatcagaactatgagccacgaacccatgaccgccggggcggtccagaaaaagagcaagatctacggcctgtccatgaccgcggtgatggcggcggtgacctgtgtcctggcgcccatgtccatccccatcggaccggtgcccatctccttcacaaatctggccatctacctgtctctctatctgctggggtggaagcgggggacagtgagctatctggtctatgtgctgatcggcatggtgggcgtgccggtgttctccggcttcaccggcggcatgggcaggctgctgggccccaccgggggctatatcgtgggcttcatccccatggcactgatcgccggcgtggtcatcgaccgcttccggaaccggggcatccagctggccggcatgatcgcgggcactgcagtgtgctatgccttcggcaccgcctggtactgcttccaggccggttcctccgtgggggctgccctggggctgtgcgtgttccccttcatccccggcgacctggtcaaaatgctgatcgccatggcgctgggccccatgatccgctcccggctggagaaagcgggactgtatcggggatgaccagcttctctcagccgtccggcggggaggcccagaggacggcggcaggccccgcataaaactaaatcatccggacagggcagacagcggcggccgctctcttagaagagagcggccgccgcctccctgtgccggaggttgacaggccagacaaagagaggtacagtgtcagcaggaaaacaaattttggagagaaaggcgggcagacctatgctgcagggaaaggtatatggggtgtatttcagcccaacaggggggacgagagcttatgttacggcgctggccgggttgctctcctgcgaggcggaggagatcgatctgacggcgcgggaggagcgggcgcgggaccatgtctttggcccggaggatctggtgatcctgggggcgccggtctatgcggggcggctgccccagctggagggcgggatctttgaacgcctgcggggggacgggaccccggcggtctttaatgtgagctacggcaacagagcttttgaggacgccctgctggaggagcaggacatctgtcaggcccatggattccacgggatcgcggcgggggcctggatcgcccctcacaccttctccggccgcatcggggccggacggccggatggggcggacctggaaaaggtgcgggaatttgccgcgggggtccgggcgctgctggagcggccggactggaggacctgccggctcacggtgctgggggaccggccctaccggccggccaggcgggtggaggtgcaccccgcggggggcgagagctgcacccgatgcatggcgtgtgtgtcccggtgcccggcgggagccatccctccggaatccccccggagcactgacacgggccgctgcatctcctgtctggcctgtgtgaaaagctgtccggcgggggcgcgggcggtggccggtccggcttttcccaagatggtggaggggctggaggggcggctgctgtccccccgccgggaaccggagctgtattacggaaggtgagacgatgatcaaaacagtttttagacctctgcggcacggtggcctgtgaggacgggcctgtcttctatgaggtgatgcagcgcacggtcccggacggcgtggaggagatccgggatttcagggggctgatggagcacctgccccagttgtccggcgaaaaatccagcgaaaaagcagaccgcgccccggaagacgttctcttccggggcgcggtgtttgatcggggggcgggatcagtcctcgaagggcaggccgctgagataacgccgggccagatcaaaggcgtggtgggcggtctgagtacgcagacgggcacggactgggcggctgcccaggttcagggcgcggacatgggcgccctcggcggtggagatggccacgaaagcggtgcctacctcgtggtcccattcgtcctttccagggccggccacgccggtggcggacagggcgatgtcgcagcccagcagcctccgggctccatcggccatagcccgggccacctccggggagactgcgccgaactggtccagcaggtgctggggcacccccagtacgcccgccttcacctcattggtgtaggagaccaccccgccccggaacacctgggaggagccggggatgtcagtgaggcgcttggccatcaggccgccggtgatgctctcggcgcagcccagggtgaggcccttctcccgaagcaggtcctccaccacctcctccagagaggagacatccaccccgtacacccgggtgccgaagcgggccttcagctcctccaccttgggcagaagcagggcctgggcctgctccatggtgggtgccttggcggtgacccgcagctcacactccccctccttggcgtaaggggccagagtggggttggacatggcgttcatctcgtcccggagctgggcctccatctgggactccccgatgccgaacagcttcagggtgtgggaggcgatgactccctcggacagggcctgaaggtaggggaccacccggtgctggaacatgggacggcactcgctgggggggccggggagcatgatgacgtggcagccctccgcctggaaggcgcagcctggggcggtgccccagtcgttgaccaggacggtgcagccctcggggagcatggcctgctgaagattgttctccgtcatgggccgcccggtgcgggcaaaataattccggatgcgctgggcagagggctcgtggaacaccagcttctttccaaacgcctcggccaacacgtttttcgtcaggtcatcacaggtggggcccagccccccggtggtgatgatgatatcagcccgccccttagcggcggccaccgcctcccgggcccgctgggggttgtcccccaccacggtgtgccagtagacgttcaggcccagggcgctgagcccctgggagaggatctgggcgtccaggttgacgatgttgcccagcagcagctcagtgcccacggacaggatctctacagtatgagacatgaaaaagacctccaggaaaatgagattggcggcgctccagtcagggggcgggggcttccgccgccccggcccggtccaggatctgctctacctggcgcaggtcccggatgtcatagtcgatgcgggggtctgccgggcggggctcccccagagggttgtaccagcagcacaggatgccggcgctgcgtcccccctgcatgtcgctggtgagggagtcgcccacgatcatcacctcgtcccggcagcaggggccgatctgggagaataccgcgtcaaaaaaggcggcccccggcttctcggtccccacgatctcagagatgaagaccccgtccagcatccggtccaggccggagcgggacagcttccgctcctgggcgacccgggtgccattggtcactgcgtactgccgtacccggcccttcagccgggccaccagagaaccggcgtcatcccggaacaccacagtgtcccccaggcgcagctggtactcctggttgaaagcgggggtgtcccggcagttcagcccctcctgggcgaaaaactcctcaaagcggcccagcaggacctggggcttggtcagctccccccgctccagccgccgccagtaggtccggttgatctgggagtagcgtgccagcagctccggcgtgcaggggcccatctgaaaggagcggaagcaatcctccagagcccgccgctccgctgccgagaagtccagcagcgtcccgtccacgtcccagaggatcacgttgatctgtgccatatcgcgcctcctgtccctcagacctggacccgctcgatgctgtccaccgcggcttggatcagcgcctggatgtccagcttctcctcggcgaactccacctcgccgggcaggggccgcagacgaggatgacggggcgtgaagacggtgcagcagtcctcataggggaggatggaggtctcgaaggtgccgatcttccgggcgatctggacgatctcctccttgtccatccccaccacagggcgcaggatgggcagatcgaccaccgcgccggtgaccagcatggcgtccatggtctggctggccacctggcccaggcactcaccggtgaccagggccttagccccgcaccgccgggccacctcctgggcgatgcgcatcatgaagcggcgcatgatgacggtgaacagctcctccgggcaggagcggcgcagctcctcctggatggcggtgaagggcaccacgtggacggtgagccgcccggtccagggggtgagcaggcgggccagctccagcactttctccttggcctcgagagaggtgtagggataggagaagaagtggaccatgtccagggccaccccccgctttgcgatcatccaactggccacaggggagtcgatgcccccggagagcagagagacggcccggccgttgatgcccacaggcaggccgccggcgccgggctggggctgggtgtggacgtaagcggcgtagtccctcacttccacgtagacggtgagttcgggatggtggacgtccacctccaggttgtcataggcctcatggagctccccgcccacatactggctgagctggatggaggtcatggggaaggtcttgtctgcccgcttggtctccaccttaaaggtgcgggcggcgcggagctggtcgtccagaaattccttggcgcaggccaggatggcgtccttgtccttcccgcaggggcgggccagggacagacccacgatgccgaacacgtgcttcagggcctcataggccccctccacatcgcagccctcgcctatgggctccacgtaggtggccgactgccgggtgtacacccggaactggccgaagggacggagacggcggtggaggttggcctggagcttgtcctcgaagctgcggcggttgagccccttgaggaccatctcacccagcttgagcagaatgatttcgttcattatgtgtaagatcctttccatcgattcgcttcacaggcattatatcggaaagcgccggggatgtccagcgggagcggagaaagtctcggatctgtccggggatgtccctccggcgcgtgccctatgcagggcgcattctaccgccgcaggtactccggcggacgatattggagggcctcggccaggtgggggagctggatggaggtgctgctgtccaggtcagcgatggtccgggccacccgcaggatgcggtcatagctgcgggcggtgagccccatccggtcaaaggccccctgcatcaaccgctggcactccgagtccagggcgcagaaccggtccagctcctgctggcccatccgggcgttgcaggaggcgtccccatagcgcccacgctggatgtcccgggcccggtccaccctgcccttgatgacggaggagggctccgacggggcgcggcgggccagctcaccgaactccagggcggccacctccacaaacaggtcgatgcggtccagaagggggccggacaggcgggagagatagcgccgcacctcctgctccgtgcagcggcagcggccgctggggtggccgtaccagccgcacttgcaggggttcatggcgcacaccagcatgaaccggctgggataggtcaccgagccggcggcccgggagatctgcacctgcccgtcctccaggggttggcggagcacctccagcacctccttggagaactcgggcagctcgtccagaaagaggaccccgtggtgggccagggagatctcacccggcctgggattggtgccgccccctgccagccccatgggggagatggtgtggtggggggaacggaaggggcggcggctgatgagggggtggtccgggtcggtgaggcccatcaccgagtggatctcggtggcctccagggcttcagagcggctcatatcggggaggatggagggcaggcggcgggccagcatggatttgccagacccgggaggaccgcacatgagcaggttgtggccgccggccgcggcgatctccagggcccgcttcccgttctcctgccccttcacctcggagaagtcgggggcgggctctgggccggggccgggtacccaggggcgggccggggggatgggctcctccccggtgagatgccgggccagctgggccacgtcccggacagggtaaacggcgggaccgccggccagggtggcctcggcggcattggcctccggaacgaagagagagcggatgccagcccgcccggcggccaatgccatgggaaggatgcccgccgcggggcgcagttccccggacagggacagctcccccacaaaggcgcagtccgggtcccgcaccttcagctgcccgccggcggccaggatgcctaccaggatgggcaggtcgtacagcgtgcctgacttcttcacatgggcgggggccagattgacagtgatgcggctgaccgggaactgaaagccgcagttcttgatggcggagcgcacccgctcccgggcctcgtttaccgccgcatcgggcaggcccaccagggtgaaggcgggcaggccgctggacaggtcgcactcggcgctcacctcatagcctgagaccccctggagccccagagagcgcacttggaataccataggcacatcctccttggcgggagtatggaacacaaattgtccccgtttggtacattttactccttcggcaccatcctttgcaacggatgccagtatttttcttccggaaatcgggggaaatcgctccagcccgatttacaaatgggggaaaagatgataaactagctttgtctgagaagagaccgcccgctccaaaacagggaggggcgggatcgctgtgcccggacgcctgaccgcggggagctgaccgccatcccgacccgaggcaggcggcccgccgggccggcgggaggagacatacatcccacaggagaacagggaccggggcgggatggccgggcccagaaaattggaagaaagcagggattctctatggctagaaaattcaagaccatggacggcaacaacgcggcggcctatgtcagctacgcgtttaccgaggtagccggtatctaccccatcacgccgtccagccccatggccgactatgtggaccagtgggcggcccagggccagaaaaacatcttcggcaccaccgtcaaggtcatcgaaatgcagtctgaggccggtgccgccggcactgtccacggctctctggcggcgggcgctctgaccaccacctacaccgcatcccagggcctgctgctgatgatccccaacatgtacaagatcgccggcgagctgctgcctggtgtcttccacgtgtctgcccgtaccgtggccgcccagagcctgaacatcttcggcgaccactctgacgtgatggcctgccgccagaccggctttgccatgctggccgaatccaatgtgcaggaggtcatggacctgggcgccgtggcccacctggctgccatcaagggccgcgtccccttcatcaacttcttcgacggcttccgcacctcccacgagatccagaaggtggccatctgggactacaaggacctggccgagatggtggacatggacgccgtggaggcgttccgcaagcgcgccctgaaccccgagcggcccaccatgcgcggttcccacgagaacggcgacatcttcttccagcaccgcgaggcctgcaacacctactatgacgccctccccgccatcgtggaggagtatatgggcaaggtcaacgccaagctgggcaccaactaccagctgttcaactactacggcgcccctgacgctgaccgggtcatcatcgccatgggctccatctgcgacgtggccgaggaggtcatcgactacctcaacgcccacggcgagaaggtgggcctgatcaaggtgcgcctgtaccgccccttccgggccgacaagcttatcgctgccatccccgccaccgcaaagaagatcgccgtgctggaccggaccaaggagcccggcgccctgggcgatcccctgtacctggatgtggtcaccgcgctgaccaatgcgggcattaccgacaagaccgttgtgggcggccggtacggcctgggctccaaggacaccccgccccgcagcgtgtttgctgtctatgaggagctggccaaggccgagcccaagcgccagttcaccatcggcatcgtggacgatgtgaccaacctctccctgccggagagcaagtccgccaacaccgccgccgagggcaccatcgagtgcaagttctggggcctgggcggcgacggcactgtgggtgccaacaagaactccatcaagatcatcggcgaccacaccgataagtatgtgcaggcgtacttccagtatgactccaagaagaccggcggcgtgaccatcagccacctgcgcttcggcgacaagcccatcaagagctcctactatatcaataaggctgacttcgtggcctgccacaacccctcctatatcctcaagggcttccccatggtccgggacgtgaagcccggcggcgtgttcctcatcaactgccagtggtccgatgaggagctggacaagcacatgcccgccgtggccaagcgctacatcgcggaaaatgacatccaggtctacaccatcgacgcgatcgacctggcagccaagatcggcatgggcaagcgcaccaacaccattctccagtccgctttcttctccctggccaacgtgatgccccagaccgaggccatccagtatatgaaggacgcggccacccactcctacctgaagaagggccaggacgtggtggatatgaaccacaaggccatcgacgccggcgccactgccttcaagaagttcacggtgcctgcctcctggaaggatgctcaggatgcacccaaggagagtgtcctgtccggccctgccaagctggtgaagatggtggagaacatcctggagcccgtggaccgcatggacggcgacagcctgcctgtctccgcttttgtagaccacgcagacggcaccttcgagcagggcgcctccgcctatgagaagcggggcgtggctgtcagcgtgcctgagtgggactccagcaagtgcatccagtgcaaccagtgcgcctacgtgtgcccccacgccaccatccgtccctatgccctgaccgaggaggaggccaagaacgcccccgatgcggccaagatcgtggatgtgaaggcgggcaagggcaagggcgtgtacaagtttgccatggcggtcagccccctggactgcatgggctgctccgtctgcgccaacatctgccccaccaacgccctgaccatggtctcccaggagagccaggccgctcagcaggaggtctttgactacatggtggccagcgtctccgtgaaggaggatatggccgacctgaccgtcaagggcagccagttccgcactccgctgctggagttctccggctcctgcgccggctgcgccgagaccgcctatgcccgtctcatcacccagctgttcggagaccggatgtatatctccaacgccaccggctgctcctccatctggggcggtccggctgccacctctccctacaccgtcaacgccgagggcaagggtcccgcctgggccaactccctgtttgaggacaacgccgagcacggtctgggcctgtatctgggacagaaggccatccgcaaccggctggctgccaagaccgaggccctgatcgcggtggactgggcccgtcctgagctgaaggaggccgcccagaagtggctggacactatggaggacggccaggccaaccaggaggctgccaaggcctatgtggcggctctggaggccggcctgtgcacggtggacgagctgctggccagtgacaaggccgagatccaggccttcggcaaggagctgcaggccaagggcgagacgctgtgtcagtgcgaggcctgcaagctggtcaaggagatcctggacgagaaggagtacctgaacaagaagtccgtgtggatcttcggcggcgacggctgggcctacgacatcggcttcggcggcgtggaccatgtgctggcctccggcgaggatgtgaacatcttcgtctttgataccgaggtgtactccaacaccggcggacaggcctccaaggcctccaacatcggccaggtggctcagtttgccgcggccggcaagacagtggcgaagaagagcctggcggagatcgccatgacctacggctacgtctatgtggcccaggtggctatgggcgccaacatgaaccagaccctgaaggctatccaggaggccgaggcctaccacggcccgtccctcatcatcggctacgccccctgtgagatgcactccatcaagggcggcatggccaactgccagtccgagatgaagaaggccgtggagtgcggctactggaatatgttccgctttaaccccgccctgaaggcggagggcaagaatcccttcactctggactccaaggcgcccgcaggcggctatcaggagttcctgatgaacgaggcccgttactccagcctgacccgctccttccccgagcgcgccaaggaactcttcgctcagaacgaggaggaggccaaagcccgctacgagaagctccagcgcatggtcaagatgtacgaggtgtaagggtaagatc

SEQ ID NO: 13594 - DNA, 729 bp, Unknown
  gut microbiota DNA sequence
ggttttggtgtagagcggattcggggtcattgaaacgctcaggcgaggtcctgggcgttttcagcatttcggctgtccatcatctcctgcaggtggcggaaaaattcctctggaggcatgatggatttaaagcggcggtagaaggccacgccgaaccccatggacagaaaaagactgacctctttgttctcctcggtattcgggagcatcttgacggcggacaggatggtggagcccaaaatgtccacgatctcccccgcctcctccattgtggcgggtcgtttcagatatgtttggaattcttccaatgtcataacactcacctcaactcctaacataccaaaaacaattagaaaaaacaagttgtaattttgattatattaaacatcaaaagaacaaaatataatttcctcatagaatagtgaggagaaagtgcaatggcctttacgataaaaccaacaaagaggaaaaaggaatccgtaaaccgttctatttatttgagcaaagaagtccatgacaaggtgttgaaaattgcggcagagaacgacaccagcttcagcaacgtggtggtcagcatgatcgaatactgcctgaaggagcaggagtcagagcaggaaagagagacataaaacagcgggcgccgggatctccggcgcccgcttcaatttgctaaaattcgcgcccgcaggcgcggatcaagttgagaagtgttttccccggcggcatgtg

SEQ ID NO: 13595 - DNA, 5378 bp, Unknown
  gut microbiota DNA sequence
gggcggcggagccgcccaccagaccatgacccaggcgggcggaatggcctgtaggggcgcatagtatgcgcctgtgcagccggcggcagagggcttgtaggggtgccgggcggatgatatccgcccctacgggtcccacaaggatatggaggctacgacgacgatggtatcggccagcggcctgcgggctaggatcacgatctaccgcaggaaagagacggaaaatgagctggaggagaagaccttcacctatcagccggagcggacggtgtgggcggagatcgtgcccacttccggccgcacggctcccctggagggagccgtggaacgggcggagatcacccaccgggtgcggctgcggatctctgcctgccccgtcatcgagcgggggatgtattttaccttccgcagacagcggtatgatgtgctgtacggctaccccatttacaaccggcgcgggtggctggagctgtattgcagattggtggtggaggacagtgtcccagggatttgatctctcggagctccagaaatatgcaaaggaccttgctaccgtgggtcaggagtacgagaaggcggagcggagattcctccagaaggagggggctaagctgcgcagcaagacaaaggcacaggcccggaagctgggcaagaagaccggaaactacctgaagtccatcaagcggggcaaggtgtacaagtaccggggggacaaggccgtccgggtgtactcctacgccccccacgcccacctgatcgaggaggggcaccggatggtcacccacgacggccgggaggttggctttgtgaaaggtcaccatgtgttcgaggtggcggcaaagggctttgaatcggagttctacaccgatctggacgactttctcagcggagaggtggtggagaagctgtgacgctgaaagaactgaacaaggcggtctgcggtctggtgaagcgggcggcggaggcctccggcctgggggcggagctgatggcggaggatctgagcgctcccatccagcggccctcgctcaaagtggagctggaggaggacagagatgcccgggccatccggcaccgggtggagcaggccatcaccttccgggtctatttcttcgcagcagatcagtaccggcccaagctggacaacctggccatgcgccaggccctggcggaggcatttcgggacggggtccccgtgggggaggagacggtgcctatcgacgaggggctgtcctttacagtgaccgacggggtgctggtggcatctatggacctgaccctggaccagcgcatcattcctgctgaggaagaggatgcggagctcatggaggagctgaacgtgaatttggaggtgcattgaaatggcggtgacactgccaaaaatcgaagtgacatttaagcagctggcggccagctttgtccggcgctcagagcgggggatcacggtgctgatcctgcgggacgccacagaggggagcggcgagagcttcttccggtttggggatgctacccaggtcccggagaatgaatttaccgcggccaaccagcagtatatcaaggatgccctctcttttggccccctgcgggtgtcggtggtcaaggtgggggcggaggggacgctggcccaggctctggccattctggtgcagaaggagcagaccgggtggatcaccgtgtgcgacggcacatccagcgactggaccgacctggtgagctggatcaaggcccgggagaaggaagagaagagctggaaggcggtgtgctacgataccacatccccagactgcatgcacgtggtgaactttgtcaacaagacagtcacctttgccgacgaccggggagcggtggggggcggcaagtacacccccagcctggcgggcctgctggcggcctgcaatgtgctgcggggggctaccggctatgtgtgcagcaacctgaccaccgtagaggagccggaagacgcagagacggccgtgggctccggcaagttcgtcctggtcaacgaggatgatgaggtccaggtgggggtggatgtgaacagcatgaccactgtcaacggaagcacccagaccgaggacatgaagtacatcgagacggtagaggccatggacctgatacgggacgacatcaccgcaaccttccgcaaggactaccgggggaaatacaaaaacaccaccgccaaccagatgctgttcctggccgtggtcaacggctatttccgggacctgggggacgagaacgtcctggaccccacctatgacaacaccgccgcggtggatgtgaccagccagcgcaacgcctggatcgactcgggcaaggcggaggccgtggactgggacgacgggaaggtcatcgccaccccgtacaagcggaaggtgttcctgggcggcgatgtgaagatcctgggctccatgacggacctcaaatttgtggtcacgctgatgtaaggagggggataggcaatggtgaaatatcaggaggtcctgcacggctccaccagcgagctgtatatcaacggggagcgggaggagctggtcaccaagatcgaaatcaaaatgacaggggactttgaggacagctccttctgcggtgagtacggcaccttccccatctacaacgggtatgccatcgagggaactatctctggaaagaagcgcaacagcaccctggagaacgccatcgtggagggctaccgcaccggtgagatgccggatatcaccgtcatctccgccctggggagggcggggagctcagcacgggaacgctggtcggtgagcggcgtggtgttcacggaggcggccctggccaacatcgaggccaagaaggcggtggagcgggagttgccctttaaggcggtcctggcaaagaatttggaggcgatcgagtgatggcgagaaaatttagctttgacgagctgctggctaaacgggagcagcgggaggcggacaagctgaaggtggggctgctggagctccctggcaccgggaagggcctggaggcccggatgcccgggcagaagacggtgctggacctgtacggggagctggtagcggcgcaggacgccagggagtccctccagtgcgggaatcacgccctttacgcctgctgcccccagctctgggacagcaggctccaggaggagttgggctgcaaggaggaccccatgcaggtgctggacaagctgttttccctcgcagagcaggaccagctgggcgggcaggcgctgcgcttcctgggcctgctcccggaaccgccccagaagacggacgggaacgacggggaagagaaggaagaggcccagggagcggcccccggtattgagacggtaaaaaactgatcgcccgcgaccctctcctggggctgttcgccttctacgcgccccggggctggaccctggaggcgctgagccggaccagtccggcggagcgggccttcctggagggggcgcgggcgctgtactatgaggagcagatctccatgggcgaggcggggaccgccctgggggtggcacggctcctggcggggaggtgacagagatggccacgaaagtcatcaataccatcctcaatatgcgagataacatgtccaagggcctgctggccacggccaagaacatggaaaaggtggacaagggctcggtgtccgccacccggtccgtcctgcgttttaccaacaaggcaggaaaggcggtcaccgactttgccgcaaagacggtgaagcggggcgcggtggcgctggcgggactggccacgggctttctggcgctggacaacgtgacggaggagtaccgggccgcccagggcaagctgaacacggcctatgaggcggcggggtacagcgcccagaccgccgccaccgcctaccgggaattttacaagatcctgggggacacggacacggccactgaggcatcccagctgctggccaagctgacccgcagcgagcaggacgtgacccgctggacccggatcgccgccggcgtcagcggcaccttcggagactccctccccattgaggggctgatcgaggccaccaatgagacggccaagaccgccaaggtgaccggcgtcctggccgacgccctgaactgggtggggatcagcgaggacgacttcaacaagcggctggagcggtgctccggggaagcggagcggaacaagctgttgatggacaccctcaccaccgcctatgagggagcggcggacgccttctaccggaacaatgaggagctggtccgggcccgggccaaccaggcggcggtgagcgcggtcaccgccaagctgggaagcgcggcccagacggccaagggctggatctggcagctgctgggcgcccaggaggacgggagcctgcgggccgggtccgctttggactggctgagccagcgggcggacggcctgatgcagaagttccagcagtggtcccaggacggaacggtcacacggctggcccagcagttcgaccaggggctggccaaggggatcgacatggccagcgccgccttccagtgggtggtggacaacggggacaccatccagcgggtgctcatcggcgtggggagcgccctggcggcggtgaagattctgaaattcgcgtcagacaccatcacggcggtgcagacggtccagaagttcatctccgtgggcagcacctttctggccgcgaaccccatctatttgggcattatggcggccattgcggcgggcgcactgctgatcgccaactgggacaaggtaaaggccacggccatcggcctgtgggagggggccaagcaggtgttcggaggcatccgggacagcgtgaccggggcctttgacacggccagagagtcggtctccggcttcttcagctggatcggcgacagattgagctggctggatgagacggtggagggaatccccatcctgggctccgtttacagcggcgtgaagtctgtgggaggctgggtggtagacaaactccggggcaacgccctgggcaccagctatttctccggcggcctgacccgggtgaacgagcggggcggcgagatcatcgacctgcccagcgggacccagatcatcccccacgacgtgtccctgcgcatggcggagcagacggcggggagcagcgtggtccacctcgtgggggcgggccaggagagatggggcggcgcggctgtgctgctggagatccgggagctgctgaggcagctggtccggcagaggagccggggagatgtgcgggtgacggtcattgtccaggggaacgtcatcggaaaccgggcgtttgcggatgaactgggccgcacagtgggggagcgtgtgctgcgggcgctggacaacatttgagtgcccgcccacccgcccattttgaaggtgtgggggctccgcccccac

SEQ ID NO: 13596 - DNA, 26098 bp, Unknown
  gut microbiota DNA sequence
acaaaattgcgggtcatcttttcaacccatacagggcgaattccgagcctggagcgcagagagtgccgtcctttgggacaaactggacgctggagaggctctcccagtcggcccccaccagagccgcactgtctgaaccattcatgaccgccttggaacagtaccaaacatggcagggcagacggtccgcggcaccggggataaaaaaccactccgcgaatcccgcggcgaaaagggagctggtaaaggagagatacaggccgtctgtcctgttgatcccccctgtgtcatactggcccgaactgacctggttcatccgcagaataacattacccagagctgagacgccgcagatgtggaaatggagccgcagctggcggaaacggcttttgtcgatctccgggaagctcaaactgatcagactgctttcctctgtcacagaccattcccccagcctgacccagcagttttcgctccgcagggccgccgtgtctgcctcgtgggactggctcagggccctgatctgggcggccagctccgtcttgtcggcctttccgctctccagggcggagatgcgcccctccgccgccgagagggcggtctcgtccgccttctggctcactacggaggacaggttggtcaccgtggatttgtcagcttttcgccccgcctgctccgccagggcgtggagcgccccgtcgatcttggcgttgtcggagttgaagtccacccgctccaccttgtccgcggcctcccactgggagagcccataatactgagtctgtccgcttgccataaaaaatccctcctgtcctgactgggcccggcagatccggacccgctcaaaaccggagggaaaagctgttttgtgagacgtttcaatacaaattatggaagtgaagcggaactgcgcccatttcacccgtgcagggcggactcctgttccatggcggtgaagaaggggacgccgagatggctgtaaaaggccagatagatgatgatatccctgggtgcgtggatgtcgccgatctcagcgccgatgtacttgcccaccaatcctctggcgaccaggatgtcccagcactggttggacagacgctcaatgcttttcgagatggtttttaccgactgcggctccccgtttttgccacggagcagcacagccaccggagaatagatgtcccgtgtgaagtggagctcatcgatggtctgtctgtgggtgaacagcagctctgcggcaatgtccacagcacgggccaaggggcgggtgtcgatcccggcggccccgaaaatagagcggataacagtttctgttttcgtcataaagacctatcctttccctggaatatgcccctatcataaagtaaattctgggaaacagatggtaagagacataaaacgacaaaaatcctcgcaattccacctccaaaaaagacactttcggaagagagctggggctatggaggagcgcgggatatggagagcgacccggcagaaaaataccccgtcgtttgtcacgccgtactggggcgccgcgccctgcctgcggcgggggggggccacatgacgaaagggtcccctgaacttttccatagaagccgccgtttggaacagatagggccgacggcctcactgtttggacggaacaaaaaagcccggtgacggagcgctcccgcgcctccgtcaccgggccctgtcaaaacagttacttttcgtcgcacacctggaagatataaaatttcagataataggagtcgtctgccgcccacaggatgggatggtcgggcgactgagtgcggtattccacctgccgcaggcgcttgtggacgttccgcgccgcctgaccgatggtctgggtgaacagctcatagtccatgaagtgggagcaggagcaggtggccagaaagcccccgtcccggaccagcttcatggcccgcaggttgatctcccggtatcccttgaccgcctttttcaccgagctgcgggactttgtgaacgcaggcggatccaggatcaccacatcgaattgctccccctgctgctccagctgggggagcaggtcgaacacatccgcgcagaggaactccacccggtcctccagcccgttgagggccgcgttctccctggcctgggccaccccaagctcggaggcgtccaccccaatgacgtgctccgccccgcagataccggcgttgagggcgaaggagcccgtatgggtgaagcagtccagcacccgggcgccccggcagagccgccccaccgcctggcggttatacttctggtccaggaagaagccggtcttctggccgtccttcacatccacgaagtagcggaccccgttctccacgatctccaccttggtgtcaaagggagcccccaggaagcccttgtaccgttccatcccctcctggaggcggaccttggcgtcgctgcgctcatagacgccccggatggcgatgccgtcctgggccagcagctccttcagcagctccacgatggtgaccttgaagcggtcgatgcccagagccagggactccaccaccagcacgtcggagaacttgtccaccaccagccccggcaggaagtccgcctccccgaaaaccaggcggcagctgctggtgtccactacctttttccggtactcccaggcatttttcagccgcatgaggaagaaatcctcgttgatctccgcgtccgggtcccgggtgagcatccgaacggtgagcttggagcgccggttcagaaagccctggcccagcggccagccgttctcgccgcagacccggaccaggccgccgtcctccgcccccggcgagatatccgcgatctcattgtcatagatccaggggccgcctttctgcaggtaccgtccctctccctttttcagtgtcacaacagcgtctgtcataaaagttcctcctatctgccttctgaagaacttacctgcgtgttctttggggaaaagtcctggacacataagtatttcccccgcaggagcagaccttttatttcattcggcagtctgtccatcagagcgttttttgttacctgaattgctccggcctgtgcaagtcggtcgctcagtccccctggggatttatcctgcccgcacgctgtgagcagctgctgaaaaaatgatgacgtagaatggatcagattgtcccggagcatattctccaaataaaagcgcatgactttttcaaatcgaaggaccccgttcttatactccagcatgagcagttcgctctcgccagagtatctccagctgctgtgtgcctgcaactcacctacaaattgtacgaacatggaatcactgaaggaccagtctacaccattgatcttcgtaactacccttccgtccggataggtgccatgccaatacgccccatatcccggaagataaaagtttacatttttgctgcttgcatgatggtaataattcagactggataaaatgtcttttccgacttccaattcaggcctagtgatcaggatcccaatcgtgtcctccagtatgttgtttctggatatatcttctagcatagcctgatatgtgattgcttccagcatactgcaccctcctctgtacctttttagcgttccatccgcagcaccgtctccacatgggcggtcctgggaaacagatccaccggctgggcctggacggcccggtagcccagctcctccagccgtttcacatcccgggccagggtggccgggtcgcaggagacgtagacgatgcggtccggcgccatggaggccagcaccgccggcacctccggggcgagccctttgcggggcgggtccacgcagatgacctggggacgcacgccctggccggccaggcgggccgccacctcccccgcgtccccgcagaagaattccgcgttggtgacaccgttgcgcagggcgttggccctggcgtcctcgatggcctgggggaccacctccgccccgatgacatgcccggcccggcgggccaggcacagggagatggtgccgatgccgcagtacaggtccagcaccgtctcctccccggtgagcccggcgaattccagcgccagctggtacagccgctccgtctgatcccggttgatctggaagaaggagggaacggacaggcggaaagtgagcccgcacagctcctcctccagccagtcccggccccagagggtgcggtacgcatcgcccaggatcacattggtgtcccggagattcacattgaggaccagcccggccagcttggggacagcggcgcgcagggcaccggacagctctccggcgtggggcagctccctcccgttggccactacgcagcacagggcctcccccgcccggttggtacggatatacaggtgccggatcagcccccggccggtggactcatcataggcggggatctgaaagtcctccatccagcccttgaaggccagacgcagggccgtatccgcctccggctggagcaggcagtcctccgtgtccaccacgtcatggctcctggggcggtaaaagccgatggacagcccgcactttcctcgggagacagggaactgcaccttgttgcggtagcgcaggggggactccgcccccagcaccggaggcagttccagatggacgccgcccacccgctccagggcgtcccgcacccgctggcccttggccgccagctcctcctcataggacatgtggcggtactggcaccccccgcaccgcccgctgtaagggcagtccggctcctgccggacgggggagggggagatcagacgtgtccctttgccccaggccacccccttgttcaccttgagcagctggacctcccagtcctccccccggatagtcccgggaatgaagaccacccggccgtccagacgggccacccccattccttccgcggtatagccctcgatatggaggggatgcactgtgttttttctgacctcggccatgggattccctcgcttcaaaaccgtttttcttatcatatcatggccggatggagccgtaaagcccattttgcctcaggacggcagagagaacaggagcgccgcccgaaagggcggcgctccgcatagggcgcagagggcggcggtcagtcccgaagggcctgatacaccgccagggagacctgggagatggcggcgatgcccgcgctgtcgttctccagatccccggtgaacatggcaatcaggtagcggcggccgtcaggcagctcaaagatgcccacgtcgtgctggatgcccaccaggtcgcctgtcttgttggccaccaggacctgcccttccgggatggcggacttggagccggagtaggaggcaactgccggcagaagggcgggcagcttgttgcggcactgctgagatgccatgatatcgaagatggtctgggagatctccggattgacgaattcgccccgggagatagcagaaagcagacgcccagtctccccggcgcacatgtagttgttctttccctgctggatggcttcaaaatccatcattttccgcatcagggtaatattctgatagcccatctcccggcagaagctgttgaaccgctccattccgatcacatccatgatctcattggtggcgatgttgtcgctgagtacgatcatcagcttggccagatcccgcagggaaggggtgtaatcggtgcccagctcgcacaggatgccggtcccgcccacccggttgcgggggtcgatggtgcggggggcgtccaggtccaccagcccctgctgtgcgtcccgcatgagaagggccagcatagggaccttgatgacgctggccgagggaaacacatgctccgggttgatggtgaagatctcgccggactggcagtcctccacatagaggcccaccgtcccggccagtccggagaggatgcgatagatttcattttgagggatacgtttcatgagaatatgcctcctgtcctatttccgaaagctagttacagaatgaacgacgccagcactgcgaggatcactgtgccgggtataatggcaaagtacgagagcttcatcatcggcttgatgttgctggcatgggccagtcccatctgtccgatcatgtccacgccgggataggcaaatgaggtgatctgatgaccgatgaggacgatcatgccccacagctccatggaaatgcccagggtcgggaggaaggagctgaacaggctgtcgatcatcatggcctgggccacggcggcaccgttgatgccgaagatgcccaccagcacagtcagcagggtgaagcccaccttcccggtggggccgatcagaggctccagcagctggagaagggcatcaaaggcaccggactgggtgacaaagttcaggaaggggttaaaaatgaggaacatgaagaacagccacatcatttttccgcagccctccatcatgctgtcaaagatggtgccaacgggcattctggcaaacagacctgtgatgatcgcagccacgatcatcaccaggatcacgaaggatgcgccgccattggtggcgatcccatagatcaccatcagagccatagtgaccgcaaaggcgatggtggcgcggcgggtggccgggtccatctggaagttctccgcagcggcctccccgtcagggccgaagttctccgtcccctgggtctccttctggactttgttggcgatgaggaaggtgcccacccacatgacgatggatacgggcagtcccgcacacagcaaaaggcggggataggagagcccggtgatgctcatcagggtcaccataggcggggagaaggggctgaggaacagtccggtctgaccggcgccctggaagatgacggccagcgcggagggagtgatgcccaccgcagctaccagcgggatcacgatgggggcgatcacggcgttggcacctgccaaagtgcccagcagggtgaccagcaccacggaacagaccatggtggcgatcatagcccgcttctgggtacggacgccgatcttccgcatcagcacattgacgatggcggcggctacgcctgtctttctcagcaccatgcccagtcctgagcccagcatgatgatgaatcccaccagggccaggaaggagcccatggactcgtagatcaccgcgcccaggccgttcaggggctgtttcaccatgattgcgcccacaacagcgcagatggacacgttcaccagaggatgcatcccttttttaaatgccaggacgatgtacagcagcagcggaaacagaccgcagatagggggaaggttgaagatcatggcagcttctcctttcttgattcacacagttgtttttaccggcacaggcagacaagatatgcggggacagggatggggtcatcgctcacattttcatggcaacatttcaacatacacctcccggggcctgcctctgcctggagcgtttcccaggcctatttctaaaaaaacaaagggacccccttggctgccagcaggcaatcaaacaggtccctatttattcggctgttgaaggggagacctccaacaccataaataaagaaagattcagttgtacccgcccccttggcactccctcaggcgggcagccacatcccgtaggatgacggtgatagcccggcgggagtcgccgaagtagcggctctggacccgggagatcatctcctccaggtccgtgtggaggctgagaccaatgagcagggacgccagaaaatcgctggtgatctggcagactgtgtcaaactggacatcatacaccaggccgctggaggggtccacgataaaagagccggccagggcgcggtgcacgctgtggatcgggttctggttcgccaccttggccagaccaacgacacagatggcccccgaagggaaatcggacatataccctccagcccccttggcccgctgggaagcggaacggatcatatgcctgaattataataaaaaagatcgctcttgtcaacagaaattgtgcaaaaagcaaaatcccgttcccgttctactgtcgttttttaccaatcagacagagcaagagagcgccggccctactttcggagcggcagggaacgggggctgcgagccctcatcttggagtacgcatccttcagacagacgatcagcgcccgctgacccgggccgaaatactgctgctggatggacaggatgatctcgtccagctcctggtaaaagttccgccccaccaggagggatgcgatgtagtcactgttgatgcccaggatgatgttgcactctgcgtccaggatgcgtccgctgtcccggtccaggatcaggaccaggaggagcagctcactttccgccgaattcagcgccgtgttcagcgccctggacatcccggctgccaaaatcgtattggggccatagcgggccctgcggatcagatctgtctgttccatctgtgctctccttttcctcctgatcgtcaaaggctggtacacagcaaggcggcataagctgtgcgcctatgccgccttgctccagatacgggtccactgcttttgtgtgggttcttactgctgctcgctgtgatactccttgcaggtgcactttttccacttcaggccgctgccgcaggggcaggggtcgttgcggccgatcttgaccgccttttttaccggctgctttttgaccgtgccgtcgctggcgcctgactcgctggtgatcttggccacccgttcccgtttgatctccggggcgggggcatcaggcgccttgcgctggatgcgcaccaggaacaggcggcgcagggtctcctcctggatggcagcgatcatctgctcgaacatctcgtagccttcctttttgtaggctacaacggggtcagtctgggcgtaggcccgcagtccgatgccctgcttgaggtcattcatggcgtcgatctggtccatccagtactcgtccaccacccgcagcatgatgacccgctccagctcccgcatcaggggcggtgtgaattcctgctccttgcgttgatagacagcctgggccttctccatgaccagatctaccagcccgtccgcagtgtagccttgcagctcctcgtctgtgagccgcagttcgtccggcaaaaggaacatggtgtggaagagaacggtggcctcccggaactcctccgcagtcatatgcttctgctctcccatgtggccgcggatggcgttctcaatggtgctgcgcagcatggactggatggactgctggaggtcctcgccgtccagcacttggcggcgctgcttgtagatgacctcccgctgggtgttcatcacgtcatcgtactggagcacgtttttccgggtctggaaattacgggactccacctgcttctgtgcgttttcaatggcgttggacagcattttggcgtcgatgggggtgtcctcgtccacccccagcttctccatcatgcccatgactcgctcagagccgaacaggcgcatgatgtcatcctccagtgagaggaagaagcgggtctcaccagggtcgccctgacggccggcgcggccccgcagctggttgtcgatgcggcgggactcgtggcgctcggtgcccaggatgaacaggccgcctacagtgcggaccttgtccgcctccgcccggatctcgtctttatacttggcctccgcctcggtgaacatcttccgggcgttgaggatatcctcgttgtccgtctccgcgaatccggtggcctccgcgataagctcgtcggtcatgcccgctttgcgcaggtcagccttagcgaggaactcggcgttgccgcccagcatgatgtcggtgccgcggccggccatgttggtggccacggtgacggcgccgaacttgcccgcctgggcgacgatctcggcctccttctcgtggttcttggcgttcaggacgctgtgggcgatgcccttgcgccggagcatctcggacaggtgctccgacttctcgatggacaccgtgcccaccaggacgggctggcccttctgatggcactcctcgatctgctgcacaatggcccgcagcttgcccgcctcggtcttgtagactacgtcaggccggtcaatccgggccaggggtttgttggtggggatctctacaatgtccagctcatagatagtgccgaattcctcctgctcggtcatggcggtgcccgtcataccggagagcttgtcatagaggcggaaatagttctggaaggtgatggtagccagggtcttggactcgttggcaacctccacgtgctccttggcctcgatagcctggtggagcccctcgttataccggcggccgaacatgaggcgcccggtgaactcgtccacgatgatgacctgtccgtccttcaccacgtagtcaatgtccctcttcatcacgccgtgggccttgatggcctggttgatgtggtgggagagggtggtgttctccgggtcggccaggttctcgatgttgaaggcctgctcagccttggcgatgccccgggcggtaagggtggcggtgcgggccttctcgtccaccacgtagtcagcgtccaggttgacgtcctcttcctccttgttgtccaccttggcgatgcgctggcacttcaggcgggagacgaactggtccacgatggtgtagagctgggtggacttctccccctggccggagatgataaggggggtgcgggcctcgtcgatgaggatggagtccacctcatccacgatggcaaaggagtggccgcgctggaccagctcgctggagtagatggccatgttgtcccgcaggtagtcgaagccgaactcattgttggtgccgtaggtgatatccgcctgataggcggccttcttggccgggcccatgaccccgtggatgaccaggcccacggtcaggcccatgaagcggtacaccttgcccatccactcgctgtcgcgctttgccaggtagtcgttgacggtgacgatgtggacgccctttccggccagggcgttgaggtaagcgggcagggtggccaccagggtcttgccttcaccggtcttcatctcagcgatgcggccctggtgaaggatgatgccgccgatgagctggacccggtaggggcgcatgcccagcacccgccaggccgcctcccggcaggcagcaaaggcctcgggcaggatatcgtccaacgtctcaccgttctggagacgctccttaaattcgggggtcttggcctgcagctgctggtctgtcagggccttgtactccttctccagagattcgatcttatccaccagcggcgtgatggccttgacttcgcgctgggaggaggtcccgaagattttagtaaatagactcattggaaaacacctcggatgttgatgttgatcctcgatcattgtggaaaaagggcgtcctgatggatcgtagcatctcagtatatcatacctttctcccggaaaaaaggccaaactgtaaactttgtctgcgaaaatgcccaatatccgggggagtgccggggggaaatccgccggatatgtataaatgtacgccagtggttgacatttgaccgcggctgtgttaaggtattgctcgaaaacaaaataggacagacgaagcgcgcaggaaaacagctatggcttgccgaaggagtaacactctcaggtgtccctgtcgggacgaggactgcgcgtggatgtgactctggagaagctcgacgatcgggtgccgaaggtgcaagacggaagcggggacgcttccgccaatctctcaggcaaaaggacagagacgatgaactgccctgccgcagtccaggaacggaccgcggcgagggagtttttcctcgccctatgcgacggaccgcggagcctgctccccggtccgttttttgtcccaaaggagagagaaaacactatgttggaatccttagaagccacgctctatcccatcgttgtaaacatcaacaactacctgtccagctacatcctggtcttcctgctcattgcggtgggcctgtggtactccatccggacccgcttcgttcaggtgcgctgcttcggcgagggcatgcggaaggtattcggcaacctgaccctgcggggcaaaaagcatgccagcggcatgagctccttccaggccctggccaccgccatcgccgctcaggtgggcaccggcaacatcgtgggctccgccggagccatcctcaccggcggaccgggggccatcttctggatgtggatcatcgccttcttcggcatggccaccatctacgctgaggccactctggccatcaagacccgcaaggtagaccaggagggcaatattcacggcggaccggtgtactacatcaccaccgccttccagggcgctttcggcaagttcctggctggtttcttcgccgtggccatcaccctggccctgggcttcatgggctgcatggtccagtccaactccatcggctccacattccagaccgctttcggcgtcccatcctgggtggtgggcatcgtgctggtggtcatctgcgccatcatcttcctgggcggcgtacagcgtctggcctctgtcacggagaagatcgtccctgtcatggcggccatcttcctgctgggcggcctggtggtgcttatcgcccgtatccagtacctccctgccaccattgccatgatcttccagtacgccttccagccccaggccatcatcggcggcggcttcggcgccgccctgaagaccgctatcagccagggcgccaagcggggcctgttctccaacgaggccggcatgggctccaccccccacgcccacgcccaggccaatgtgaccgacccccacgatcagggcgtggtggccatggtcggcgtgttcatcgacaccttcgtggtcctcaccctgaacgcactggtcatcatctccaccctttacaccgccgacggccctctggctggcggctacgtgggcggggtgaccgaggtgctggacaagaccaacctggcgcagaccgccttcggcactgtgatgggggccgggctgggcgccaagttcgtggccatctgcctgtttttcttcgccttctccaccgtgctggggtggaacctgtttggtaagatcaacgtgatctacctgtttggaaagaagtcccccaagctgtgcaccactatttataccgtggtcgccctcatcttcattttcctgggcaccacgatgtccaacgacctggtgtgggagctgaccgatatgttcaacaacctgatggtcattcccaacgccatcgccctgtttgccctgaccagcgtggtagtcagggtggcccggcgggaggacccggacagcacccccctgcgccggtgagccggcggccgcaagatacaggaactccttccctcggcccagctgatttgtggaaaaagtagaaacggggacccgcctcttgacaggaggcgggtctctgctgtattgtggatgtggatcatatgactgacggaagtggagtgaaaccacagggagtatgatcgtcaccatgccgaccgtctgggcgctgaaggggcccggaggggcggcttttttgcgcccttttttgccccgccatcacagaaaagcaaggaggaaacaggatgacgggatatatccactccatggagagcatggggctggtggacggtccaggggtgcgcgcagtggtctttctccagggctgccccctgcggtgccgctactgtcacaaccccgacacccagtgcaggggcggccggccggtggaggacggcacgctggtccgcaggctgctgcgcttccgcagttactttgaccgctccggcgggggcgtgaccttctccggcggcgagcctctggcccagccggactttctgctggcgtgcctcaggcggctgaaggcggagggtgtccacacctgtctggacacctcgggagccggaaggggaatttatggggagatcctggcccacaccgacctggtgctctatgatgtgaagcaccatgagccggcgggctacaaggcagtcaccggcggggacatggccgccaccctggactttgtagaagcagtgcgccgggcgggcacccccatgtgggtccgccacgtggtggtccccggcctcaccgacagccgggcccacctggagggactgcgggcctatgtggacaccctgccccatgtagagcgggtagagctgctgcccttccacaagctgggggcccacaagtatgaggctctggaacggaccgaccctctggcaggtacacccccaatggaccgggatctgtgccggcggctggagcgggaattttttgctccctacaccacaactgcggagaaaggaagagcggtatgaagatggaaaatcaggcatggaagggctttcatggcggcgagtggcagcgcagcatcgatgtgcgctcctttattcagaagaactggaccccctacgagggggacggcagctttcttaccggccccacacggcgcacccgggcggtgtgggagcggtgtgaggacctgctgcgccaggagctgcggaagggcgtgctggatgtggagacccacatcgtctccggcatcgacagctttgcccccggctatatcgaccgggagaacgaggtcatcgtgggccttcagaccgacgcgcccctcaagcgcatcgtcaacctgtacggcggaacccggatggcccggtccgccctggagcagtacggctatcgcctggacccggagatcgaggaccacttctcccagtaccgcaagacccacaacgagggggtctttgacgcttacccggagcgcacccggaaggcccgccacgccggcctgctcaccggcctgccggacgcctacggccgggggaggatcatcggggactaccgccgggttgccctgtacggcatcgaccggttggtggaggaaaaaggacgggacctggacgccctggacggccccatggacgaggagcgcgtccgcctgcgggaggaggtctcggagcagatccgggccctggaggagatgaaaaagatggccgcacggtatggggtggacctgtcccgcccctccgccactgcccgggaggcggtgcaggcggtctacctggcctatctggcagggatcaaggagaacaacggggccgccacctccctgggccgcacctccaccttcctggacatctacctccagcgggacctggaggcaggggtcatcaccgaggaggaggcccaggagctgatcgaccagttcatcatcaagctgcggctggtccgccacctgcgtacgccggagtacaacgagctcttcggcggggaccccacctgggtcaccgaggccatcggcggcatgtctattgacgggcgcaccctggtgacccgaacctccttccgctatctccacaccctgggcaacctgggcagcgccccggagcccaacctcaccgtgctgtggtcggagcacctccccgcccccttcaaggccttctgtgccaaaatgtccatcctcaccgactccatccaatacgaaaatgacgacgtgatgcgcccggtgtatggggatgactacgccatctcctgctgtgtgtccgccatggcggtgggcaaacagatgcagttcttcggcgcccggtgcaacatcgccaaatgcctgctgtacgccatcaacggcggcgtggacgagcgcaccggtgagacggtggtccccggcatccgtcccatcctggacgaggtgctctcctatgaagcggtccgggccaactatgagcaggtgctctcctatgccgcggagctgtatgcggacacggtgaacatcatccactacatgcacgacaaatacgcctatgaagccagccagatggccctccatgacactcaggtggagcggctcaccgccttcggcattgccggcctctccgtggccgccgactccctttccgccatccgctatgcctccgtccggccggtacggaatgaggccggggtggcggtggaatttgagacggagggggatttcccaaaatacggaaacgacgacgaccgggcggatgacgaggcggtgttcgtggtgcggaccttcatccgggaactgaaaaaacaccccctctaccggggagcgaagcacaccctgtccgccttgaccatcacctccaacgtgatgtacgggaaaaagacaggctccacccccgatgggcgcaagctgggagagcccctggcccccggcgccaaccccatgcacggccgggacgagaacggggccctggccagcctgaactcggtggccaagatcccctatcggaacgtgtgccaggacggggtctccaacaccttctccatcgttccccacgccctggggagggaccagggggagcgggaggccaatctggtggccattctggacggctacttctgccagggggcccaccacctgaacgtgaacgtgatggaccgggccaccctggaggacgccatggaacacccggagaaatatcccagtctcaccatccgtgtctcgggctacgcggtcaacttcaaccgcctgtcccgagagcagcaggaggaggtcatcaagcgcaccttccactgcgccctgtgagccagagagccccggcggtgacaccgccggggctcaagtacttttgagcggccgcacaggccggccgccggaaagatgctttgcagaggtccataggaggcgaccgccccacaggggcataggggcctgcagggtgatattccttccggcccctgtgcagggcgcccgcttccggctgcggggcaggtcccgggcagcagcacgccggagcgccccattgggaaaagcgcccgccccgccaggaaaacgtgccctcttttctcccttgtaacgggttgtcagacggaggattttaggatacaataaagtgctaaggtctttacatctcggcaaaggaggggcacacctatggaggtcaccctgcgcacctgtcagagcgtcccgttttacgcctgtggcggctttgatccatccgtctgcgcccatggcttctccacccggctgggcggcgtctctcccgctccctgggacagcctgaacctgggtgctaaccggggggacgccccggaacgggtggcggagaatttccgccgcttctgctctgcggcgggggccgaccccgccgccctggtgaagaaccatcaggtccacggggatctggtgcggcccgtcacccggagagatgtgatgtccagctccgctgagcccggcgtgtatgaggcggacggccttatcacggacgagcccggcctgtgcctgaccatcttttccgccgactgcatccccgtgctgctgctggacccggtgcgccgctgcgctgctgctgtccacgccggctggcgggggaccgccctgggcatcgcagcccgggccgccctccggatgcgggaggactacggctgccgcccggaacatatccgggccgccatcgggcctgggatctccccctgctgctttttgacccgcgacgacgtgcctggtgccctccgggatgggctgggcagtcaggcggagacctgcatacgcccggcggaggacgggcgctggcacgtggacctgaagggggccaacgccctctggctccgccgtgcggggctctcaccggagcacatcgccctctgcccggactgcaccgcctgccgcaccgaccgcttctggtctcatcgggtgatgggggagcggcggggcagcatggccgccattatccaacttttatgactgtgaggttccccatgggtcgtcggcgtattttcctgctgcttctcagcgcggcgctggccctgtcccttgccggctgcggccaggcggagcccccttccgcctccggcacggacttctcctctgcggcgaaggaggagcaggccatccccgcctctatcccctttaccctcgccttttaccccgagtacacgctccaccccgcccgggcggccaaccgggcaaatctgactctgggctccctgctctatgaggggctcttctcggtggacgcctcttttcaggcccagcccctgctgtgcagcggttacaccgtcagcgaggacgggctgacctggaccttcaccctgagggaggggatcaccttttccgatggcacccccctgacggggacggttgccgcccaggccctccgggacgctatggcgccggactcccactacgcccagcggctggggggcgtgcggtcggtggccgccggagaggggacggtgaccgtcactctttccacccccaacggggcgctgccggttctgctggacatccccattgccctgggagacggggaccgccccctggggaccggcccctatgtgctgacggaggaggcaacaggggagaccgtcctcactgcccgctccggctggtggcagggcaggtccctcccattccagaccatccatttagcctcggtggggcaggcggacgacctgatctcctcctttgacgccggggacatcaccctgctggatgccgacctcactggcaccaacagcctgggctactccggcagttatgaggcatgggattacagcaccaccaatctgatctatctgggcttcaacacccagcggggacctttccgctccgcccagctgcggcgtgccctgtcccggggcatcgaccggcggtccattgcggagatctcctttgcccaccacgccgtccccacagcgctacccatccaccctgacagcccgctgtaccaccaactgctgtcagactccgcggactactcccccgacgatctggtgaagggtctggaagggcagcagctgggcagcgacgggctggtctttctggtgaacagcgagaacagcagcaaggtggccgccgcccagcgcatcgtggaccagctctcaggggccggagtgtccatctctctggagcgcctttcctggaccgaatatctggccgccctggagcggggggactttgatctgtatctggcggaggtgcgcctcaccgccgacttcgatctgactcagctggtgggaacgaggggcggcctgaattacggcggctggtccgacccggccaccgacggcctgctatccgccttccgggccgcgggcgcggagctgcgctcctctgccgccgcctcactgtgctcccacctgatccagaacgcccccatcgtccccatctgcttcaaaaacggctccgtgctgacccaatggggacggctaagcggactggacccagtgcgggacaacgtgttccatgggctggagaactgggtcctggacccctgaccgcccgctccagcgtgggaggtccaccgcctttcccatcctgaactatccacaaaggtttcccttgcgcgcccccgctcccccgggggcgggacacacagacggatcgaaacataaaaaataatatatatctggaggaatggacatgagcgtactgcgctgttattcacagaaaaagaccggattcgatgtggaggcccaggggctgctgggtgctctgcgggaccagctgggcatccgcggcctggagtctgtggtcattctgaaccgctacgacgccgaccagatcgaccccgcgatctatgagcaggccaagggcatcgtcttctccgagccccaggtggatgcggtgtatgacgagactttccccgtccccgagtatccccaccgcatcctggcggtggaggccctgccggggcagttcgaccagcgggccgactccgccgcccagtgcatccagctcatggccggggtggaccgccccctgatcgcctacgccaaggtgtacctgctgggcggccggctcactgaggaggagctggacaagatccgccgctacctcatcaacccggtagagagccgggaggcctccatggacaagccggccaccctggtccgcacccacgaggcccccgaccatgtggccgtgatccagggctttaccaccctggacgagcccggactggccggcctgctctcccagctggggctggccatggacctggacgacctgaagttcctccaggcctatttccgggatgaggagaagcgggaccccaccatcacggaggtccgtgtggtggatacctactggtctgaccactgccgccacaccaccttttccacccacatcgaccgggtggagatcctggaccccgcggtggactccgcctaccgccgctacctcaccgcccgagcggaggtgtacggaccggagaaggccgcggcccggccccagaccctgatggacctggccaccatcggagccaaggtgctgaaaaagcggggcttgctccagaacctggaccagtcggaggagatcaacgcctgttccatccacgtcaccgccacggtggacggggaggcgcaggactggttgctcatgttcaagaacgagacccacaaccaccccaccgagatcgaacccttcggcggcgcggccacctgcatcggcggctgcatccgggacccgctttccggccgggcctatgtgtatcaggctctgcgcctgaccgggtgcggcgacccccgcgccccctatgaccggaccatggagggcaagctgccccagcgcaagctggccaccaccgccgccgccggctactcttcctacggcaaccagatcggcctggccaccggccatgtggccgaggtgtaccacgacggctatgtggccaagcacctggaggtgggcgccgtggtgggcgccgcgccggcctccaacgtggtgcgggagcgtcctgcccccggggacgtggtcgtcctgctgggcggccgcaccggccgggacggcatcggcggagccaccggctcctccaagagccacaacaaggcttccctcaccaccatggccagcgaggtccagaagggcaacgcccccgaggagcggaagatccagcgcctcttccgggacagccaggtcacccgcatgatcaagcggtgcaacgacttcggcgccggcggcgtctccgtggctatcggcgagctggccgccggcctgcgcatcgacttggacgcggtacgcaagaagtatgacggcctggacggcaccgaactggccatctctgagagccaggagcgcatggcagtggtggtggccccggaggacgcggaccgcttcatcgccgccgctcaggcggaaaacctggaggcataccccgtggcggtggtcacggagagccccaggatggtgatgacctggaagggccagaccatcgccgacctgtcccgggctttcctggacaccaacggggcggacaagcacacctctgtcaccgtacccgaccgctccgccgcccagcggcagccctccccccggttccaggacctgcgggacatggcctccagcctgaagtgcgcctcccgccggggactgaccgagcggtttgacggctccatcggcgccgcctccgtgctcatgcccttcggcgggagcacccagcgcaccccggcccagtctatggccgccctgctgcccgtgctgcccggccagagcaccgacctgtgctccgtgatggcctggggcttcgacccagacaccatggtccgcgaccccttcaccggtgcggctgcctcagtggtggactctatggccaagctggtggccgccggctgtgaccgccgccaggcctacctcactttccaggagtattttgagaagcttcgggacgagcccctgcgctggggcaagcccttctctgccctgctgggggccatggacgcccagctggggctggatgtggctgccatcggcggcaaggattccatgtctggctccttcctggatctggacgtgccccccacgctgatctccttcgccatcgcccccgccaaggccggggaagtgcttacgcccgaattcaagggggcggggcacccggtgtatctgctgcccggcttcccctcctatggggagctgaagactgcctgggactccttccaccagttgtgccgccagggcaaggtgaaggccgcctgggcggtggaggccggcggcgtggccgaggcggtgatgaagatgtccttcggcaactccatcggcttccaggccgatgtggatgccgccgctccctggtacggcccctgctccggcgccatcgtgtttgagctggaaggggaggagttcctccccggcatggcctggcgcatcggcaccaccacccaggagccagtcattaccatcggggaggacaccgcctccattgccgagctgctggagcggaacgaaggggtgctggagcaggtgtatcccacccaggcgggaaagacggaaaaagtggaggccatctcctgcggggagcgagcccccatcgtctgccagagccggacggcccggccccgggcggtcatccctgtcttccccggcaccaactgcgaatatgacaccgcccaggcatgcctgcgggcgggcatccagcccgagatcgtggtggtccgcaacctgtccaccgacctgctggcccagtccgctcaggcccttgaagaggccatccgccgcagtcagatggtggtcctgcccggcggcttctccggcggcgacgagcccgacggctccggaaagttcatcgcctccttcctgcgcaacccccggctgaccgatgcgatccatgacctgcttcgggaccgggacggcctgatgctgggcatctgcaacggcttccaggccctcatcaagctggggctggtcccatacggggagatccgccccatggacgatcagtgccccactctgacctacaacctgatcggccggcaccagagccggtacgtcaccacccgggtggcctcggtccgttccccctggatgctgaagtcccaggtgggcgacctgcacgccatccccatctcccacggcgagggccgctttgtggcctccgacgagatggtccgccgtctgatccagaacggccaggtggccacccagtatgtggacggggcgggcgtcccctccctggacatcgacgtcaaccccaacggctccatcatgtccatcgagggcatcttctccccggacggccgggtgttcggcaagatggggcactcggagcggtacggcgactttgtgggccggaacattcccggagataagcaccagccgctgttcgagtccggtgcggaatatttcaagtaaacacatctttcaggggcctgggatgtggcgcaccgcatctcaggtcttttgacaaactaaaaaattcccgcacgggataccgtgcgggaatttttatgagcacacaggcaggttggagcagcctgttcagatagggaacatggtcatggtcgccaacacgctgaccacaccacggaccacggcgggcaccatgccggccttgaagatggtctttagattgtagccgccggcggtcatcgccaagggaacaacgcctgtggccataggggtgaccagggaggacattgaggcaatgttgcacaggatgatggggccgatgggatcgacattcatggtcacgcaggtcatgatagccaggggatagagcacttgggtcaccgcccggttatagaggaaagaggtcatcagccatgccacgatatagaaggctgcgccaatgatatagccgttggtggtgttgcccaggagcgaggccagggcgcttcccatcagctcggcggcaccagtgccgcccagggcggtccccaggacagaaacgcccacgtaaagcatgatagtgtccatattcagattgtcaatggcttcctgctcggtgagcacgccagtggccactaccacgagagcaccaatcatggtcacttcccaggcggggaggataccggtcatcagacccaggatcacaacaacaaagacaccgtagcccagcatctcacgcacggggtccagaggctctttctgcttcatggcgcggcgtttgatctcaccgatctccacgtcgggctggtcaggcagaagcttggggacaagaaatacggagaccaggatagtgaagatgccggttatcaccagcacaggggtgtcggtccaaattgtaaaggcggtatcgtaccagccataggactcaagataaccgttgtacatcacatagtcagcggcgtaggggccaatgggaatgaccagaaagctacaggataccgaagcgatggccaccgggaacatcattttagaggggctgatgttcatcttctcgcaggtgttcttgaccataggggtaaccattacaaaggtagcgatgatactaggtacgaactggcccagtatcgtggtggctatcacataggtcatcagtacttttgtaaaggaaccgctggtggctttcagcagggcgttggacatcttgttaatcatctgcgtcctggctaagcctgctgctacaatatacatagatgccatcgtgataacggtggtgctcccgaaggtggccagggcactattagcgtcaatacacccagtaatgatcagcagcaccatcgcaatcagtgcgctaaacgccataggtatcttacgcgacaagaacaggatgaccattatggcaaaaatcgccagacaaatgtacatttgctccattgtagctgtttcctcctcaactttttcgtttttacacagtcttgcccaaacactcccctattgtgctttccataccgcctcctctcctatggccgggtctggattatattatcctcggcttaatgccgacggggattggcgggtcgtagctgcgtccgcccgtcctctcctggaactctttcttcgcttgctcgataatcgcgggagcctccagtgcatcgatagcagaggcagccatcaccttagctgcataaagcatccctttgtgggccatggcgctcttccccacggccaccatctgccaggagtgcataggggtccccgccggcatggtagtcgtgctgatctgtgccaccgggcagttccagctcacgtcacctacatccgaggaaacaaagccctgcctttcccgagccatgggcaataccacactgtgcaggggattggcacagtccgtcaatgcggtccgccgctgttccgggtcttgtatctcctctactaagtcctcgaagtatctgccccgctcctcgagggagtcgacgatcctggccgccagatccatgtcctgttggtcaaagaaatcggaaggtatctcttccagatttttttgcatcaccttcagtagagtcgtgttcagcacagtgttggaacaggcttttatgaactcaatctccacagtggtctccgtcatcatagctgccccctgggcgaccttgttgacccgctcatagagctctttcacctgatacagcttgggagcacgcatgaggtagagcccctcggcatagggctggaccacgcccggagcctttccaccggtgtcagtgatggcgtagtggatacgggtctccgggggaacgtgctccctcagaaactggatccccacgttcatcagctccagggcgtccagagcgctgcgccccaactcgggggacatggcggcgtgggccgaaacgccccgaaagtgatagcatatctgatagttggccatagtactctctgtggacacactgttcgtctcatctggatgccagctgaaggcaacgtccaccccatcaaacactccgtcgcgcgccataaagccctttccagagcctccctcctcagcagggcatccgaagaacttcactgtacccgacaagccgttatcctgcaaatactgttttactccgatggcggcggccagtgagccaacccccagcagattgtgtccacagccgtggcccggtccatcctcctgcatagcctgcttttccgtacagcccgcttgttggctcagtccaggcagggcgtcaaactcgcccagaaaagcgattacaggtccatcctgaccgtaggtccctgaaaaggcagtagcaatccccgcaaggtctcgctctacccggaacccctgttcctccagcgtgcggcagaatagatcggcggcaaagtgttcgtggaaccccgtctccgggtggtcccagatagcatcgctcatggcacacaaaagctccttatgttcttcaatggcctggagcgcccgctccttttccaatctcataattgttccgactcctccttgaaatcttcttttattttcagacatttaaaattttaattttattatttttggtcatatttcggaaatttaaatttagtatatag

SEQ ID NO: 13597 - DNA, 2002 bp, Unknown
  gut microbiota DNA sequence
cgccctacggctacataaagaacccggacgatccccggttctgggtgattgacccggaggctgccgaggtggtacgccgtatctaccgcatggcgctggacgggtacgggctggctgaaaccgccgctgccctcggtgcggatgggatcgtcaacccgacctactactggcgcagcaggggtacaagcagaggcggctccaaaagcaccgtggagcccacaaaatgggggcacaccacaatcaagaagattttgaccacgcaggaatactgtggcgatgtcatcaacttcaagagctattccaaatcctataaaatgaagcgccggattgagaacccggaggagaatcgggcaatcttcctcaatgtccatgagcctatcattgaccggccaacttgggaaaaggtgcaggcgttaaaagccgggacacggcgcaagcgccccaccgttacccaagagcccagcgtcttttccggctatctgaaatgcccggagtgcggcggcaatctgaatttccattttaaccagggcaaccacgatattaaattctttagctgccagaaccacaattccgggctccgcaaatgctcgtctacccactatatccggctggacttcttggagcaggtcgtgctctacgaggtacaccggctggcctgcttcgctaacgaatacgaaaacgacttcatcaaggcgatggtgggctgctccgccaaggtagcggaaaatgaccgggtacgcaagaagcgggagctggacgggctgctggcccgggacggggatctggatatgctctttgaacggctctatgaggacaatgtgtccggcaagatcgacgatgctcggtttgccaaaatgtccaagcggtatgagcaggagcagggcgaaaacgccaagaaaatcaaggcgcttcgtctggaactgaaaaagctggaagataagcggatggatgtggacaccttcttggaaacggtgcggcgctacaccaacgctaccgccatcaccaagcgcatggttgccgaactcattgagtatatcgaggtctactctgcggtcaaggaggacggcgttaccaatcagcgggtgacgatccactacaactgcatcggtgcctttgaggtgccggatcgccggaaaatccccgagcgggatattctgctggaaacgagaaaaggcgtagcattaagctacgccccggcggtgtaaaggtggtgtgggatatgagagcatttctctattgccgtgtcgcccatgacgattctttcgcattggaacagcaacggtttctgctccagctctacgcaaagcaggcggaatataccatcatcggcgctgcggacgaatacggcagcgggctcacattagaacgcccggcgctccagaaagtgaccgaggccgtggtcactggcaaggtggatgtggttttagtccataacctgacccggataggccgggaatggggcatgaccaaaagctacattgacctacttacccggcacaaggtaaagctcctgtgcatccggaatcggctgctgttcgacgaaaacggcgctgccccaattttggcaataaaaaatgcggagtgtcctttgtaggatactcagatcctataaggacactccgcatggtcggagtgccgggattcgaacccggggcctcatggacccgaaccatgcgcgataccaaacttcgccacaccccgttcacacgatggatactattatagctgtcttgccgccggttgtcaagagaggaaatcttctccgcatagcaaaaggcacgtccgcatatacatgctgtgaaatgcgtacagaagggaagatgccgctatggaaacggcctatcaaaagtgggaaaagcggaggcaggagcggacgggcgggcataggccggcgctgtcccaccggagaaaaaagggcagcgtggcgctgggtccgcgtgagaagcgccggatggcgcagttggcagtatgtctggcgctgtttctggtggtatttatcgga

SEQ ID NO: 13598 - DNA, 8381 bp, Unknown
  gut microbiota DNA sequence
cttagttactccgcctgatttttgatgtctttaaatttttctaaaagatttttgagccgaccgggcaagggaagaccaatcttgcagacattttcaaaaatgctgataccttcatttgacagataaaaaagcgttgttacagatcgaagaacatccgtggattctacaagatactgatccgccacatgtgcgactgagatcatcaagaaaattgccacttttttcgcaattcctttcgcgccaatattgctggacagctttttggtttgaactgcaacacagacacctgtgatataatctaagataacgaagatgaccaaagcgtataaaagcccgtccaattcgcccagaaaaaaggaaatgattttccccagatagtttaaaataatatttagcatacagaagatcctttcatttatttgcccgcccataggttttaggcaaactataaggagatgccttccgagcagaatgtaaacgaagatttccgtttaaatgttgcactttggtgtggtgtatcgtattactatatagaaagagttgttcatgtaaaaaacggagcgcattgttgtggtgtgggctcatacagcgtattatcttgtagaaaactatttggcctgtctgatatttttgaaaggagccgtctatgaaacaaaaacttggatttctgtgtactatgctgctcttgtcctgcctcttggcagccccctcctttgcggaggatgcggaagaggaggtccctgtggggacccggctgggcagcgtctataccaccgacatcgttacctatatagacggggcccccattgcctcctacaacatcggcgggaccaccgttgtttcggtgagcgacctggccggatatggctttcaggtggagtgggacccggagacccggtgggtaacggtcacgtcggcccagcggccggagcgcatgccggagcctgacattacccgggaggtccccggaacggtccggggcagctactatgccactgacatcagggtgctcttcaatggcaatgcgctggagcatgtctataacattggcgggtggatgatgttccctctgtccgaggtggggaatgtcgagccggacgggctcctctttggtaatcccaattttcaaatcggatattcccgcttcctctgcagcacagagtgggacggggagaccaggacggtccgtttctccagtctgcatccaggcgatcccctggaggtgaacgggctctcctgcacagtcaagacgatcctccctgccttcgggacatggtctgccggaattgtccaatatcaactcccctcccaggtcccgggggaagacccggtggcccactgggacgcatcggcgtgctcctgcgatttcggggaactcacctctatgagtgcggtccaggacatagttctggactatcagctttctgtggaagcgggagggctcgtcttgcgggaacctgctttggatgtgtatttcctcagtcaaatcgtgcagggggggggacgggtatttcagcgagaaggggaccacctgaccctgagaaagcacatcatgccgcagaaggatatgtatcccggctgtgcgctggcctatctctctgtccctctgcgcctggtgcggaatggacaggtattccagacggaactgggcggagtgcccctgtatgggccggacctctgcctgaatgtgagtgagctgctggagatgatccaatgatctcgaaggggtctgttgcaagatgcaatttttagacccacgcagaaaattgatgcataaaaaagttgctgagaaccgcctgaatgacggttctcagcaacttttcctttggaccaatttttcgaaattctattttgcaacaggcactttttacttgagtttacaattcagattttcaattctctttctgtatgtgtagcccggtagccggaggattcacgggtggacaccgtaatccttcgttaagtccaaggtgctgctaggccacaaataacatacagaaaggaattttaaaaatggcaactgtaagcgcaaaaatgctatctccgtcagggagcaatctttctgcctctaaaacgattgacactgagaaacggacacgccttactgttacgagaaatagcaacccctggatttattccaattatccagaagccatcggaaaaaatgggaagggccttgctctggctgaaaatggatattttttaaaccaacagactatctctggcacggcggaagtcttttactcccacacaaattacactgaaaagaaactttatgtgggcatacaggcgtataatggatcgtctaagtccgttaccgtgacatgccaaaattatggcgacagcagtggatggaacaaatcaattaatgcggtcaaaaactttttctcttcgaaaaagacctccgttaccattgcttcaggcaaggcagcatggatcgcaacttctcaggcgatacccgcagatccttcgaccccgtttaccgggatgtgtcggtttgaaaccagcggaagtgtcgtagtaaccgtatatgcataccaatctactagcgctgtggatggtaatgcagtggcgttcccctatggcttgtcgtacagtgccgataaatccatcaatcatacctatcccgccgtttatagtgggaaaggaacaggctattatctgacatttactcatgggacaaaatatgtatctgatttgctgtctcggccgtatatctatacctctaatgctcagggtggatatggaaacaacaatgagatgattcctatcaagatgattcagggtgggttaacggctgaccccaattcctccaatgacgatttaaacaatctggggaactggtgtgcgcacaactataatacgatcacattcaaaaatgataccagtaagacatataccatccacgggtatgtaggatctactggtacttgtcaggtgatgaatcttggcgggaatgtacaggcggttaatttaatcgataaattaaagacctggcggtggtgtgagattacacttgcaccaaacgacacttgttcctttgactggcagcacattgttgcctcctatggcgttggtgcctctagtcatgagtggagtgtggattaagcatactaaaattagagagcagtcattccgaagggtgatcacatatgtggtcaccctttttataggtcattatcccctcacgttttattatattctgcaaagcacctggaaaaaggtttactttctttctgttcaaatggtcttttatatttgtaaccggattattcgggacaacgtgtttggacaccgcgttgtctcgttacgtccaatttagtgatccggctcacaaattttgtaaggaggaactaatatggcatccattgatactctcattagtgttgcagaagaatgtgtgggcatgaatctgaaagaatgtgtcaagcattttgacacgagcgatcccggtgtagattggtgtgcatggtttgtgcgccagtgtggagccaaggctgatatgaattttggtagctccaatactgcctctaaactttggggcctcaacggaaactttgcgtttgttgggagcaacttcccaaaggagggggatttggcttttattgatccgaaaggaaatgataatatcacacacattgggatcatctccgaaatcacggatgatcagattattactgttgaagggaatatgagcggagatactatctacgacagtattgtcaagaatggaaagtatgatttgaaaggatacagcagtgccttcggccacatcgtctggtacggaagcaacagctgacgcagtcggaggatgttgtggtaaggaccaatacctggacaacacaaactttttcgcagtgttcactatatagacagtctgtagacggataaattcttagtaaacaactgcaaaatgagggcggcacctctctattcagagatgccgccctttattttcctagtttttcgtataacaagactggcggcttgaggataggtcagttgttttgttgaccccataaaataaaggcatacggaaggagtatgagtctgaaaagaacgaataagagatctggcccgcgcggcaagtgatatgcttataaaaataggggctggtaatgaaactctgatccattaccagtcccgtgcctttttgctttttaaagatatgtgttcataaatatggagtgtcagttcagaagaaggtgaatgtgctcagagatcttggaccataaacagcgttatagaaatgagctccgaaggctccgtcgctgatttcgtaaaacagcacgggcagagtcatttctgtgtctcgatagattgctgctgtttggtcctcaacacgaatcgcaatgatttgatacttcccgttgattcccagggcacagtcctgtccatcggaaaccattcggtaaaccgatggatatttcatagattttatggtactgccagtaaaatcccgttcttctaaatactcgatagagttgatatctgtacgtctcagagaacacaaaaaggtggattctagcaggcaatagtcaaaaatctgttcgccctcagcactgggaaggaagctgcaatcggactgcgtatcaccgagcagaagacctctgaccccatccagttcaagaaatatcataaactggctgccgttggttttcagatttcccagaaatccaaggccatctgtaaaagcgtattcgaagttggatctcaattttcctccaggcaaaattgtgctgattcccagtgtgccgttctccaaattggtataactgtacacgattttgcccgagtccatcgtaagcagagaaggaatgttaaaatcaactgcatagcatttcccatgatcaatcagcgcgtcaggagcttccgattgatttgaatgataatagatagaataatcagattcaatggaatcagatattgtgatagtggagtatgaatagccatcgtcaaaaagagccccgcttgtacagtagaccgctgatgggagtaggatttctgaaacaagagtcatattcggatattccaggagaactaatttctcgctcatgtatgtaaatccgacctcgcgggtgagctcaatttcaaaagcgtcataatttacactgagaaatatgtagtcctcgttcatgtccagtatctcgaccctctggtcctctgatacatctaagctctcatacagacccagtgcagacgcatgagtcagaggttcgttctgatttgtcaggaatccctcctggtccggctgcgtgctccccgcggaacctgagctttcagtcggagcagaggtgctggcggagctgttaggggcttggctgttggtcccgcatccactcattatcaacaagagcgcaaggagtataaagaatatggactttttaatcataacgtcacctctctaaatgccaaagacctttcaatgacaaataggtataattctcaaataaaagctattccaatatttttacagatctatgtgaggggttgaccagttatctggcagagggagtagcaacaggagaaattcctgttgctactcccaaaagcaatttacactgtgctggcatccagacggttgtaatagccgttgctcgattcgactgcggtctccatttcttcgagggtataagtgtaagtgccggaataagtgggatgaggatcgcaaattgtgatggtcttaaaatcggtcgatgtgttgaagtaataacccttcacagcaataaagtgcccactgccagatgtgtagttgggcatttctttcacgttgagtgtaagcggaaaatcatttctgaggctcgaccgaacactagtttccagggcagcggtggaaattgtgacacgctggaaacgccgtgtatccgaagttttagagagcaggctgtttaacgtattgcagatctgtgcaccgctagttccgctggtcgtggtcccaagcagggaagccatctctttctgggtataggtgcccaggcccagggtctttgcaaccatacaagcagtcgctggtccacagtaatacccattttcctgggtgatcacgctcatagaaagatagttattatagatcgccctggtgaggttatcgcgggcaagttgctgttcaatcagcgcgttacattcactgatatgctccagttcctcttgggtgagaggcggttcagtaactgtattgccaatcatactgatgttcgttgcggatacagttccaaacaaaaaggtggcgaccaaaagtgtgcataaaacgggaatgatgcgagatctttttttcatggaaattttgcccctttctaatttgcgccgtcaaagtctgtgcctgttgcctgtcattgattcagcttcctgctttagatacgcttagacttattgggatagatgagaatgcatgggtgcctattcggggcatggaaagtactacgtcatgggaatcacccccaaaagtataacaagttattctttgattttccctctgccttataagacggaatttaattgaaaaatgcaacgtgattttgcggtgtaacagcaaaaaatgaaaaaatagttaactatgttgcacctaataaaaattgacgtttatctataaagaaggcttccgaaagattttcggaagccttcttaaaaatgttgggagggcagaattataaccatttcaagtctgcgatgttgcaaattttaaaaaaagcgtcttttagtatgggaaggataaagcagcaccataaaagatttttaaactgaggtttactttctaagcggcattctctctttcatttccagattcgttctgggagtgggggatatgctgattgaaagcattacactagcgcagagagataataaggaattagaggcattgatttatcgctttagaccactgattcgaaagtgtggccgtcagcttcatatagaagatggagaacaggagatggtggttgctttcattgaactgatcaaacggttccgtcctgaaaggttgagaagtcaagatgacggtaaagtggtccagtatatcaaaaatgccatgaattatagttgctttaagatatacaagaagcaccacaatccaattgccactatcattagcttggaagaaataacagttaaagaggaagctgcgtatttaacaggcagcgaccagagccaggatatgcaattggaccagacatttcagctggatttacttacggagaaggagcgtattgttatttttctaatgttcgagaaaagcataagtgcagcggctatcgcacggcgctggggatgtagccggcaatctgtcaatcagattaaattaaaagccctcaataagctgaaaagccaaatttctgctcatagctcatctggtgggggggattcaaagtgagagtggaaggagttaagcactcatttttcatcagggtatctctgtttaagtaattcaaaggttctgcgctttgcacgagtaacagccatgcgcacgctgttgggctgtatccccaaatcactggccatactggaataagattttccttccacaaaacggcttgtcaaaagatactgatcttttgcatccaactcatgaaagaccgccataaacttttgtgcatcctctttttgaaggtaaagcagttcggggcccttctcttcactgtcaaggatttctgcgatatacttaagatctgtgaaagttgagaccgccagtttgcgatttttccgcaaatagttataagaagtgttgattgatgccgttttaatgtaatttactagccttgctgtggacagctttttaatagtagataaattccgaatgagacttatcacgacattttgaaggatatcttcggccagccaggggtcactggtgactgtaaagatttcgtgatacataagacgatagtaggaccgataaagattttccataaaacttctgtcatcttcatcttcgattgctaggatggctgggggaataaaaaacatcattgatccctccggccgcattgattgattacagaatggagaagatccatatccgaaaggatgagcagcagcgcatgttgacggtctggagagagccggagaaagatgctgatgagatcagagactgttttcccatcggcgagcctcttttgaagaaggtcgattgggatgctggaggaggtgcgtcctagcaggtaatcagtcgtgacatggaaatagtctgcaatcattttcagtttgtccaaatcaggaagatgtcggccgtgttcgtaattggatattgtaccaggtgacactgatataatttctgcaagttggtcctgtgtcagcccatgatcctggcgcagctcggccagaagttcaccaaaatgcgccatcgactgccccctccttgataaattatgcttttattatataatttc

SEQ ID NO: 13599 - DNA, 579 bp, Unknown
  gut microbiota DNA sequence
ggtgccattggcagccatagagccgtccagcagcttgatgccgttgaagttggcggaatcggcgatacggttgatctcgctcttgagctgatcgacctccttctggagctgcttgcggtcggtgccgtcctcaaaggtgccgttggcggactgctcggccagctcatacatgcggttgagcatgtcgtggacctcggtcagggcgccttcggcggtctgcaccagggagatgccgtccttggcgttgtcctgggccttgtccaggccggtgatctgggcgcgcatcttctcggagatggcgaggcccgcggcgtcgtcaccggcgcggttgatcttgtagccggaggacagcttctccaggttcttggacagggcggaggtgttgttggcgtagttgcggtaggcgttcatcgccatgatgttatgctggatcctcatttcgatcgtttcctttctttctgaaatgatattgggtttgctggtccaacgcaccgatccctcatgtgcgttgagtggtttggcagaccaacacagacgccgtggcctttggcgggctgtgtccctgcacttcgatttatt

SEQ ID NO: 13600 - DNA, 14700 bp, Unknown
  gut microbiota DNA sequence
atgcggaacagggacagggggcggtatgcatcgcataccgccccctatccttttgttataagacagaaagagccgtcccactggtctcagggggacggctcttatctattctgaattctgatcgatctggccccggtcacaggtgttttctcgccacggcctcagcgatctgctccctgctctgctctgtctcctcaggggcccgcatgcagaactcctggaacagcacgtccagcacaaagagctgggccatccgggcattgacggagccggcctggagcggcccctcgtcggcgccgcactggagcaccacatccgccaactggccccccggcgattttgggaaacgggacaccagcaccaccttcacctgccgctgccgggccacctccagcaggtcctggaagtcccgggtggagccggagtaagagaagaacaggaccagttcgtccgggtccatcagcgcaagggtattcatctgaaggtgggagtcgggcacaaacaggaatttgggggacacggtggaaaagagggtccaggcctcctctgagagcaccatggagctgccctgtcccatgcacaccacccggcgggatcgccggagcaggtccacggcccgggacacctgtctggggtccagcagctggatggtctgctccagcaccgccacattctctcccagcagctttttgcacatggcgtgaaagccgctgctctcttggaggatggccgcgtccgcccggtggctgtcccgggtcatcgatgccttggccagctccagcttgaaggcgttgtatccagtcagccccagcctccggcagaagcgggagatggtagcgtcagccacggtgcactcctccgccagctcggagatggacatgtactggacatcgatccggtgcctcagcacatagtcggccaccttcttttccgagttggtcagctgaaaatactggctgctaatggtctcaaatatgttatgcgccgtcatgctctctccttcctcttctcccccggccgtcctccggccctcagttctgctccaggatctgcccgatcagctgatccgccatgatcaggctgcggggcacgtggaagggccctttgaaggtgcagcccttgcaggcgggctcggtgggcttgccgtcccggcggagatagccgtaccactcgccgtactccgggtccgcgaaataggtcttgcagtagtccacggtcttgtagaaccagtccagatacttctcgtccccgctgtcccggtacatcatcagactggcgatcaggatctcgttgtggggccaccacagcttcatgtcgtgctcataggcctccggcgggaatcccatgcagtccacgaagtagagcaggccgccgtactccttgtcccagccccgctcgatggccatatcaaagacctccatggccttcgcccgcagctccgggtcgtcctcgtacttggcctcctccatcaggaaccagctgcactcgatgtcgtggcccggattgacgaagcggccggcggagatgtcggaccagaactcgccgttcatgcccacggtctccagggtgcacttcagctccggcttgtggtgatagcggaagatggtctccacgcactgcttggcccgggcgtcatagacctcccggtgctccgggtcgcagcggcgcatcactgaggtgatgttcagatagatcatggggtcggccagggcgcggccgctccgggtctccgggatggtcttggggcccatgccggcggggtccttgatgaggccgttgttcagctgatagatcagctcataggcccggcgggcccgctccaggcactccctgtcccccgtgaccgcgtaatactccgcgttggccagggcgtagaagccctcggagaagcagtagcggcgctggcgcagcggcttgccgtcgccggtgacggtgaagtacatccggccgtccgcctcccggttgatgcagtgcttctccatgaagtccagacagctcttgctggcctccagccactccggccgggtgccgtagacggtgcacagataggcgtaggtccagccacaccgcccctgcatccacacgctcttgtccgtggagaacaggcgccctgtccggtcgatacaggtgtagacgccgccgtgctccttgtccatgccgtatttcagccaaaattcggcactggacgccagttccttcctgacccactccctggtctcctgcaatctctttctgtccataaatttcaaccccttatgacggcaaaagccgctgttttttggatttttccacaacgatccaaatctgtaactccatcatagcactccaggaaagttttttcaatgaaataatttgtgaaaaatttttcccgcattttaggtgacaatccactccctgcatgatacaattatacaagagcgttggaatatctcccccctcgattgggcgtcttgctccaaaccgcgcttccggcttctcattatatccccgaacgacgggaatcgcaacagccagaaagaaggacttccaaaaattttaggaggcgatttgtcgtgaatcagtacggtatccaatttgaggtcaaaaacaagcccagcctggacccggagttcatgcccatcctgaagttcaaccgcgcgtttcttgagacggcgaagaagccggtctccattgccctggagcgctccggcggccaggtggcggtgtgtgacaccttcatccacggcaccccggagatgcgccaggccgaccaatactacatcgaccgcctggtcaagtccatgctgtggatgaagggcggcttcaaggtgtatgtcagcggggacgaggacatttacagctatctgaaaaagaccttcgcccccggcggcgcccgttcctttgactccgacttcatggccggcgtgtacgagcgccccttcgaggtggtcttctgcgacaaggtcccccaggaggcgggcgcctcccaggctgtcggccgccatctggcgggctgccgggtgggcttcgacgccggcggcagcgaccgcaaggtgtccgctgtcatcgacggcgagcccgtctactccgaggaagtggtctggttccccaagatcaccgaggaccccgactatcactatgacggcatcgtctccgctttcaagtccgccgccgagaagatgccccgggtggatgcggtgggcgtctcctccgccggcatctacatcgacaaccggactatggtagcctccctgttcctgaaggtgcccaaagacaagttcaacgagaaggtaaaggacatctatatccgggccgcccgggacgtgttcggccccgacatccccctggtggtgtgcaacgacggcgacgtgtccgccctggcgggcgccatgggcctgggcgagaacaacgtactgggcatcgccatgggcaccagcgaggctgtgggctatgtggacgagaagggcaacatcaccggctggctcaacgagctggctttcatgccggtggacgtgaaccccgacgccatggaggatgagtggtccggcgacatcggctgcggcgtgaagtacttctcccaggacggcgtcatcaagctggctccccgggcgggcatcaacctgtccgagtccctctcccccgcggagaagctgaaggaggtccagaagctgatggatcaggacggcaacaacgccgccgagatctaccgctccatcggcacctatctgggccacgccctggcctactactacgacctgtatcactgcaggcacgtgctgctcctgggccgggtcatgtccggcaagggcggcgacctggttctggaggaggccaagcgggtgctggccgacgagtatcctgagtgctccggcaagctcttccccgccctgcccgacgagaaatcccgccgcgtgggccagtctgtggccgccgccagcctgccggaggtgtaagcgcccatgatcatcggcaacgccaagctgttcctggacggcgccttccaggagggctccctcacctttgaaaacggcgtcatcaccgctgtgggccccgcccagggtccctgtgacctggacgccgggggaaagtatctggtccccggcttcctcgatgtccacacccacggggccatgaacgaggacttctccgacgggcggcccgaaggactgcccatcatgtcccgccactacgccgcccacggcgtcacctcctttctggccaccaccatgaccctgaaggaggagaccctcacccccgccatgcacgccatccgggacttccgccgcccggcggacggcgccaagtgcgccggcatccacctggagggtcccttcctgtgctacgccaagcggggcgcccaggcggcggagaacctgcacgagccggacgcttccatgttccaccgcctcaatgaggccagcggcggcatggtccgcctgatcaccgtggcgccggaggaggagggggccatcccctttatccgggaggtctcccagacctgcaccgtctccctcggccacaccactgccggctatgagaccgccatggcggcctatggtgcgggggccagccacgccacccacctcttcaacgccatgccctccttcctccaccgggagcccggggtcatcggcgcggccctggacagcggcgccacggtggagctgatctgtgacggcctgcacatccatcccgccgtcatccgggccacccacaagctgtttggagacaagctggtcatcatcagcgactccctgcgctgcgccggcatgcccgacggcgagtatgagctgggcgggcagcccatcgagatgaagggcggcaaggccaccctgcgcgggaccgacaccctggccggctcctcctccaacctgctctccgagctgcaaaacgtggtggcattcggcctgcctctggaggacgccgtcaccgccctcacccttgctcccgccagggccgtccggctggaccaccagatcggctccttggccgtgggcaagcaggccgacctggtgctgctcaacccagacctcaccctggactccgtctatgtggacggggaaaaggtccgctgaatttagaaggaggaatcccccatgaagatcatttccgcaaaggactatcaggcgctcagccgcgccgccgccaatatcatctctgcccaggtcatcctcaagcccagctgtgtcctgggcctggccaccggctccagtccggtgggcacctatcagcagctcatcgagtggtacaagaagggtgacctggacttctcccaggtccgcaccgtcaacctggacgagtatgtggggctggacaaggaccacgaccagagctacgcctacttcatgcgcaccaacctgttcaaccacatcaacgtggaccccgccaacaccaatatcccggacggcatggcccccgacgaggcggaggagtgcgcccgctacgacaaggtcatccgtgacctgggcggcatcgacctgcagctgctgggcctgggcgtcaacggccacatcggcttcaacgagcccgccgacgccttctccaccggcacccatcaggtcaccctcaccgagagcacccgggacgccaacaagcgcttcttcgccagcatcgacgaggtgcccacccacgcccgcaccatgggcacccgggagatccttcaggcccgccgggtgctgatggtggcctccggcgccaacaaggcccaggccatcaaggacgctttcttcggccccgtcactccccaggtccctgcctccatccttcagtaccaccccgacttcaccctggtggctgatgaggcggccctctccctcctgtaaggagccggacatatttttaaacccagcagggccgcggaactgttgttccgcggccctgcttccatctcttttctgtctgcgctcccctcacagtcgggccacgccggtctcccgggccgcctgggccaccgcctgggccactgcgggcaccacacgggggtcaaagggcttggggatgatattctcctccgacagctcctcctccccgatcaggccggccagggcccgggcagcggccatcttcatctcctcgttgatgtcgctggcccgcacatccagcgcgccccggaacaccccggggaaggccagcacgttgttgatctggttgggatagtcgctccggccggtggccaccacccgggctccccccgccttggcctcctctgggaagatctccggcgtggggttggcacaggcaaagacgacggcgtccttcgccatggtgcccaccatctccggggtcaccaccttgggggcggagacgccgatgaacacatctgcccccaccatcatctccgccagggtgccggtgcggcgctccaggttggtcacctcggcaatggcggcctgtgcctcgttgagctgaggatctcctttacacaccgcgccaaacttatcgcacagggtgatgtgccggaacccggcggacagcagcagcttggtgatggagatggccgccgagcccgcgccggagaacaccaccttcacgtcctccttcttcttccccaccacccgcagggcgttggtgaggccggccagggcgatgatggccgtgccgtgctggtcgtcgtggaacaccgggatatcgcacatctccttcagccggcgctcgatctcaaagcagcggggggcggagatgtcctccaggttgatgccgccgaaggagccggagatgttgtacaccgtctggacgaactcgtccacatccttggtcctgacacacagggggaacgcgtcgatgccgccgaaggtcttgaacaggacgcacttgccctccatcaccggcatcccggcctcggggccgatgtcccccaggcccagcacggcggtgccgtcggtgatgaccgccaccaggttgtgccgccgggtgagctcgtagctctggctggggtccttctggatctccaggcagggctgggccaccccgggggtgtaggccaccgacagctcctccttgttccccgcgggcaccgtggccaccacctcgatctttcccttccactcccgatgcagccggagggcctctttcgcgtaatccataactccattcctttccatgtatcatctcggtcccgcgcacgggacttccttccataccgctattataccggatcggacaaaaatcgcaaccgctttctcctcccctctcccacatttctttctcccggtgccgggggccttttggtgcatctctccccgccccgcgggaaagatatccggtgcgggaggcgcccctccccgcctacgccggcccaaacaggtccccgtgcgcgaaaagacgaaaaaaatcacgtttttgcttttctttcaggggaaaatatactatactattagggactgtatccgtactgcatcccgggcgctggcacatggtgttttccagcccccggcctttttcagagaggaggcggcctgctttggagcagcaactgacgaaaaaatacggcctgcctaccgccatctgcatggtggtcggcatcgtcatcggcagcggcatctttttcaaagcggaaaagatcctcaacgccaccggcggcgacctgcgcacaggcatcctggcctggatcatcggcggcctgatcgccatctccaacgcctgcgcctttgccgtcatggccacccgctatcagaaggtggggggcatggtggactatgccgaggccgccgtaggccgggcctacggctactatctgggctggttcctggccgcggtctactatccctgtctgaccagcaccctggcctgggtgtccgcccgctatacctgtgtcctgctgggctacgacatcgtcagcggcgagtgcatgaccatcaccctgttctatctggtggccgcctacttcatcaacaccatggccccccgtctggccggcaagctccaggtctccatgaccctcatcaagctggtccccatcctgctcatggccgggatgggcactgcggcagggctgcggagcggcatgaccgccgccaacttcgcccaggtcaccgccgacaccgttaccgcctaccccctcttcaccgccctggccgccacggccttcgcctatgagggctgggtggtggccaccaccatcaacgcggagctcaaggacccgaagcgcaccctgcccctggccctggtctgcggggtgggcatcatcatgctgatctatctgttctactatgtgggcatcgccggagcagtccccaacgccgtcatgatggagagcggggagcatggcgcaaggctggctttctccactatctttggccaggctgggggcaccatactgtttgtctttgtgctcatctcctgcctgggcacctgcaacgggctgatgatgggctgcacccggggattttacgccctggcggcccggggaacagggcccaagcctcagatcctctcccaggtggacccctccaccggcatgacctccaacgcggctgcagccggactgctggcctgcgccttctgggggacctacttctatttcggctgcctccaaaatcatctgggccccttccgctttgactcctccgagatccccatcatcaccctctacgccatgtacctccccatcttcctgggcttcatgcgggaagccagggaggagccgcccttccgccgcttcgtgctccccgccctggccctgtgcagcggcctgttcatggtgatcgccggcatcctgtcctaccagtgggactgcctctattatctgctcttcttcgccgtctttatggcggcgggggcactcttctacaagcggaagagcctctgagcccgctgtcatcggtcagcccggagccccccaatgggggctccgggcttttttcagcggacagagaggcaggaatgtggtccggtcccctttcttcaggcagcggtgcctggggcagccgagacagaaaagaagaacacaaaagcgcaggggctgtaagtccctgcgcttcgcctcttttattccgctcccgtctctgggccgcacccccgggatcacttctttttgactgcctcggcctgatccaagagctcctccgcgctcctgcgcagggccggagtcaccgccgccccgccgatgagccgggccagctcctcgatgcggccggcgcggtccagccgctccacccgggtgtaggtccggccgtcccgctcccccttctccaccgagaaatgggtgtccgccatggcggcgatctggggcaggtgggtgacgcagagcacctgcttcttccgggccacctgggccatcttttccgccaccttctgggccgcccggccggacactccggtgtccacctcgtcaaagaccaggctgtcgatgccgtcgtcctccgccagcacatttttcagcgccagcatgatgcgggccagctctcctccggaggccaccttctggatgggcttgagagcctcgcccacgttggcggacatgaggaactgcacctcgtccccgccggtctcatccagcccccaggccccctccttgggggcgaactccacctggaagcggactttgggcatgtccagctggcgcagctcctcctgcacccgggtctggagagcctcggccgcccgtctgcgggcctgggagagcacccccgcccgcctcgccgcctcctccctggccttctccagcttctggctcaggcgggcgatggtgtcgtcggcgtactggatctggtccagctcctggcggctccgctccaggtaatccagcatctcctctactgtggagccgtacttctttttcagccggtagatggtatccagccgcccctccagctcgtccagttcctccggggagaagtccagctcctcctccagatcccgcagcagctccaccgcgtcgtccgcctcacaccgcagctgggacagcttctcctggagctgggagaggcggtcgctgtaccgggccaccccctggacggccccctcggcctctgcgagcaggtcggccgctccccggccgtcctcgtccccggacagggcgtactgggcggtctggaccgcatccatcagcttcccggcgctgcgcagaagctggcgccgcccgtccagttcccggtcctcccccggcttcaggtcggcccgctccagctccccgatctggaaggtgagggtgtccacccggcgggagcgctccgcctcgtccatctccagttccccgatctttttccgcagctccgccaaagctccgtatgcctcccggaaggaggccagctccccctccgtgtgtccggagcggtccagatagcccagatggcaggccgggtccagcagctgctgtccgtcgtgctggccgtggatgttcagcagctgacgccccagctcccgcagctgggccacggtcaccagccgcccgtccacccggcagatattccggccgtccccctggatctcccgctggaggagcagctcctcccccgccgggaccccgttctcctccagccagcccagcccggacacgccggtgaacaccgcgttgaccaaggccgacttcgccccggtgcggatcagctcccggctggtccgctcccccagcaccgcactgatggcgtcaatgacgatggacttgcccgctccggtctcaccggtcagagcgttgaagccaggatcgaactggatatcggcccgctcgatgaccgcgatattctcaatgtgaagcagagaaagcatctttgcccctcctgacctgtctcaaactcactccagcagcttgtgggcttcgctgcaaaatgcctctgccgaggcgctgtcccgcatgatgagcatcccggtgtcgtcccccgccagactgcccaccatcccggcgatctccatcccgtccagggcggagcaggccgccgaggccagcccgggcatggtcttgaccaccaccagattctgggccgcctccaccgagaccaccccctccttgaagatgttccgcagccggcccgcggagctctttccctcctgccggtccgctgccacatagcggtagctgccggagggggccagctccttcaccagccgcagctgcttgatgtcccgggaaatggtggcttgggtggtggtgaacccccgcagcttcagctcagcgagcagctgctcctgggtctccacatccatcatgcggatcacattcaaaatctccgcctgtctcgctcgcttcacagctcataccctcccagcttctgatagatgatctgataaaagttccgttccgtcagccggatcagccgggtggactgacgggcacaggagatctccacccgctccgttccggtgatgcgcagagccttgcccccgtccaccgccaggtacagatgcttccggctcccccgggggagctggacggtgaccagccgctccggcgccagcaccatggaccgggtggacagctggtgggcgcacacaggagtgacgatgatgtcccgtgaggtgggctccacgataggcccgcccgctgacatggagtaggcggtggaaccggtgggggtggagacgatgaccccatcccccatcaggttggtgaccagcaccccgtccgcccggacctccatctcggccacccgggccatggagcccttggagatcaccgcgtcgttcagggccaggtcctccgagagcaccttctccccccggagcacccggacggagagcatcatccgctcctcggtccgatactcgccggcggccagcagggtgagcaggctcagctcgccccgctccagctccgccataaagcccacgctccccatgttcacccccaggatgggcacgtcgtggagggtggcgtcccgggccgcgtggaggatggtcccgtctccgccgaagcagagcagcacatccgcccgcttcagctcctcctccatgctgcccagcttcacctgccggggcagatccagccggtcccccttcctgggggcaaaggggaggcagagggccgtctccgccccggcgttgttcaagatcctgcgggcctccagcgccacccgcaggcccctgtcccgataggggttggaactgagcagcactctcacggctgtccctccttcccctggagggaccggtgggactcctccaccagctccctcaggtctccggaccagaccgggccctccccctcggtccccagccagcccaggtattcaatattgccctccgggccggtgatgggggaaaaggtgatatcctttacagaaaatcccgcctcccgggcatggtccaggaagtgctccagcacctccagatggaccgccgggtcccgaaccaccccttttttgcccaccttttcccggccggcctcgaactggggcttgaccaggcacaccgcctgggccccctcccgcaccagggggcgcatggggggcaggatcagccggagagagatgaaggccacgtccacggagaagaagtccaggggctccgggatctgctccccggtgaggtagcgggcgttggtccgctccatgcacaccactctggggtcgctgcgcagccgccagtccagctggttgtagccggagtctacggcgtacaccttctccgcgccccgctggagcatgcagtcggtgaagccgccggtggaggagccgatgtcggcacacaccgccccctccagacggatgggccagcgctccaccgccttctccagcttcagtcccccccggctcacataggccagggtcctgccccgcacctcgatggcacagccgggccccacctgggtgcccgccttgtccaccttccgcccatccacatagacctgccccgccatgatcatggcctgggccttctggcggctctccgccagtccccgggcagtcagttcaacatccagccgctgttttgtcaaatcgcagcacctccatggcccgctgggccagcccggctccgtccagttccaggagccgcttcaattctcccacgctgccgtggggggtaaaggtatcgccggagctgcacagcgccacccgggcgctgatgccggcctgctccagcgcgcaggcgagccgctctcccacgctgccggcggagacgctgtcctccgccaccagcagggcgcccgtccggcgcacagagtccagcaccggagcggcatccagcggtgtaatgatgttcagctttacaacttccgcctctacgccccgctcctccagcagccgggccgcctggagcacatcgttgatctccaccccgtaggacaccagcgtgatgtgggccccccgtcgcaggacggccgctggggcccggccgctgtcctcccggtactccccttcgccgccccggggatagcgcaccgccgccggcccgtcccagcccaggaccgcctcctccagcatcgccttcagctcggcaaaattggcgggggcatagacccgcatcccagggacgctgttgagataggacacgtcaaagaccccctggtgggtctcaccatcctccccaaccagcccggcccggtccactgccagcaccacatgcagccggtccagagccacgtcgtggagcagcatgtcataggcccgctggaggaaggtggaatagaccgccaccaccgggaccgccccctgcttggccatgccggcggccatggacaccgcgcagccttcggcaatgcccacatcgaaaaagcggtccgggaactggagggcaaagtaatccagcccagtcccggtctgcatagccgccgtgacggcgcagacccgcgggtcctcccgggccagccgggccacctcccgcccaaacacggaggagaaactggcccgcccctgcttcaggggctcccctgtctctggatcaaagggggacacgccgtggtaggcgtcgggattctcctcagcaggtgtgaagtcttttccctttatggtcctgacatggagcaggaccggctccttcaggtcccgggcgtagcggaggatctccgtcagctcccgcaggtcgtggccgttcaccggccccagataggtgaagcccatattctcaaacaggctgctggggagcaggctctccttcaccgctttcttcagccggtgggtcacccggtagatcttccgcccgaaccaggtggcgttcatcaccttccggtagtacttcttgaaggtgaggtactggggcttcaggcgctggcgggccaggtgctccgccacgccgcccacgttcttggtgatggacatgccgttgtcgttgaggatgaccagcagctggcccctgctctgccccgcggtggacaggccctcataggccagtccgccggtgagcgctccgtctccgatgagagccagcacccggtagtcctcccccagcatgtccctggcccgggccatccccaccgccaccgccaccgagttggaggcgtgtccggcgatgaatgcgtcatggacgctctcagatggcttggggaagccggcgatcccgccgagctgccggatggtggacatctgctcccgccggcctgtgagcatcttgtgtgggtagctctgatggcccacgtcaaagaccagccggtcccggctggtgtcgaacacccggtggatggccacggtgagctccaccacccccaggttggaggacagatgccctccggtccgggctacgtcccggatcagctcctgccggagctggccgcacagctcccgggcctcctggtcccccatccccgccaggatggggccatatgaggttgttttgtctctcttatccaaaaaa

SEQ ID NO: 13601 - DNA, 5492 bp, Unknown
  gut microbiota DNA sequence
ccggtgatgccaatggccgtgcccagcagagcccccatcagcacctgggggagcgtgtggcccaggtgctcattcagcttctttttgggcttgagctcctccggcatctccttccagtgggccatcacatagttgagcaccttggcctgctccccagcggcccggcgcacattacaggcgtcgtacatcaccaccagggccaccaccgccgccagggagaacaggggcgcctgccagccgtagatctgcccgatggacgccgtagccgcgcagatgaaggaggagtgggagctgggcatgtcgccgctgcctaccatccgtttcaggtccaagttccggttcacgaccagattggccactgtcttgatcagctgggccaggaaccacgccaggatggacagatccagcaccagattccccgttaaaaaaccggtacgcccctcaaacatttgccttcactcccttctgtcccgtctgttttcacttccgccgggaggccagctcccgggccagccagatgaggaagtccggctgcgggaatccgttcagtgcggacactgcctcctccgtcagctgctccaccagcgcgccgctcccctccagccccagggccgtgacgaaggtgctcttctctctggagcggtccgagcccaccggcttgccaaactcctcggtggtgcccgtcacgtccagcatgtcgtcccggatctggaaggcccggcccagcttctgagcatagcgggccacggcccgccgctgctccgggctcccccccgcggcaatacaccccagctccgccgcggcggagatcagggcgccggtcttcaggctctggagcagctccagctcactcagggacaggctccgcccctcccccgccatatccagcacctgtccccccaccatgccggagggaccggccgcccgggagaggcagtccaccccctctgccatctgctccggggagagcagatcccgccgggcagtcagcatctgaaaggccgcggtgagcaggccgtccccggccagcaccgcggtggcctccccatacaccctgtggttggtggggcgcccccggcgcaggtcgtcgtcgtccatgcagggcaggtcgtcatggatcagggagtaggtatgcaccatctccaccccgcaggcaaagggcagggcccgctccgggtcgccgccgcacaggcggcagcactccagggtcagcacgggccggacccgctttccccccgccatcaggctgtactccatggcctcctggaggtccgcgtaccggtcgtcctcccggaatatggcccccagggcctcctcgatccgcttctggtcgccggccagccggcgctcaaattccaggctcatatcacagttctcctccaaagggctcctcccggggctgtccgtcctcccctgcggtgagcagggtcaccttctgctccgcctgatccaggcgcttggtgcactccagcatcagcttcgccccctcttcaaagagcgccatggcctcatccagcggggcgtccccccgctccagcaggcccacgatctcctccagccgggccatggactgctcaaaatccagcttttttcccgccatcacaggcacttcctttcctccacccggcacgccaggctgccgtccgacaggcgcagctccagccgctctcccggggccgcatccttgacagaggcgatcaatgttccattctcatttcgggcgatggagtagccccggcccagcaccttcagcgggctcatggcgtccagcgccgcgctgtcccgggccaggcgctcccgcgcccgggacaggatctgtccggccccgtgtcccagccgctgtccctggtagtccagcagcagcctccggtcccggaaataggcccccgggtcggtgagcatccggctgcggcccagccgctccagatccttcctgcgccgggccagcaggctgccggtccccttctccagccgcttggccagcccgtccagccaggcgtacagctcattctggtcgggcaccgccagctccgccccgttggagggggtggccgcccgcaggtcggctacaaaatcagcgatggtcacgtcgggctcatggcctacggcggagatcaccgggatctgggagcggtagatggcccgggccacgcactcctcgttaaaggcccacaggtcctccatggagccgcccccccggccggtgatgatcaggtcggcggcttgatggaggttggcccagtccagggcggcggcgatctcctccgccgccccctccccctgcacccgcaccggcaggacgcgcacctgggccaggggatatctggcccccaggatgcgcaacatgtcccgcaccgccgcccctgccggagaggtgatcagggcgatgcgccgtggataggcgggcaaaggccgtttgtgggcctggtcgaacaggccctcccgcagcagcttctccttcagctgctcaaaggctacgtgcaggtcccccgctccctccggggtcaggcggacgcagtacagctgatactgcccgtcccgtgggaacacggtgatccgcccggcggcgatgacctgcatcccgttctccgggcggaagcgcagggaggcggcgtccccccggaacatgacgcaccgcagtgccccctggctgtccttcagcgtaaaatagtggtgcccggagggatacatcttatagttggacagctccccccgcaccagcaggccggagaggagccggtcccggtccatccagctcttgatatagccgcttacctgggagggactgaggatggtctcttctctcatgccagctcccctccctccagggcccgtcgggtcaggatggccacccccatggcgttgtccgtggagtagcagggcttggcgaacagggcgccgcagctcctctccatggcggcccgcagctgtcggttggaggccacaccgccggagcacagcaccggcaggccggggcagcggcgctgggcctcctgggtggcccggaggaccacgctgcacaccgtgtccagggtgaagcgggccacgttggccggggcctctccctccgccagcagtctcttcacctgattctccatcccggacagggagaacgtgaggtccttcagcttcacgcggtactccatacaggcatccgcctgaggatagagctcgtccagcgctttgccagctgggaactgaagccccagcaggacgccggtgcggtcgatgagctggccagcggagatgtcgctggtcccgcccagcttctccgccgccacattggtcccctggggccggaccagcagcagctcggtggtgccgccggacaggtgccaggccaggaagggaccgtccagcaggtccgtccgcccggcggaccaggccgccgccgccaggtgcccctgctggtgggagcaggcaaaaaacggcaccccaagggcggcggccagcgcccttccctgggactcccccgccaggaagcagggcatgtaggagccctccacagcccggggccgggtgctggcccccactgccttcaggtcccggagcagtccgcggccctccagctcctccagcagcgccgggagctgcttcacatgctggaacagggcgtcgctctgccgcagtcccagctctccgggccgcaccgccagcaggcggccggcgttgcagccatccgccccgtcaaagacggctgcggaggtggtatagttgctggtatccagtcccagaaccggcatggtcattcctccggctcctccggccccgccgcttcctcctccttcttttccggcttgggggcggaatcggcaaactctgcccggacaaaggagcccaggatgccgttgataaaggagaccacctcggccggctcatagttcttggcgatctccaccgcctcgttgatggcggcggagttggggatcgccggcatatacagcacctcatacatggcggtgcgcatcaccgcagccgccatgcgggggatgcgggcaaagctccagcccacggaatagcgggagatgtagtcatccagctccggcccgtggacatagaccccctgtaccagatcccggatgtactgccgctgcttctcgttgggaaactgggcgtagaggggctcctcctcccccagctgtgcgaaccgctcccgggtcatctcgtgctccagcagctcctccgcgctgcggctgccaaagcccagttcatagatcatatgcaccgcgacctcacgggcgttgcttctcgtcattgtgtgatccctccgtcacttgggccctctgtcccaatctttctctctggcccgcgtctccggggctccgacttttcatccagatccattatatacatgtatatacaaaaagaaaaccctaaaatatgttttacgggatttttctcccgggttccggggcgctgcgcctcacggcgtcttctcccgctcctccgggacgctgagcagctggaccagctggtggtagagctgctccggcgcctgtttgaagcgggcggccgcccgctccccctgtcccgccgcgggcatcagcaggctcagctccagcagggggccgctgtcgtccgccagccgcagtcgcaccgtgcacgtcccgtccgggtttgggagcacctccccctgcacctgctgctcccgcatcagggtctcattcacccgcaccagattgtcgtcgcaccggcggcgcaccgagtatggcaggctgctctcacagatctcgctgttgcgccgccccttctccgtgatggcgtagcgctccccctcccggctcaggtgctctgtctccaccagatgctccaccgcctgcgtcagggagaaatagtccaccccggcgtcgcacagcgccagctccagaagctgaaggaacgtgatcggcgccgcaatgcgggccataatatacaggaccagcagcttcagatccatctcatcctgaataaatcccatccgggccatccaagcacacctctctcttcttgccccggccctggcgggccggcggcgtcccggacaccgctccacctttggtgggaacgtgcccatggtctttctattttattatagaacaaaacgcgcgaaaggacaaccccgcatttccggctcctctggcaccatcccgcctgtcggtcatagtatggtatggaagcccttcacttccggcgggcccggcacccccgtgcccgtccactccactcaatctgacgaggaggtatccatatgcctgaaaaggtcgcgcccggtcccgtgagcgatgatcgctgcatccgggaggccgtgtgcatacacacgaaaaaaatttttgattcctgcaaagatgaagatatagcgctttataaacaaattttcttctgtctatctggccttcgccgctgcccgggccatgatcgcgccctcctcccgggtcataaggtcctgggggcggctgccgtccgtcaggcccagctccacagcctcctccaacagctccggcatggacgccttc

SEQ ID NO: 13602 - DNA, 35734 bp, Unknown
  gut microbiota DNA sequence
ggacaaaccctgcgcgcgcgaactctgtgaggcttattccacaagctaaaggccgcccactccggggggagggggcggccccttgctttaatccctgggggcccggtaaaaccggccggccacctggtccgtgcgcatcacgttgacgaaggcgtgggggtcggtctggcgcacccggtggatcagggcccgcacctggttgccccccaccacggagtagagcatcacccgctcctcaccgtcatagaggccggtgccctggaacagcgtggcgctgtggtgggtgtcccggatctgctgccagaccgcctgggcggtctcccgccgggtgacgatgaagagggtggcccgccgtccgctggggtccagcagcttgatcacctgggtggaggcaaactgaaagaggatggaatacagggccttgtcccagccgaacagagcgcctgagacggccagcatcaccacattgcccataaatatataattccaggcatccacatcgtactgctgggagagggcgatggagatgaaatcggtgcctccgctggtggctctcccccggaggcacaggctgatggcaaagccgttgatgaggccgccgaagatgcagatgagcagcacatcgtcggtaatgggcataggggggatcagatcagtgagcaggctggtgcacaggatgaccacgcaggagaacagggtgaaccgcttgccgatgagtttgaagctgatgacggcgggcaccgcattgagcaggaagttgatggcggagaaggggacggacaggccccagaaccgcagcgccacccgctggatcagcagggtcaggccgttaaagcctcccggcaccaggtccccggcctggacaaagctcttcaggttgacggccatgatgacagaggccagcaccatcagggccagccgccccaggtcgtccaggagctgggatttggagtaagagacagtttttttcatggcgtgacctcctgcgtatttcccggggaatgtgctcccattgtatccgctcccggtccctttggcaagggggaagggcggaaaagaccgggaatgtgggaagtatccgacatccccctcccccgcagagagggagcagccgctccgcatccccggacggggagatgtggggtggagggaaatgtggaaaaatcagcaggagcggttctccttggcggcggcgatgaaggcgcggaacagggggtgtgccttattgggccgggatttcagctccgggtggaactgtacccccacgaaccaggggtggccgggcagctccacgatctccaccagccgcccgtcgggggacaggccggccagctccagccccgcctgggtcagggcatcccggtattcgttgttgaactcgtagcggtgacggtgccgctcggagatctcctcggctccataggcctgataggtgcgggagccgcggctgaccactttgcaggggtaggcccccaggcgcatggtaccgcccttggcggtgaccccccgctggtcgggcatcaggtcgatcaccggatgggtggtggcggggtccagttcgctggagtgggcgtcggcccagccgcacacgtgacgggcatactccaccaccgccatctgcatgcccaggcagatgcccaggaaggggacccggctctcccgggcccagcgcacggcggcgatcttcccctcaatgccccggctgccgaagcctccagggaccaggacgccgtccgccccgtccagcagttccgccgcgttcccgtcggtgacggtctccgagtccacccagcggatgttcaccttcacgtcgttctcgatgcccccgtgggtcagggcctccgccaccgacagataggcgtcgtggagggccacatatttgccaaccagggcgatctccacactgccctgtggatgcttggcacggtggaccatggtggcccactccgtcaggtcgggcatgtggcagatcagccccagccggcggaccaccacgtcggccagcccctcccgttccagcatcagggggacctcgtacagcaccggggcggtgaggttggggatggcgttctccaccgggatgttgcagaacagagagatcttctccaaaatatcccggggcaccggcgcgtcgctgcggcagatgatgacatcgggctggatgcccagggagagcagctctttggcggagtgctgggtgggcttgctcttcagctccccggtgccggggatggatacgatgagggagacatggagaaacatgacgttgtggcgtccccgctcggcggctatctggcggatggactccaggaagggctgggactcgatatcgcccacggtgccgccgatctccacgatggccacgtcagtgtccggggtgtccagagagtaaatgttccgcttgatctcattggtgatgtgggggatgatctggaccgtggctcccagatagtccccggtccgctcccggttgagcacgttccagtagaccttccccgaggagacggaggagtggacggtgaggttttcgtcgataaagcgctcatagtggcccaggtccaggtcggtctcggccccatcgtcggtgacgaagacctccccgtgctggtaggggctcatggtgcccgggtccacgttcaggtacgggtccagcttctggacctttacccgcaggccccgctgcttcagcaggcggcccagagaggccgccgtgatgcccttgcccaggccggaaaccacgccgccggtgacaaaaatgtacttcactgccatgttgatccctccatcaaagtttgatcctgttgaaaaaaataccggtttattttatgcttgtctggggtgcgagtcaagaaaaaaatcggacagatgggcgaaaaatgggtgcggtccacagccccggcggtggcggcctctgtgctccggtggacacggcgggctttttgtggaaaacatcggaacgcatcgtcccggacctcctctcctcccccatatctcggggatcgtttgggcaagatcagaaaaatgatgctcggcaaaacagatgtgacaaatgggcgctgccgggcgttttacaggcagagagaaaaacgaagggaagggggacacccattggatacgcgggagctctttgagcggtatggagacgcggtgttccggctggcgtggagctgcacgggctcccggcaggatgcggaggacgtgacccagaccgtctttttgaaggtgctggagcgccggccggacctggagccgggaaaggagcgggcctggctgttccgggtggcggtgaacgagtgccgcagcctctggcggcggctgaagctgcgccggactgagccgctggaggaggcgctggcggtggccgcgccccaggaggagccggtcctgcggcaggtgatggagctgaaggccggggagcgggagatcctctatctcatttactacgagggcttctccacccgggaggcggcgtccctgctggggatcagccagacggcggtcactacccgcctccagcgggccagaaagaagctgagggaacggctggaagaggaggggcggccatgaaacaggaatatcatcgcgccttggagcagatctgcctttccgaagaggcaagggcgcggatcatcagtgtgctggaacagaaggagcgagggctgaaacggcctaggaggagaatagggaggctgattctagtgtgtgccgtgctcatcctgctccttctggggacaggggccgctgtcgtgtcgcgggtcggcgtgctggagctcttttttcagggggataccagccagctggaaccatttgttcagacgggggcgagtgcgcaggataaaaattatcgtctgaccctagacagcagcatctgtgacggtgataccctgtatgtggtcatcaccgtggagggactacatgagcaggcggtggaaaatctgaagaacaatcaggtcgttgcggactgctatcgggcggcctggggccgagagatgccggagaatctgatggagcaggggcagggagacatctccgtgtttcaattccagatggaggccgggaaccatatgtccagcttcggatttgaagagttgcccgccccctcggagaccagccgctcctggcagctccagctcacgctgaccgggctggagcatcctcagacggagcccatcggcctgcgcctgggattcatggaggagagctgtgtgcttcagatccccgtggaccagatgccccaggtggtccgggtctccattgcgcgggagctctctgtggattggaatggcggagaagaggtatttgtggaccatgtggagattggccccacacggttcacctatgtaggaaaatatccggatagtgtctcttctctagcccccctggtgttcttccggatgaaagacggccagatcctcaccagaaagcagatgggactggagctggagatgcgggatatcccgggaccggcaaatgtatttggaaaagagctggcagagatcgtctatacctctcggtctgtgatggacttgaccgaaattgcatctgtgattctggggacagccgagttttctctaaatggagaaccgcttggagaggtgcagatgaaggaacagctgtatcccttttccatcgaggtgggagagggcggcgcagagtacgcgggcccctatgccgcaagcatggaagagctgtgcaagaaattgggagctgaatatcagtgggatgaaataaacaaaagagcgacgggagtgtaccagggaatttccctctccctgacggccggagaatcccttgcgctggtcaatggggagagaaaggaaatagagacacgggtacggggaaaagatggggtattcacacaagttcccatgccggcggtggaataccatggtgggatctccgcggccatcctcttttttggggaggtctggggcttagaatttcaggtcctcgatggggaaatcatcgttgttccctaaaggagccgagacagcccagaggtctgcgcatataaggacggtctctggcagatagtttgttccattctttttctcaaaaaaggacaagcgcccctgggagatccttctcccgggggcgcctctttgcgcttatcggtgatagagcttgttggtctgatacttgggctcgcaggtgagctggatgcccagcttgcggtaagtcccctcgtcggcgggggataggatgacggagcagtgggcctgacagccctgaagatgggccagggcctccagcgcccgggcggccttggggtccagattggcggaggcggccagggcgatgagcacctcgtcgctgtgcagcctggggttgtttgaccccagatactggaccttgacagtctggatgggctggatggcggactgggcgatcagatgcacgccatggccccccagcccggccagggacttcagggcgttgagcagggcggcggcggagcagcccatcagctcggaggtcttgccggtggccatcctgccgtcgggcagttggatggccatggcaggctcgccggtctcctcctccagccgattggcctggtccactacggggcggatagcgggggtgatgccggcctgctgcatcaacagctccagtttatagaccgggtcgtcccctcccctgccctgccggcggtcggagagcacatcatagtagcgccggacgatctcctgacaggcagcctcccggcaggcaccgtcgtcggtgatgcagttgcccgccatgttcacccccatgtcggtgggggactgataggggcagctgccggtgatcttctcaaaggtagcagccaggacgggaaagacctccacgtcccggttgtagttgacggtggtctcgccgtaggcctggagatggaaggggtcgatcatgttcacgtcgtccaggtcggcggtggctgcctcgtaggccagattgaccgggtgcttcagggggaggttccagatggggaaggtctcgaacttggcgtagcccgccgtcaccccccggcggtagtggtgatagagctggctgaggcaggtggccatcttgccgctgccggggccgggtgcggtgaccaccaccagagggcgggaggtctcgatatagtcgttcttgccgtacccctcatcgctgacgatgtgggcgatgttgtgggggtagccctggatggagtagtggcggtagacccgcacccccagcttctccagccgcaggcggaaggaatcggcggcggcctgcccggtgtactgggtgactaccacgctgcccacatacaggcccttggagcggaacgcgtcgatgaggcgaaggacgtcgctgtcataggtgatgcccaggtcgccccgcaccttgttcttctcgatgtcgccggcgttaatgacgatgatgatctcggccttgtccttcagctgctccagcatgcggatcttgctgtccggctgaaagccgggcagcacccggctggcatggaagtcgtcgaacagcttgccgccgaactccagatacagcttaccgccgaactggtcgatgcggtcccggatgtgctgggactgcatggtcaaatatttctgattgtcaaacccttccctggccacgacggccactcccctctcacaacacaataccaatttattttacaaaggtttaggcggcacgtcaagggagaggggaaagaaaattggagaactttgacgggcgggacggaagatcttgtccgctccatgtggattccaggcagaagctgtggtacaatagtcaggcggccacaggccgggaacaggagagatgaacatggaatgggacgagctgatccgcatctggatcattgtctgtccgctggtctttctgggcggactgatcgacgcggtggccggcggcggggggctgatcaccctgcccgcctatctgctggcaggactgcccccgcacctggcctccggcaccaacaagtgcggcaacttcttcggcacactgatagccaccgggcgttttctgaagcggggggacgtgcatctgccctccgccctggccgggggtgccggggcgctggtgggtgcttggctgggggcgcgtttgaacatgatcatgccggagcaggccctctactacctgatgctggctgtagtgccggtgatggcggttttcctgctgtttaaacgggacttcgggacggaggaccggtccggggagctgggagtggggaagctggtgcctctctctctggccatcgggctggtgatcgggtgctacgatggattttttggtccgggggctgggacctttctcaccctggcctttaccggcctgtgccggttcgacctgcttaccgctgcgggcaataccaaggtggccaacgccacctccaacctggccagcctggtgaccttcgccctgggggggaaggtgctgtgggcggtgggcatccccgccgccctgttcggcatcgtggggggctatgtgggggccgggctggccctgaagggcggcgcaaaggtgatccgccccatgttcttcgtggtgctcaccctgttggtcgtccggctggtctgggacctgctggcgtgataaaaaacagtggaaaaagaaagggaagggatatgaatcgcatctcgctggtaggccggctgcgcacccagaagctgctggggaggaccgtcctcatcctgctggccttctccctgctcacggtggggggctcctacctctttgtccggggagagatggtgtcccgctaccgggagcaggggatggagggcaccatgtccatgctccagcggaccagcacctccctggaccggaccatccaggccctggagcttcagatccagaccttctggaaggatgatgacgtctccagcctgctggtggcaccggaaaagccggatttctccaggacctcgggggtagccgcccagatccaggggctgcgggaggggaacgagctgatcgagcggtgctggctttacctctatcaaagtgggcagatcctcaccgaccggcagctgctgctggaggcgggagacccggagcggcctgggcagctggaacggtggtccgcggcggcggagagcgggaccccctccctgtggtgtgaggacggaaagatatatctgctggtcgccttcccacagcccaaaaagctgggactgctcatcgtccagctcagcgccagagacctgtttgaacagttccaggagggctggagcggcctgtccggagacccggtgtacgtctatgacggggcgggagagcccgtctttcccaaccggatgacctacccggagcgggaggagctgatggtgaccgaggaatctccccgggaaggcgtgtacgctttgagcggacagagagacactgtagtttgtgtggctaggtcccagacggccgggtggtactgcctgacctattggaacagcggggactggctgccctctccccaggagatcctcaccgccttcctccctgcggcggcggtgctgctcctgctgatcctgatcctgtccctggtgatcctccaggtgatctaccggccaatccagcggatcgtggaatccatgctcacagggcaggagacggaggcgggccaggacgaggccgggctcatcagcgccgccctggcccggggacagcgggagaaccagcggctgaccggactgctctccgatgtgcgcccggcgctggcccagcggttcttccagtccctgctggaggggggccagacggagccggaggaggtgtccaggatgctggctgctctggagagcccctttcccctggaggggacttacctggtgctggcggtggaggcggtgccggagaggagcgcctcggcggtggagggggagatctacacccggagcctgtggagaagtctgaagcggttttgggaggggcgctgccttgcccagatccagcccgccccgggcggagggctgtcggcggtgctgtgcgtttccccaccggtcccaggcggattcgccatccccctggaggactgccggcaggcgctggagcgggagacccgggacttcccattctctgccgcggtgggggccagccaggccagaggaagcctgctggagctctccgccgcctggcaggaggccagacaggacctgaattaccggaaatattgctgcggggaggccgggcagcccggccccggtccggtaggtgcgggcgtatatgatgcccaggtgcgggagatgctccagaaggcgctgagcggagagctggagggggccagggcccagctggcggacctgcgtcaggcagtaggacgcgcccagtccccggtgcagatgcgctctatgctgcggggctgcgtgctgacccaggtgctgaaggtccagcgggaactgggggagcgatactccgccgcctgcgctgcggactcccccgacttctggcaggagcaggagcggctgctggctgagctggacgagtgggggcacaacagccagcgtggctatatggaccgggcccgggactacatcgccgcccacttctcggacagcgggctgtccctcaacgaggtgagcggccacgtggggctgagcgtgtcctatctgtccagcctgttcagcaaataccagccgccgggcttctcccactacctgcggcagtaccgggtggagcaggcccgcctgctgctggagtccaccgacgccagtgtgacggagatcggctaccagacgggattcaactcctccaacagcttcatccggaccttcaagagtctggtgggcgagacgccgggcaggtatcgggagcgctgtcagggcggaaaatatgaaaacggaaaggatgatgatacatgaaaaaggtggacagatgggcggcgctgacagcggcgctgctgctgacggtctccctggcacccgcctcccaggcggcggaggcgggagagaagatcgtgatcctccacaccaacgacgtccactgtgccctggacgacgccatcggctatgccggcctggcggcctatgccggggcgctggaggagcagtacggggcggaccgggtgaccctggtggatgcgggagatgccatccagggccaggcggtgggcaccctctcccagggggagtacatcatctccctgatgaacgcggcgggctatgacctggcggtgccaggcaaccacgagttcgactatggggtggaccggctgatggagctggcggccggggcggagttcccctatctcagctgcaacttcaccggcctggcggcgggcgaaccggtgttccagccctatgctctcctggactacggggacaccaccgtaggctatgtggggatctgtaccccggagagcctgaccaagaccgaccccacttacttccgggacgaggccggggaggcggtgtacggcttccggcagggaggagacggacaggagctgtatgactgcgtccaggccgcagtggaccaggcccgggccgagggcgcggactatgtggtggcggtgggccatctgggtaatgagggcatctctgcccagtggtcctcccaggctgtcattgcccacaccaccggcatcgacgtgtccctagacggccactcccatgagcagtatgagcggacactgcccaaccgggaggggaaggacgtggtgctggcccagacgggcaccggcctgaccgccatcggccaggtgatcttggaccccgtcaccggggagatccaggcggagctggtggccggctatgccggcagggacccggaaatggaggaggagatcgccgctgtccaagcccagtatgaggagcagctgagccaagtggtgggcagcacggacgtggccctggtcaccaccgacccggccaccggggaatactgggttcggagccgggagaccaacctgggggacttctgcgccgacgcctaccgggcggtgatgggggcggatatcgcctttgtcaacggcggcggcatccgggcggagctggcgccgggggaggtcacttatggggacatcctggacctgcacccctatggcaacgccctgtgcctggtggaggccaccggacagcagatcctggacgccttggagatgggggcacggaagtatccccagaccagcggaggtttcctccaggtgtccggcctgacctataccattgacgccgctgtcccctcctccgtagtggtggacgagaacggggccttccagtctgtggacggcccccgccgggtgaccggtgtgaaggtgggagggcagccgctggagctggaccgggtctataccctggcctcccacaactatatgctcaaaagcggcggggacggctacaccatgtttcagggctgcaccctgctgaaggatgagacggtgctggacaatcaggcactgatccgttacctgggccagatcctggagggggacctgagcgcctactccgctcctgggggacagggccgcatccagatcgcagagacggcggaggagaccggcggggcacctgcggagccggaagagcccgcggccggggcgcggatctatgtggttcagcccggggactgcctgtggaccatcgcccggcaggagctgggcggcggcctgcggtgggtggagatctatgacgccaaccgggaccagatccaggacccggaccgcatccaggcgggaatggagctggagctccccgcctgaggaggagcggggcgcgccccgcagttgtgagatggaccagagcggcaggagggccggagctcgtcacgagctccggccctcctgtgatcatgatatagacgggagctacgatccgggtactcagctttttggatgggattcatttttttgaattttgaaaccggtgtagacagcagagaaatcagaggatggacaggtattccgccccctgttaagctgaaaacagcacagaatgggagcaaaatacagaacagctcccggtgcgggaatctgcaaaaggaggatcacatcatgcgcagcaagtctatccgtctgccgctggctgcggcggcactgtctctggccatgctcacatcctgcggtgcgcccggaggggcaggctccagcgtctcttcggcatccagctccgggagcggggcacagtctgcccctgcggccgttcaggtggagcccctgaccgttcaggacttcccctgttccaccacagaggagtttacggcgctgttccagaagatggtgcaggagacaccggaccagatctactatcacccctacaccggcctgttccaggaggcggtggaggcggacgggctctctcagggccggaagctctacacctatatcccggaggagacggggcactgcgcctccagcgtgttcgtggccctgccctccggggagaaggcggaggagttcctggtgagcagcggctggaccgcggtggccgaccagtataaattcctgctccacgccctgacccctgccgacagccagtgggggggcgaggaggagctggactatctgagcgccgcctttgccctggggagcaagacgatccattacagcccatacaccggaaactactactttgtgggctacgccgacggaggccgcctgctggagcagtgggtcatggccaatccggacaactgctccgggctggcagtgctggacggcggagccatcgacgaggcttatctgatccagatgggccagacccccgccgtggacccggaaaagaccgtgaatgaggtcaatgtgccggtgtggctgatcgagaaggagataaccgacggggtccaggccgtggccgattactggaagggagccaacgactgcactgagacggcctatatcaaccaggacgttcccctggagaccacggtgtatcagcagaacatgctttcccatgacacctttatcaatgcctatcccctggggaaggtacagctcacccaggcagaggtgagttacaccgacccggagctgagcaggaccctgtgggagaccttcctgtgcaaggcccagcgctaccgctccctggccggaaacgacctgcgccccgccattgactttgaggcgctgggctttaccaaggaggagcggaccatcgacggttactcccgttactggctggagtatgtgccccagtccgtcaaggatgaccccagccaggcggtgccgctggtgatggccctccacggcgcaggacagtgcgccgaggcctacgccccctattctgagtggttcaaggtggccgaggaggcgggcttcatcgtggtgttccccacagcatacccctatgcggagaacaacggcatggcccggcccatccacaacgactgctgggaccccacccggcctgacgacatctccttctggcggcagctgatccaggatgtgtcggagcgctattccatcgacgagagccggatctatgccaccgggcattccaacggaggcaactccagcgccatgatcgccggtgagatgtccgatgtggtggccgccgtggccatcagtgccggccgctatcggaatgtggaccagcaggtgactgaggatgtggccaccctccaccctatggccagcaccaaccgggtccccgtgatccagctggtgggcaccaaggatgccggcgcctaccagagccccagcctgacctctaccatgatgtactggctggagcggaacggctgtgaggacctgaacgcccccctgatgtatcagaccagcggataccataaccagatctggtgcgacggggacggcgtgcccatggtccgcttcgccgtgatcgaggacaagccccacaccaccaccccctccgagtcccggctcttctggtatgacttcctctgccactactccagaggcgaggacggcagcgtacagtatatgcaggacgacaccattatccgcaactaaaagaaggagatcgtacatgcggacaccctcagcttccctgctccggggcggcggagagggcgtccagcacctgctgatagacatcagcgccatacagggacagcagatattcctccaccagcgggcagaccttctcccgggcgcgggcccgctcctcctctgacacagggcggacctccatgccctcccgctgaaagatatcctggcactcctccagatagcgggcagttacctccaccatctcccggcaggtatcctccgcggcctgccggagcagggcctgctgctcctccgtcaggctgcggcacacctccagattgagataaatggtctccagatataccttaaagttgatggggatcaggtatttctgctgctggtggaagttgtagctgcgcaccaaatagatggggttctcctgggcatcggccagcccctgctggagggccaggtagaggtcctggatggggatctctaccgtctgcgcccccagagcctcccaaaaccgccggtccagggaggaagaggggatgacgcggaccatcaggccgtccagctggctcaggtcctccactggccggctggaggtgagcacccggctggaggatggcagcacccccaggacgagggtgtcgcccgcctgctggcagatcagatcccacaggggctgacctgggcgcagagcctggctcacctcatcgggagtgcagccggtgagagtggggagccaggtggcgatggaggagacatcgctggggccggccccgatgcgcatgtccaccgccccgttctcaaagtaccaccgcccgtcgtccaaattgcccaaggagtcttcagggtagatctggatctggagctggccctcggaggcctcctccaccttctccttcaggagctgggcagcctgatcggtgaggctgcccgcgggcgaggagtgggtcaggatcagactgcggggctctggctctccgggcgttccgccggatgcgggggcgaggcggtcaaagagataggtcccctctcccccgccggcacagccggccagtatggaaaaactcagtacagccgtcactaagacggaccagcgtttcatacctctccccctcccctgccggcccattcggtcgaaaattccgggaaaagggcggcgggcacaagcccgccgcccccgcctgccggaccgggccccgggcggtcagcccccggggacgccggtgtccggctcagcacttctcaaagatggtggcgacacccatgccgccgccgatgcacagggtggccaggccgcgcttggcctcgggccgcttctgcatctcgtggagcagagtgacgatgatgcgggcaccggaggcccccacggggtggccgatggagatggcgccgccgttgacattcaccttgctcatgtcgaagcccagctcccgggccacggccacggactgggcggcaaaggcctcattggcctccaccaggtcgatgtcctcgatcttcaggccggccttgctcatggcctggcgggaggcgggcaccgggcccacgcccatgatcttggggtccacgccgccctggccccagctgaccagcttggccatgggcttcaggccgtacttttccaccgcctcgccggaggcgagcacgatggcggcggcgccgtcgttgatgccggaggcgttggcggcggtgacccgctggacgtgcttgcgggtatcggcctcgtggatctgggtgagctcaaaggtatggacgatctcgtcctccactccctcggggcccacagggaaagcgcccttcagcttggagatgccctcggcggtgacgccggggcgggggaactcgtccaccttgaactccaccagctctttcttcttcttcaccatgacggggacgatctcgtcctcgaagcggccggtcttctgggcggcctcggccttctgctgagaggcggcggcgaactcgtccagctcctggcgggtgatgccccacacgtcgcagatgttctcagcagtagtgcccatgtggtagttgttgtaggcgtcccacagtccgtcccggatcatggtgtccaccaccttcttgtcccccatgcgggcgccccagcgctcgtcaggcagggcgtagggggcggcggacatattctcggtgccgccggccacgatgatgtcggcgtccccggccaggatggcccgggcaccctcgatgaccgacttcatgcccgagccgcacaccatgcccacggtgtaggcggggacggagtagggcaggccggccttgacgcccacctggcgggcggggttctggccctgggcagcagtgaggatgcagccgaacatcagctcgtccacctgctccggctccacgccggcccgggacagggcctccttcaccaccacggcacccagctcgggggcgggggtgtccttcaggcttccgccgaaggagcccacggcggtgcggcagcaattgacaacatagatctctttcattgggatcgttgacctccattctttcatcaggcgcgccggagcggcggccgggacctcgggatcttcatgctccattatagcgaacttttccgggaacgcaaaggggtttcttgcgaaatgaggcggaaatttcggcaaatcttagcttgtttgtacatcctccgccccggggagggacagcagtcccagctggagcttccagcgcagcacccgcagcaccgactgatccagccggtcccaggtcagcgccccggtctccaccgcctccagcaccgaggggatgcccccctggggatcgctggtgaggaccaggtcagccccggcctggagggccatcaccggggcggtgccctcctccacatacttctgtaccgcatccatgtccaggtcgtcggtcatggccactccttcaaagcccagctcctcccgcagcacttggtaggaggctggggacagggaggcgggcagctccgggtccaggcaggtgacgatgttgtgggagaccagcacaccgccggccccggcgtcgatgcctgcctggaagggcaggaagtcggactggcggaactgctccagggggcgctggtccaccgcgatgccggtgtgggtgtcccggttgctgccgtagcccgggaagtgcttgagcaccgagccgatgcccgcctcccccatggcggagaccaccgtgtccgcatactccgccgtagcctgggcgtcttggccgaaggcgcgggcatagatgaagtcagcggggtcggtggacacgtcgcacaccggagccaggtttacgttaaggcccagatccagcagaaaggcggacttgtccagggcgtcggcccggacggcctccagccctccggcagcgaagagggcctggggggagcggaacttctccgcccggaaggcggggtagtagctggcccggaccaccgtgcccccctcctcatctacccccaggagcagggggatgggggaggtctcctggagggaggcgagcagagtgcgcagctcctccggggtgcggtttttgaagtcccggccgaagaggagaaagcccccagggtgccactcccgggccagctcatcccagccggtctccgggaaacggacccagaacagctggcccgctttctcctccggcgtcatggtgtccaccatggcttggagcagctcctcctgggtggggggctcgggctccggggcggactgaggctgggcggaagtgccggcctccggcgccggggccatggcggactggctgggctcctggccgctcccctcccctgctggcgcccccgccggtgcgcagccggccagcagaaaggacaggagcagcgcccaaaggcccccccgcctcacggctttttggggagccggtggcgggtgccgtccggctcctggatgagggtgttgtccagctgggcctccagattagcccgcacagcggccacatactcctgacggagggcggcgcgctctgctgtctcctccgccgtcaggccctccggagtcttggccttccgggccagggcgttgatgcggtcgattttttcctgtgtgatcatagcgtatctccttctcagatataccgttccagaaccagcatgaagcggccctttttagactgacccagcacctctttcaccacgcacttgcccagaccccggcaggagagcacgtcgccctcccccaccgtccggtccgccttggcgcactcccggtggtttactgacacccggccggcggagaccaggtccgccgccttggaccgggaggtggagaagccggcggcaagcaccgcgtccagccgcagggcggccaccgtatcccgaatggtcttcacctggggcggcttcgcctccagctgctccagggggatctcccgcagcttcatcttccagcggccggcagactcccactgggagaggaggatgggcagggcatcccgcaggaccagcacctgacagcggccatggtctaacaggatgtcccccagcttttcccgggtgatgcccagtcccatcagggcacccaggatgtctcggtgagacagctccgcgtccgcgggaaaggcggcctccagcgcggccaccggcccctccgggtcggcgagaaagtcggattcctcctgccagtcgggcagaaaggcgcacaccgcccgctccgccccctcatatccgccgaaaaacaggtggcgggggcggccccaggcgttgagcagatcggtgacggaggcctgctctcccggggagagaaatggggtgcaggcggggacagagcggttctgggccagctccagcttatccagggcgcgggccagcagcacccgctcctccccgctgcgggcacatttgttcaacagttcggtcttgttcatggaggcctccttttctggtgggtgtagtatatcccatccggccggtggtgtcaacgaggggccgctgctccggtcttgacagggcgcggaaagaagggcagacaggccgcccgccgcgtcccctcccgccagtatgccccagcgggcggctcctttttactctttgagctgatgtaggatataaaaaacctcccgcagtcaaaataaggaataacggagggaggcagatctctgatgacggccttatataaagaaggacggaaccaggagacgtgcaaaatgatcagagatcacaaagaccacatcccggcggctggacaagccagcaaaccgaggtgtggtctttctattgctgagggtgtttttactgtcaaagcgaaggtggaaaaacagagagtatctgtcgctttttgtgattggatattcatctgatggttttaaatttatattcttttatccaatcgattaagttcgaagaaacagtaacggttatcaatgagaaaacaatacgcattatgggaatataggtaagggataatagcagcactacagtatccgtgaacaaataagaacgggataacttccagtgggagacgtgagaaattgttaaagccaaggcgtcatctccaccactggaacctccctgacgaacaattaagccgacgcctacacccacaaaaataccgcctaacacagcggcgatcaacggatgtgcggacaaatcggggagcattggcggaagcagctcccagatcttataaaatacagaaacaaacagtgttgaaataattgagattttgataaagttcccacccaggaatttgaatgcgagcaaataacaagcagcatccagcataggggtaatataagccggagaaattttcagccaatgctcgactaaaagcattaagccaatcacaccgccttctgtgatgttcgtccgctggtgaatgttgtggatcccaaaggtgcagatcatggctccgagtaatatcagcagtattttcttgaaagtcaggccatccgcaagctttttacaaatggcagtcatacggggtatcaatttgagcagcctccttgataagttcatattttcatgctaaaataataaactatatagtaactataaggtcaaggggcttatatgaaaaatttattttccatcggtgaactttccaaactgcaaaacatttctcgccagactttgattttctacgataaaatcggacttttccgtcctgcatatactgatcctgataacggttaccgctattacagttccagccagcttgactatttggatacgatttgcatcatgaaaagaatcggcttttccctcaatgagattaaagcacacatgaaaagttttaggattgaaaattctatcgctgcgctgcgcaaacagctctctaccatcaatcatcagattgaggagctgcaaatgataaaaaaccgcgttgaacatcggtgtctgcagttagagcattctatttccattcgtgattgtagcgatatcgtttccatagaggaagtaagcccccaatacattttgcttcaaaaggtcacggaaccttatacgttggaaatgctcagcattgctacaaaggaatgttttgttcggtcatccaaggagcaacttccaattttctttcagagcggtgcgatcgtgccgtatgaacgtattctgcggggaagatataccgaagcatcgtttgcctttctgtcgattgaaaagtctgataatatcgacggcgttctggaacttcccaaagggcggtgcgtatttacctatcacacaggggactatctttccatcggaagatcctacgaacgcattttagaatactgccgaacccatcacttcaatattgtttctgattcatatgagttcgccatcaatgactacctttccacggccgacgagagcgaatatataacgaaaattttgttctatattgcgtaacagcatactttttcaaacagcagtcaataaagaatagatcttaattcatagagctgaaagaggggacttgaccgcccatcggcgtgtcatgtccctgcttgttttccagcggactcctttccaacggtcgtttcgttctgccaatgtagcaggtggtgcaaaccatcctttatacagcaactcccaggtcagcgagctggagggcggacgaggccggagttgacaagcggggggctttctgcaataatattggtgtaaaattggaggtccgcgcccacggcgcgtatcatggaaggagaccgctatggcgaagatcctgtttttgaccgattccgccgccgatatccccaagtccctgcgggaagagctggggatcagggtcatgcccttccccatcgccatgggggagcgggaactgcgggatggggaggatttcaccccgcaggagttctatcaggcgctggcggaggagcccaagatcccgacacatgcccagctcacggcgtaccagttccagcagtgctatgaggagacctggaaagcagggtacacagacctgatctacacatccatcaattccgagggcagcgccacctaccagaacgccgtccaggcccggggggagttctttgaggaccacccggaggcccgggatgccttctccatccgggtcatcgacagccacacctataccatgtgctacggctacccagtggcagagggggcgcggatggctgccgcaggcgcctctgtggaggagatcgccgcctatatccaggactgggtggatcatgtgcgggtgctctttgtcccctttgatctgaagtttgccaaaaagtctgggagggtctccgccgccgcggcttttgtgggagaggccctggggctcaagcccatcatgacctttgagaatggagcctccaaagtggtgaccaaggtgcggggggagaagaacgtgatccccaccattctggagctggcgcagaaggagcgggagccggggacgccctatctgatcatccgggccgcccggcccgaccaggcggagctgctgaccgagtcctgccgtcaggcctttgggcaggagccggccatggactgcttcattggcggcgttatcgccatcaacgccggacccaatctggtgggactcatctaccggaaaaaataaaactggccgcgccgcgggacccgggtcctgtggcgcgccttattttgtccacccggcccgggcgggaggaggaaagaaagcggggaagagatccccgggatttacatattattcatcctttttgtgataggctggactatgctatggaaaactgaaggtatcgatgtgatactgtgaaggagtggtcgttgtggagagagaacagctgtcctggcaggagcgggggcagttgtggctgcggctgatcatccgcctggtgctggcagccgcggcggtggtgctggtggccaagctggggcctcccctgctgtccctgttcgcccccttcgtggcggcgctgatcgtggcggccctgctcaacccggcggtgcgctggctccagcgcaggctgggctggagcaggaagctgctgtccctgctgctggtggtggtcatcttcggggtgatcggcggctgtctgggcatcctgacctatgccgcggccaacgaactggtctccctggcgcagaattggagcgggatgctgacccaggtggagggctttttcgatcagatggaggccctgtttgcccgggcgatggacctgctgcccctgtcggtggtggggacggtggaggacaccgtcaacgccctcatccagcgcctccaggcggtggaccccaccgccctgctgagtgcggccaaggcggccaccgactgggccatgcgggtgccggagttcctgctggccctggtggtctttgtgatggcctcctatttcctcaccgcggactacccctatcaccgcacgcgggcggtccagcacctggacgagagcctgctccgcttcctccagcaggtgaaggccaccgccctggccgccttcggcggctacctgcgggcggagctgctgctgtcggtgggggtgttcttcattctgctggggggattcctgctggtggggcagaactacgccctgctgctggccctggggctggccattctggactttatccccatcatcgggtcgggcaccgttatggtgccctgggcggtggtggctctgtttacccgggatttctccaccgctgtctatctgatggtgatctggggggtggtggccatgttccgccgggtggcggagccacggttcgtgggcgaccagaccggcctgtcccctatcctgtccctggtgggcatctacgtgggcatgaaggtggccggagtggctggcatgatcctgggacccatcctcatcctggtggtgctgaacctggtagggctggggatctttcagggcttttggatggatgtgacggcggcggcccgggacatcacggcgatcctttcccagcggccggagcggaaatgagagggtctgtcaaagttttttcgggaattgttcaaaaaatcccccctctttcttcatgctttcttcatatttagaccgtatccttatttttgtcagaaggggaaagagaggcgctccccccggacacagttcaaatcggcaaggagtgtttgaaatggcaaatcaggacaatgagttcaatttctataatagtgagaatgacgggtaccggggcggcttcggcgggtacaccgattccaaccccaaccagagccagggcgggccggaggccccccaggggccccagaagcacaggggatccggcaggcgcattgcggcgctgatcctggcctgcgcggtagtgggcggcggagcgggcgtgggcggcgcagccctgtactccagcgtcttcgcgtcccagcccagcgtgatctatcagaatacccagcccatctccacccaggcggaccctgtggccagctccagcggccaggccatgaccccggagcagctgtacgccgccaatgtggacgcctgcgtgggcatcacggtgtccaccaccatgaccaacatcttcggctataccagcacgtcggccgcctccggttccggcttcgtcatcaccgccgacgggtacatcgtcaccaactaccacgtcattgaggacgcggtgaaggacagctcggtgagcatcaccgtctccttccacgacggcagcagctaccccgctaccctggtggggggcgaggaggacaacgatgtggccgtgctgaagatcgaggcctccgggctccagaccgtgaccctgggcgactccgaccagctgaaggtgggccaggccgtgatggccatcggcaaccccctgggcgagctgacatactccctcaccgacggcctcatctccgctctggaccggctcattaccaccggctccggcaatgactccaccacgatgaacatgcttcagaccaactgcgccatcaacccgggcaactccggcggccccctgttcaacagctacggggaggtcatcggcatcaccaccgccaaatacagcacctccagctccggcaccaatgtggagggcctgggcttcgccatccccatcaacgatgtgaagaacatcatctccgacctgatccagtacggctatgttaccggaaagccctacatgggcattaccggcgtaaccatgtcggcctctgtagcgcagcagtacggcgtcaccaacgcggtgctgggtgtctatgtggccacagtggaggacggctcctgctccgccaaggcgggactgcagcctggggacatcatcaccgccatggatgaggacgacgtggtcactttccaggacttggaggctgccaaggccacccatcaggcaggggataccgtgacgctgacggtgttccgtaacggagagaagctggagctgtccctcaccctggacgagcagccccgggagacagtcaccgatacttcctcccagcagcaacagcagcctcagcagaacaaccagtattacggctggcccttcgggggatttttctcctgagcggggagcggccccataccgggaacagaatggtccgggcccggcagccaacggctgccgggcccgtttgctgcatcaaaaaaccaccggcctggccggtggttttctgattttgtgagaggcgggcagcgctattctatgtcctccggctggtacagagaggaggggaggacgtcggacagctccaccagcaggggagataggccgccgctccgctccggggcaggggtgctcagggtcagatccatggagagggggccggtgggcagagagacggtggcggccaggccgcctggctcccggcgctccaggagcagcgtgccgccgtggagagcgacgatgtgccggatgatgggcaggcccattcccgccccctctccgggctccgggagcaggtggggggaggccccctccaacagagcggagagctgtccgtcgtccggagtggagccgctgttggtacaggtcaggacggcccggtctccccaacggcgcagggtgagcaggacggtcccgctgggggccgccttagccgcgttggacagcaggcccagcagcatacgggagagcagggccgcgtcgccggggatcagaagtccttcggtgctcggctgatagcgcagctggatgccggcctgagcgagcaggggggcagtgtcctccgctgtgtggcggcacaggccggccagatccatggtcaccggggaaaaggccaccccggactgggacttggtatcccgcaggaactccaggttgttgaccaggcggagcatttgataaaagttgcggttgatggaggccagccgccggtcggtgggagagccggtgccgctcaggtcctgggagaggagctgaaggttgttcagcagcccccccatctgctcgcggagctggcgggcaaagccgtccatctgctggggggagagggcggagtcaggggcggggcggaacaggagcagcacccctccgggggaagagaccttggaaaagacgaacaggccgccgccgccggtgaaagctcccgcagtctgagcactgtccagcggggcagccaggtactggggcggctggtcccccacggccagctctggcaggtgactgagggcggcggagttgagcgcggtgatctttccgtcccgcacctctaccgccgcctgggggagctgctccaaaaagctctgttcttcagacatcccgatcctcctctccgctccaaaaccggcgcagcgcttccgcaataggatttgcggggcggctgattttagaaatggaaaatttcgctgggccggggcgtgagcccggcccggacaggacctagtatatcagaaattcgctgcatcaacaagaacatgggcgcagattctggcgaactgtgtaaatccatggggaaaaagaacagaaggcagggcctactatgcccggaggtggctaatttccacggagaaacagagaaaaaactatgcaaaacacagactaccaaaatcagaaaaaaagggatataatagtggagcgcaaccaaaacttgataaaggagacagttacaatgagcattaaagttggcatcaatggctttggccgcattggccgcatggtctttcgggccagcctggaccaccccgagatcgagatcgtgggcatcaacgacctgtgccctgccgagtatctggcctatatgctgaagtatgacaccatgcacggcatctgcaaggctgagatcggtagcactgagaacgccatcgtggtcaacggcaaggagatccccgtctccgccgagcggaaccccgccgacctgccctgggccaagctgggcgcggagtatgtggtggagtccaccggtctgttcctgacgaaggagaaggcccagggacacctggatgccggtgccaagaaggtcatcatgtccgccccctccaaggatgacacgcccatgttcgtgtgcggcgtcaacctggacaagtacaccactgacatgaacttcgtgtccaacgcctcctgtaccaccaactgcctggcccccatcgccaaggtgctgaatgacaactggggcatcactgagggcctgatgaccaccgtgcactccgtcactgccacccagaagactgtggacggcccctctttgaaggactggcgcggcggccgtgctgccaccggcaacatcattccctcctccaccggcgctgccaaggccgtgggcaaggtcatccccgagctcaacggcaagctgaccggcatgtccatgcgcgtccccactctggacgtgtccgtggtggacctgactgtcaacctggccaaacccgccaagtatgaggagatctgtgccgccatgaaggccgcctctgagggtgagctgaagggtgtgttgggctacaccgacgaggccgtggtgtccagcgacttcctgggtgacacccgtacctccatcttcgacgccgatgcaggcattgccctgaccgacactttcgtaaaggtcgtctcctggtacgacaacgagatcggctactccaacaaggtcctggagctgatcgagcacatgtacagcgtggaccacaagtaagcactgtcctgtttcagggtgccgccatctagcggcgccctgttttttaaaaagagcaggcgcctcacggatgcgccgccccagacagaacagaaaggcgtccgctccccatagggggagcgggcgcctttctgcatcttccgctgtgatttcctacaaaggggccgacgaggagtttgccccctcagcgcgcccgcctaccggggtggcagatgggcgacacgatgggcaagcacccagggggccagagtggaaggaggcccgggctgcggggcaccgctgtatataggctccacctccaccacataagggatcccgtctactgtaatgcggtaaaattccttttttggcatcgcttttgcctcctccgctgtgctgtactggtcgtttgcactattgtatcagagaaaacaataaaattccattcatctttttgaaataatccataatatcaaagttatggaaacgagatcggtgggctagggactgaatttttgcttcagaaagtcggcgaactgtcgggaggcgcggttcaaataccgtcctttccgatggaccatcacaatgtcacgggtgtgatgcacgtcctcgatatccagaaaacgaatattctcgctgaacagatgccgaaaggaggcagactgggaagcgatggtgacgccggcgttggcgttgatcagctcccgccggagcagatggtcgcactccatgatgtagtggggcgtgatgcccaggtctgcaaagatccgatcggtctgagcgcggaagggcagtcccttcagaagcatgatgaagcgctggtcggtgagctcctccagacggacacttttccgctgtgccaaggggttgtccttatggacagccagcttgaagatgtcccgaagcagcagggtggattcaaatacctccccataaatgcccggggaggtgaccgccagatcgatttgaccccggttgagcagcgcagcgatctccttgttttctgcgacccgctgattccacttgtagttggggtgctggtacatgaaggcgtgcatcccctgaagaaactgagaggaggagaccgccagggaaatggagttgtccccctcatcggcaatgtcctggagctccctctttgagttctccacctccatcaggatatggttgacccgctgaagaaaccgctgtccattctggttcaagatgatggaccgtccattgtggtcaaagagcggaactcccagctccttctccagtctggaaatcatcgtactcagggcaggctgggagatattgagttcttctgccgcccgggagatatgctggtaataggccgcggtctgaaaatagcggagctgggtcagttccatgatatgtccctccagatccataatttttatcttatactaatataaaaaatcgataattgcaatatgcgttaaaacagattaacctaaagaaagaagaaaaatatttgatttttgttggattgtgaccaaaggcgcagcagagaggaggaccttgtcgtgggcgaaaaaacaaagcttcaagagatgcttgagaaaaaggaaaagatcagacagggagggggagaaaaaaaggtcgcgaagcagcacggcgcgggtaagctgacagcccgggagcgcatcgacctgctgtttgatcccggtactttccaggagtacaacatttttatgaagcaccgctgccatgactttgggatggagaaggtagacacaccggcggaaggggtggtgacgggatacggattgattcatgggagaggggcctttgcctttgcccacgactttacagtcctgggcggcgccatgggggagatgcagggcatgaaggtcaagcggattcaggagctggccatggacgccggcgtgccgctgatcggcctgaatgactcggggggcgggcggatccaggaggggcctgccacttcctatggggccatcttcttcaacaacgtgatggcttctggggtgatcccccagatctcagccatcatggggccctgcgccggcgggaccgtgtattcccccgcgctgaccgacttcattttttccgtggacaagaccagccgctcctttatcaccggaccgcaggtcatcaagaacgtgaccggggaggtggtggatgcggagaagctgggaggagcgcggacccataatacggtgtcaggcgtgtctcactttttctgtgcggacgaccgggactgcattgagaagatcaagaccctgctgagctacctgcccccaaactgccgggagatgccgcccatcatgccctgcggcgactctccggaccgccgctgtgagatgctcaacaccttcattccggataacctgaaaaaggcctacgatatcaaggatgttatccgggagatcgcggatgggcacgagttttttgagacccaggccatgtatgccaccaatatggtcaccggatttatccgcatgaacggccggtcggtgggggtggtggccaaccagcccaaggcgatggcaggctgtatcgacatcaacgcttcggacaaggcggcccgttttatccgcacctgtgactgcttcaatgtgcccctgctgtccattgccgatgtgcccggatacatgcccggcaccaatcaggagtatggagggatcatccggcacggggcgaagatgatctacgcctgggcagaggccacagtcccgaagatcgtgatggcggtggggaaggtcgtgggcggcgcccggcctgcaatgtgctcctgggagcttcggccggacttcattttcgcctggcccacggcgcagatggtagtcgtgggggcagagggggccgtggatatctgccggaagcacgagctgaagcgggctgaggagagcggtgaggatgtggctgccctccgtgcccactacatcgaggagtacaaggaagaattttttaacccgtataaggcggcggaatatgggaagtttgaggacgtgatcgagcctgcggagtcacggcgggtcatcatccggactctggagctgtttcagaacaaacaggtggtcctgccagccaaaaaacacgggaatatgccggtctgacggcggcgcggaaaggagcttggttcaatatggcggttggatacggccccctgagcggggtaacagtggtggacctgacgcagtttttgtccggtcccctggccacgatgatcatggcggacctgggggcggatgtgatcaaggtggagcggccggaccggcccaaggccagcggcccgtttctcaacggggagcgggtctacgacctgtcggtccagcgcagtaagaagagcatcaccctgaacctgaaggcggagacagataagaaggtgctgctggagctggtgaaaaaagcggacgttctggtggaaaatttcaaacccggcacgatggagcgcatgggcctgggttatgatatcattgccgcagccaatcccaggatcatttatatggcggtctccggctttggctatacgggtccataccgttccagaggcgcgctggatatgatcgttcaggggatgagcggactgatgagcctgaccggtgagccggatggcccggccatgcgctgcgggacctcggccagcgacgtgtttaccgggctgtatgccttcggtgccatctcggcggccctgtatgaccgggaaaagaccggaaagggacagtttatcgatgtggcgatgctggatgccaccttctcctgcctggaaaacgcggtgatcaatacctgtgtctttggcaccgatccccagagggtgggcaacagccaccccaccagcgtccccttcgggacgttccccacctccgatggagagatcattatcacctgctcccgggatcctgcattttacagtctgtgccgcgccctgggacgggaggatatggtggaggacccgcgcttctccaaggcggaggccagacgccagcacaaggcggagctgactgaggagatctccagatttacccgggcccgcacactggatgaatgcgagcggatctttgaggctcacggggtgcccaatggccgcatcaacaccatgaagatgatctgtgcggaccctcagatcgcggcccgcaatatgattgtagaggtggagcacccggtggctggaacatatcggatggcgggcagcccgctgaaattcggaaattacccggataccacctatgagcccgcccccaccctgggacagcatacccgggaggtcctggcggagtacttaaaaatgccggaggaggagatcgaaaccatgctgaaggagcagaaggagctggtgcatacataagatggcgggcggagcgcgggacaggggaccggcctgtggaatggaagattttgttttgtgcctgacgtgcggaatctggtataatccgatgcgtattttgtggataaaagcaaaaggaggtatcgagctctgagctgtgcggaccagcaaagatcatagataagactagagggaggatactatgaagataaaagccaaaaccggagatctcgcactggggatcttttcgattctgggcggaatcatcatcctgatcctgacaaaggtgcagggacttcagctgataaagggcggacagatggggcccggttttttccccacaatctgcgggatcgccatcgcgatctgcggggccatggtccttctggaggcggcgcgccggatcgcccgcgccaaaacggcccaggcggagaaggaagaactggagacaaatatcctgaacctgacagagctgaagaatctgttgctttttatgctgctggggactggggtactgctgctctccgactatctggggctgctgacctgcctgggactgagtgtgatcgcctatttgaaaatatggggccgagaaaagtggatcaagtcgatcgtgatcggtgtatgtatggtggcgttcctgtacggggtctttgtcctgttcctgcatgtgccggtccccaaaggtccgctgggcttttaaggaggaggtacacatatggacttgctgcataaccttgcgctgggcttctcagtcctggctgatcccatgaccattgtgtactccctgatcggcgtagtgtgcggtgttatcatcggtgcgctgcccggtctggggccttcggtgggcatcgcagtgctcctgcccatgtgctacggacttgatccggcctgtgccctgtgcatgctgtgcgggatctactacggggccatgtacggtggttccattacctccatcctgatcaatacgcccggtgactctgccgccattatgacgaccctggacggatatcccatggcgcggcagggaaaagcagggaaggccctgggcatgtcctgtctggcatcggtcatcggcgggacgatatctgtggtgttgttcatgtctctggcacctgtggtatccaattttgctacaaagttcgggccgtccgaatatttcgccctgatggtgctggggcttacctctattgcgggcatgacagggaaatctcctgcaaagggttttttggctgcgtttatcggcctgtttgtggcggggatcggaattgacctgatctttggtactacaaagttcgtattcggcaatgtaaacctctactccggcattgactttgtgccggtggccatgggcttgtttgggatcgcagagatcgtatgcaactattctgacaataatcttaaagtggataaggggagcctgaaggtcaaaaatctgctgcccagcagacatgagtggaagctgtccctgccccacatcggccgggggacgattttaggctttattgtggggatgctgccaggggcgggtgctacgatcgcttcttttctctcctacgacatggcaaagcgcacctcaaagcggggagaggagttcggcaccggtgtgatcgagggtgtggcggccccggagtgtgccaacaacgctgcctccatgggggccatggttcctatgctgaccttgggcgtccccggttcgggcgcgacggccatcatgatgggtgcgctgatgatgctgggcatctcacctggtccctccttctttgtgaatgaggctgacgttgcctggggactgatcgcctccatgtatctgggaaatgtcattctggtgtgcattggtctcggcgcgctctccctgttcgtgcgcatcctgaatgtaaagacctccaccctgaacgcgctgatctttgcattcattctggtgggcgcctatgcgctggagaactccatgttcactgtgggagtgactcttttcttcggcctgctgggttatatcctgaaaaaggtgggggtccctgcggcacccatggtgctggcgctggtgctgggtgcgatcaccgagaccaatctgagacaggcgctgatcattgacaacaacaattttggagcggtcatctcccatcccatttccgcggtcatcctggtgctggcggtcctgctggcgttcggcacccccatcaaatccctgatcacaaaactgtgggcaaaaaagaaagcgtgaccggcgttgaccttatgtatgatcgggcggtgcccggttatataaaatgaaaaaaggagaaaaagaaatgaaaaaattgcttgctctgattttggcggccgcaatgtcgctctctcttgcggcgtgtggaaacggtagcacctcctctggcggagggagcacatctgagcccgccggaactcccgcggcatcttcaggggaggagaccggatgggtccccacagaggacattgaatttgtgatccccttcggcgcgggcggcggaaatgacgttatggtccgaaaaatcctggagatcgttgaaaaatacgatatgtgtccggtgaatatcgtcccggtgaacaaagaaggtggttccggagtggtaggctatacctatctcacctccaagggcgccgggtatgagtatgcgctggcctccacatccgccagcttttacacccagccgctgacgggaaattctccctttacgccggacgaaagcacgttttccttcgtggcacatatggtaaaagaccctgtggtgctggtggcccacccctcctacggtttcacatgtatccaggatgtggtcgactatgccaaggagcaccccggtgagctgaaatggggcggtgtcggcaacgcatctgacgacgcgatcatcatgtatatgctgaacaatatcgccgggatcgatctgacctatgtgccctatgacgatgggggaatgtgccaggcggcgctgctgggcggacacatcggcctgagcaccgtctctctggcagaggcggaggagcacatggcggcaggcaacatggtggcgctggccgcctgcgcggatgagcggtttgacgcgatccccgaggtccccaccgcggcagagcagggctttgacatcggccatcagcagagccggggcatcgtgatgaacgccggcgtgcccgaagaggtgctggcctattattccgacctgttccagagagtctctgaaacagaggactggatcgagtatgcagagtccaacgccatgacggtgtcctttatgccttatcaggagttcgcagcatatgccgctgagatgctggaggactataccacctacctgggcatgatcccccaggattgatccagggctgatctacctggatctggatgcagggccggcccctctttttgatggggccggccctgccgttttgcgccgcccccttgcattgggtgcccaaatccgctacacttatttatcatccttatcatcatccgggaagggcagagggggcagagggcatggaccatgaggcatatatgcggcgggcgctggagctggccgctcaggcggcggagcagggggatgtgccggtggggtgtgtcatcgtccgggacggggagatcgtgggagagggacgcaaccgccgggaggagaatggggacgccaccgcccacgcggaactggaggccatccgggacgcctgccgccggctggggagctggaggctgcaccggtgcactatgtatgtcaccctggagccctgccccatgtgtgccggggggatcatcaacgcccggatcggcaccgtgcgctatggggccaaggatgacaaggcgggggcctgcggatcggtgctcaacctgttcgaggagcggttcaaccaccgtcccaggctctatcggggccccatggaggcggagtgcggccgtgccctgcgggcctttttcgaggacctgcgggaaaaagacggattttcggaggagatttaatccttttgtaacatctgcgggtgacttatttaataaaaactggatattataatactcgcaaggcaagagcatcttttcattctatcctccaattcttttggaaggccgacaggggactgtcggcctttcctctttttccacggctgcgggagggaagggagaaaaaaccagtgcgatttaatggttatgtaacatttgcccct

SEQ ID NO: 13603 - DNA, 3974 bp, Unknown
  gut microbiota DNA sequence
ttcagcagaaagtcccgagcgctttggagcaggcgttcgggactttctgtttttctgcatagatttccagatccaagggagaatacagggggaaaggagggcgcatatggctgaacagaagcaggatggacctcacccccgccgggagcccagatttcccggccccctgaccctggagggagtggagcagatctttgagggctgctccgactttgcagaacgcaccgcgctgctgcataacgacccacagaggcaggtgaccctctgctatatcaatggcatggtgcggggggagcggatcaacgactatctgctgcggccgctggcccaggacccgcgcctgtctgcggtatctgaggcggaggcattccagctgctgggacagggggcgctctataatttatatgtagagcgccgcaccacgctggatcaggcggcagtggatctgactatgggctggtgtgtcctgttctttcccgggcggatggacgcactctctttcttcgtagggacagaggaaaagcgggcggtggggcagtcggagaacgagcccgccctgaagggggcccgggactcctttgtggagtccatcctcaccaacacctccctggtccgccgccgcctgcgggcgccggagctgaaggtccggcagcatgtggtcggacggcagtccctcaccccggccatggtggtctatctggacgggatcgccgacccggacacggtgaagcgggtagaggagaagctggacgccatcgacatcgacggggtggagtcggcagggaacctggaggagtacctcaccgatgcgtcccggaccccctttcccctgatgccgttcacccagcggccggaccggttctgcgccgggctgctggaggggcgggtggggctgctgtgtgacggcctccccttcggctatctgctgccgggcaccatggaccagttcttccggaccagccaggaccgggccttcaactggatgactgcctctatgctgctcctgctgcgctatttctgcatggcggccaccctgcttatccccgggctctatatcgccctggtgaccttccacccggaggccatcccggtgaagctggccctgtccatcgtggcggccaagcaggaggtccccttctctactgtctttgaggtactgattatgctggtagccttcgaggtgctccaggaggcggggctgaggctgccctcgcctatcggagctactgtgtccatcctgggcggcctggtggtgggcaacgccgcggtggaggcccacatcgtctctccggcggtgctcatcgcggtggccattgcaggggtggcgggatacaccatgcccagccaggacatggcggccgccctgcggctgtggcgcttcctgctggccatcctggccagcctggggggactgttcggcctggcgatgggctgtggggccctgatctgccatctggccgggctggagagcttcggcgtgccctatttggcgccgtttacgtccgcagcaggacaggagcgggggagccctgatctgatccggctgcccctgccctggatgaagtggcggaacggtgcggcgcggtcggccaaccggaggaatcagcgatgaaaaaagttttagcagcggccctgtgcggcgcggtgatgttcctgctcccaggatgcggcggggagcggcttccctatgcccgggagatgggggacatggccctgatgcgcaccatgggagtggacacgggggagggcggagcggagcagctccatgttacggtgtccagcggccgccgggccagaggcttgcagggggaggcggagccgcccctggtcctctctgcggagcgggagtccatcagcagcgcctgcctggccatgcaggggctgagtgacagctatgtgttttacggacatgtggaccaactgctgctgggggaggagctgtcccgccggggcatcctggagaccctccagtacttcagccaggaccaggagctggggatggggacccaggtctggatcgtccggggcggtacggcggcggaggccatctccgccgagcaggagcggggggtggagagccgcctgtccaccatccaaacggacagtgaaatggggatggcggggatgaccaggaccgtgggggagaccctgacgtccctgatggaggacggttccgcctatctgcccgggctggtccccggggaggacggcgcactgctggaggcgggatacggagtggtgaaggacggcatgctggcgggctggctcaccggagagcaggcccggggcctggagctggcggccgggcaggtcggggcggacatcctggagctggaaaccaggggaggaggcgccgcagtccgggtgacagcggtatcggtgagctgtgtgccggagttttccggcgagaggctgactgggctggagctggcctgccgcctctctctgcgggcggaagagagctggggggaaccggagccggcagagctgtgtgcggcggcggaggagcgggaagcggcccggatctcagcggcgctggagcagctgaagggctggaacgcggactgcctgggcctggccaggcgggcgggccagacggagagcgcccgctggaacgccctccgggcccagtggccggaggtgtttccggaactggagatccaggtgacagtacaggcttcgctgctggcggcctgaggagggaaaagggattgaaacaggagaaggtctcgttccggcagctgatggcgctgctctgggccgggctgctggggccggcggcggagtggctgccttccatggtcacagagcgggcagggcccgccgggtggctggtacccctgctggccctgccggtgctgctggccgccgggtggctggcgggctccctgagcaggggagcaggggggctgagccagggactgatggacagcttcggacccggggcagggagagcggtgctcacgatctatatcatatggatggaactgctgctggccctgcggctgcgtctgtctgcccagagaatgatggcggcgggggagagggacggcgcactctggtttttcctgccggtgctggtcctgatggccctctggatcagctgggggaaggcggggcggctggcccggaccggggagctgtttttcctcctgctggccgctgccgccgccgcagtggtggggctggccctgttccaggtaaagggagaaaacctcctgcccctgtggacagagcccgccgcgcagaccttgtatgccgccctcccggtgtcaggggtgctgggatacggactgtatgccgccttcctatatacgcctgaggagggggggagagagggcgggcgctgggtccggtggtgtgcggggggctgtctggccctgtgcgggacccagctggtcatcctgggggtattcggccccgcactcacggcggagctggaaagcccgttttttcaaatggccaagagcgtaggggtggagggggcgttccagcgggtggagagcctggtggccgccgtgtggagcttcagcgacttgatcctgctggcggggctgctccagggcatgaagcggatcgtgggggtcctcctccccaaggcgagcccccacgcagccgccgtgatgctgctggcctccgccggggtagtggggctggcggctttccctaacagtgcgattccagaagcgctggggagaggagctgtgctgtgggggaaccttctgctggcccttgctctccctctcctggcagtcgtggtgaaatggtttcggcactgagtcaggatgcacctacatcttgtaggttaaatgaaggaaaaatccgaagatatagtaccgtaaaagaaagaggaaaaaataaggaagaaaatcgaaaaaaggtgttgacatttggcgctgggtttgctatagtaatcaagcacttcgcgagagcgcctttgagaaaaaggcgggcggatttgaagtgtggttatc

SEQ ID NO: 13604 - DNA, 32529 bp, Unknown
  gut microbiota DNA sequence
aaaaggggggaggtcagcgagcaagatcctcacagaagttcatgaggatctgggccacttcggcccgggtggcggtgccggcggggtccagatagcctccgggtctgccggagatcaggccctcggacacggcccagcccatggagtcggccgcccagacggcgacgctgtcccggtcggcgtaaccgctcaggctgacggaggcgctggtgtcatagcccttgtatctggcgtagccatagaggatcagggacagctgctcccgggtcaccggggcatcaggagcgaaggaattttcacccatgccggccacgatgccctgggccgcggtccagttcaccgcatcggcgtaccatgcgccggcggccacatcggagaaggtggccgcgccggagacagcgggcttgtcctccatggcatagaggatctgggacagcatggcacgggtcagtgtgccgttgggggagaagcgggagccatcggtgcccgacatgatgccgttttcggccacataggccactgcatcatagtaccagtcgtcctctgccacatcggagaagaggggctgttcctcctcctgctccagagccgtaaagacggcctctaccgtgaccttggaggcgggcatggtgaaggtgaacctgccgtcgcccttgtccttgagcttgatggagtccccgtccttgtcggtgacggtcagctcatccagttcatagccgtcatcgggcttgacagtgatggtgaccgtggtgcccttggaggcgctcttgggggagacagtgacgtcgccgtggcggctgctgtccacgctgaccgtgtaggtggcggagccgctggagccgccgccggaagagcggcgggagatggtataggaaccgttgccgtgatccgtcagacggtacccggaggcggccaccagagtgggcagggtatcgacgtcctcacccttgaccagggtaaaggtcttactgccctgaatggtgaccgtgcccaggccatccttcatcacggtgatagtgcctccgtcagcaaccgcgtcgatagcgtcctgaagatcagcgtaacccacatctcccacctgggccgctgcctcgttggtcagagagaaggtgaaggggctgaagccgtggcgggtgctgaaggtgagattggctccctcatccgcctccgcggtgtaaaaataggtcctgccgttagaggcctgatgcttgatatagatggtcttgctggcaaagtcgtcgggcagggttagggtgacatgagcggttccggtgatgttcagatcctcctgggggatctccttgaccaccacggagttgccctggttgatatcgcctgcggtgctggcggtggaggccaccacctgtcccttgggcgagatgtccagggtgacggagttaatactgccgtccgtaccggtcagagcgtctactgtggtgacctgcagataggtctgagtatagaggacaatctcctcgcttccaagttcggactgtcctttttgtagcagttcgtccttttctgcgctgttggccagctggccagcctgttcctgagctgcctgagacagggcggagcctgcgttcacagtgccggccgcctcgttcacggcctccttgacctcatcattcaggccgtcaggcagctggtcctcagtctcggtaggctcggtgctggggagaacgtctacgtccgccccggtgacggtgacagtgcaggaggcgcggtaagcgccagcagaagcagtgatgatggcctcaccggcggccacggcggtgacggtgccgtcttgagccacagtggcaacggcctcgtcgctgctggtccaggtcaccgtctggtctgcattggaaggggagacggtggcggtcagggcagtgctgccgccgctgacgagtgtcagggcggagcggtccagggagatgccgtccacaccggcgtagctgactgtgacggagcaggtcagtgattttccgtttacctcagcggtgatggtagccgtcccgggagccgcagcggtcacagtgccgttgtccacggcggccacagcctcattgtcgctggaccaggacacagcggaagcaggcacagcgccccagggctcggcattgacagacaggacagcctcgccgcccttggtcagggcgagggtctgctggctcagggccagcgtgcccaccatgtactggtagccatcctgattgctggctacggcatccttgccgctgacaagataactggtaggatcggcggtgaaatagccgccggagatgctcaggccatgggcggtcccggtctggatatcgccctggaaagagccgccggaaatgttcagagccgcctgtgcggagttggccatgatcacagcgggggggaaggtattctgttcggtcccctcggcgggagtgacggcgtaggtgccgccggtgatgctgagggagctggtgccgccgacggaggaggaataagccacataaacggccctggaattcccggcgacggacacggagacatctccgcccatttcgccgatcatgccgtagttggtgatgccatagcgggctgcggggttgggctgtccagcgataagatatccgtcatcgctgcttccaatggctcggaaggcgccgcctgtgatggagtcgatggtgccgtagttctggagcacattgttgccgccccagaagtgctgctcctggttgtccatggtaaaagtgcctccggtgatcgtgccgattttgccgttgggttcatttttcagcacattggcagcgccggtaaaggtgccaccggagatcagtttgatctccccaggatgcggatcagcggaatcatccactccgtttcggatcacactggagaggtttccgagggctttggaagtgccatcaccggtcgtgaaggtgcccccggagatctcctcgatgacaccgccgttgaccacagtgtaccaggaattagtggcggtgccgccggagacgggatattgagtctccttgctgcgggtgaacataccgccggagatctcggtaatggtgccgtagttgtacagagctgccttgccatgggtgaccacatccaccacaccgccgccggcgctgtccagaatggtcagggtgccctgattgacgatggtgtggctggacacattggtcagggtttggccgttcaggtccagggtgaggatcttgccttcggggatggtgatatcttctgccacatcagtgagtattacgatggtatcgccgtccgcggcttccacggcggcttccagagtaccaaacccctggtccccgattttcgcagctgggatgagctccagatagttttcagaatcggtgttcatggaaagcccgtctactatgagctggtttccttggccagaactgccgtacagagggatcagatcgttcccattggcggtaccctccgcttggaaggtgcagtcagaaaagacaattttgttggctgaagcgccatagttgcaggaaacaatcacctgataatttccggcagttgtattggcctggatatcgctgtccgtgatgtacagcgtgttcccaaagccggagtccccttccgggatatcctgaagttcgccgccgtccagtacgatggttccgaaattgttgctcggaccggaaaaatggttgatcccgattaggatgctgtcggtgatggtagtgttggtgttgcaggagtaagcatagtaagccgtccagccctggatctcacagccggagatgtcgatggatgcggccgtgttcgcctgaatgttgatggcgtatttgtccaccgtgaggctgctctgctggacagaaaggtcaatgtcggagtaattctggaaataaaggccggaatgtgcggagtcatcctcataggtaaagttggtcaggctgacattgacgccgctgctttgagtcaagccggattcattccaggcgccattgatatagagggcgatgttgttagtgctggcggcctcagacggggtttcaaaggtcacgttctctgccgagaaggacatgtcatcgccgttcaccattctgacgacccgggcaccattcttggagttgtcattgacaacgaccgtgaggtcctccagtgtgagggaagcatcgtcgttgacaaggtggaaggccacctgtccattgacgctgatggtggtctcagattccccgttgccgaggatggtgacatgctccccattctcaaaggtgacgctgtcaatggtgtgctcgccggagggcagagaaatgacggcgttctcagaagaggatacagccttcagggcctcggagagggagtcgtaaggtgtaccgttcatggtaacggagtcgtcaaccgccgcaactgcgaggtctgccatagggatcgtattgttggggggcgggagggaaggatcttcatcctcaggcaggctgggatcgtctccttcgtccgggccgtccccgggcagggtgggatcattcccttcgtccgggccgcccccgggcagggtgggatcgtccccctcgtccgggccgtccccgggaagcggatcgtccccgccgcctccggtgttccccagatcgggggcctcctgcacctgccccgcgggctgactgccggtgtccgcaccgtcagccagtgctgtgacagggagcagagacagtgccatggccatcgttatcacgatggccaaaagccgttttttcatgcataacactcctttacaaaaaatagggtctgctgtatgaataagcggatgataccgctgattcaataaaacgaaatataaattacgtctataattaaagcgcattttagtgggaaacgcctgccatcttcaatcttgaagatggatcatgcccatatgggcatgatcatgaaatttaaattacgattttttataagaagaaaagaccctccagctgatctcctggttcccgatatgtgagcaataatattcaaaataattattatgttatttttaaaagaagtatagcacaggtgcggactgttttcaagggaactcttcttttttgcttttgcgaaatttgaagaaatttcctgaagggcagggcagagacagaaaaggggagctgcccgctcacttttttcaaaaaatacttgtattcggcggaaaactgtgatatactaccagcgcattatgcctgggagtgctgattttccgcccagtgcccggcctcggccgggttggcggggaatatgaggcgcccggaaagatcaaactgaattttaggaggaaacaagaatcatggcagtcgtatctatgaagcagctgctggaggccggcgtgcacttcggccaccagacccgtcgttggaaccccaagatggccgcttacatctacaccgagcgcaacggcatctatatcatcgacctgcagaagaccgtgaagaagctggaggaggcctacaacttcgtccgtgagctgggcgagaagggcgagaccctgctcttcgtgggcaccaagaagcaggcccaggaggccatcaaggaagaggcttcccgcgtgggcatgtactatgtgaacgcccgctggctgggcggcatgctcaccaacttcaagaccatgcggggccgtgtggaccgcctgaatcagctcaagcggatgcaggaggacggcaccttcgacatgctgcccaagaaggaagtcatgaagcacctgggcgagatcgccaagctggagaagtacctgggcggcgtcactgagatgaagaagctgcccggcgccctgttcgtggtggacccccgcaaggagcgcaacgccatcaacgaggcccgcaagctgaacatccccatcgtcgctatcgtggacaccaactgcgaccccgatgagatcgactacgtcatccccggcaatgacgatgccatccgcgccatcaagctgatctcctccgtcatggccaacgccatccaggagggcaagcagggccaggatgaggcccccgctgctgaggaggccgctcccgccgccgcggagcagtaagccttgacccaaagcgcccgcccgacggacgggcgggcgctctctttctgtattccagagaaaaaacgatcatattttatggaggtaatacaaatggcttttaccgcgaaagacgtacaggccctgcgcgagatgactggcgtgggcatgatggactgcaagaaggcgctgaccgccgctgacggcgacaaggacaaggctatcgagtggctgcgtgagaagggccttgccgcccagaccaagaaggccggcaaggtggccgccgagggtgtctcctacgccatcgtcaatgaggctggcgtgggcgtcgtggtggaggtcaactcccagaccgacttcgtggccaagaacgaggtgttccagggctttgtcaaggacgtggcctccgtcatcgccgccgaggaccccgccgatgtggccgcactccaggagatgacctaccccggcaccgaccgcaccatcgcctccgtcaccgccgacaaggtgctctccatcggggagaacatccagatccgccgcttcgtccgctatgccgagggcgtcaatgtgccctatatccacatgggcggcaaggtcggcgtgctggtgaacctggccgtggagggcatcgctgacatggccaaggtcgtcgaggtgggcaaggatgtggccatgcagatctgcgccatgaaccccactttcctggacaagagcgacgtggatcaggccaccctggacaaggagaaggagatcctgatggtccaggccaaggaggaccccaagaacgccagcaagcccgagaatatcatcgagaagatggtcatgggccgcattggcaagtattacgaggagaactgcctgctccagcaggccttcgtcaaggagaataagatctccgtggagaagcacgtggctgaggtggccaagcagctgggcggcaagatcaccgtcaaggccttcacccgcttccagaccggcgagggcatcgagaagaaagaggacgacttcgccgccgaggtcgccagcatgattaagtaagaccgctttacagcgcctgacagataacttgatggagagagcccgaggcaacgagagttgcctcgggctctcttttagtttttccacaatagaagatcccccgccgcagaattcggcaggggatcaaaaggacatcaggcatccagcagaccggactggaccaagaagtcgtgggcgacggtctccacctcctcgcccgccacgtccacccgataggtgagctcactcatcagttcgtcggtgaactgctcgttgaggagctggatggtctccttgaggccgggagcatcctccgcgaagcgttcgaatacgtcgctgcgggccagaatggtgccgtagtagtcggggaagaagtgctggtcgtcgtccagaagagtcagattggcccgtttgttcaggccgtcggtggcgtagaccaccatcacatcgtaagcgccctgctcgatcagggtgtacttcatcataatgtccaccgggttggccacctggaagttcaggccgtaggtctccaccatgggaccgaacttcatgttgcccgcgtcggtgaagaagtcctgctcagcgcagaagcgcagctctccggcgatgggcaccaggtcgctgatggtctccgggtggtaggtatccaccacctcctgagtgacaccgatgacgtaggtgttgttgacaccgatcttgcccagcagctggaggtcgtactcctcattcatcttctcgttgacaaagtcgtagagggtctgtccctctgggatatcggtggtgtccagccccatgatggtggtgaggagggtgccgtcccacgtgtacatcagatcgcaggagtgattggcggcggtgagggcgttgaagttgttcaccgcggtcatctcgtcctggatggtgacagggatgccatggcggtcctccaccaactgcttgatcatgctgttgaccagctgtacctcggagaactggccctcatagaggagcaggccggcggtgctcttgggcaggaaggcgtacacgcacagggccagggccgccgcacaggagaggacggcagctccccgggcggccatcctgcggcccctggggcgctggctgtcccggctgttgagataccgctccgccatgcccatcagcaggtccagaaccagggccgccgccatgagtacgccggtgccgcccaggatggcctgcatgtcctcctggcggatgccggtggtgatgacgctgcccaggcctccgccgcccacaaaggaggcaaagaccgcggtgccgatggcgttgactgcggcaatgcggatgccggtgaagatgatgggggcggcgatggggatctccacatggacgaggcggtaggtacgggtcatgcccatgcccctgcccgcctcgatcaggtgctcaggcacttggtccagccccaggcaggtgttgcggacgatgggcagcagggagtagagggccagacccacgatgacagtgggcttgcccggaccgatgaacaccatgatgatgcccagcagtgccaaggcgggggtggtttggatcaggtccaccactcggaggacgatcttccgggcagcaggataaaagtggcagaggatgccaaggggaacacccgccaggacggcgaagatgagggcggcgaccaccagagacaggtgctctaagatcatggaagcggtcataccttatcccctcccttccgcatccccttggggaccacctgacgctggaccagatccaccagagagcccagcacgaaagccaggagggcggcggggatggcacccatcaggatgaggccgttgtcattggagctgatcccggagtagatgaagtcccccaggccgccgccgccgatcatggaggccagtaccgcccagctgacggtgtagacggtggacatgcgtagcccgccgatgatggtgggcatggccaggggcagctccacccggatcaggctctgtatggcgctcatgccgcagccacgggcagcctcgatgtactgctggtccacggataccaagccggcataggtgtttttcagcaccgggaaagtggcgtagatgcccagggcaaccagtaccgttgcggtgcccgccccccaggccagcaccagcagaccgatgaacacgatgcccgggatggtgttgaagacggacaagacgggcaggactactccggagagcttgggccgccgggacagcaggatgcccagcacaaggcccagggcaaagccgatggcgacggacaccagggtgaacagaagatgttggccgatggccacaggaagtttatcccatcccaatgtgtctcacccccaaagctgttccgccatagcggaggtcatgctggtcttggtgatgatgccgtccaccttttcctcctcgttcaggacgatgaggtagggggcgccgctggagatcagcaggtcgaagcagtccttggcgctgtcccctgtgtggacggtgggggtgttgcagcggatcaggggctcgatggtcttgaccacatggccggtgaggcggatgtccgcaatggacacggtgccctgatagcggtcctggtcgtccaccacgatcagggtgtccacgttgcgccgttgcatcttgctgacgcactcgttgacgccccggcgggcggaaacggtggacacgccggagcgcatgaagtcggcggcggtgagctccttctgagcgtgggtgtcgatgaaattgcccaaaaagtcctggatctgtccgctggcggggtgggccagcatctcttccggaggcgccatctggacgatgttgccgtggtccatgaagataatgacgtcggccagatccagagcctccgccatgtcgtgggtgacgaagatgaaggtcttgtgcagcttctgctggaggcccttcacctcctgctgcagggagcggcgggtcatggggtccagggcgctgaagggctcatccatcaggacgataggaggggaggcggccagtgcccggaggatgccgatgcgctgctgttgtccgccggacatctccgaggggtacttgttggcgtactgctcatagggcatctccaccatggcgagcatgtcgcggacgatctggtcgcactgctccttggagtacttcagcagcttgggcaccacgcagatgttttgggccaccgtcatgttggggaacaggccgatctgctggatcacatagccgatgtggcggcgcagctccaccttgtccttggaggtgatgtcctcctcgttcagatagatctttcctgtgtcgggctggatcagacggtttatcatcttcagtgtggtggtcttaccgcagccggaggggccgatgagcacggcgaactgcccctcctcaatttcaaaacacagatcgtttaggatcttttggctgccgtaggacagggatacatggtcgaatcttaacaaatgagacctccttttccggtgtggccggagaccggccagcgggccaacgagaacggcaccggaggggcgcccttcaggtatcaggtgcgggatggagggggagagccctctgctccaggtagaaaattgggtaacattacaactttattatagcagtaccagaaaaaactgtcaaataaacaaaatgtaaatatgggtcggatgacataaatatggaattaaactgggaaattaagaaactttttataaaatcttaaccatatcccgggcctgtccttaaaaaacgtctggtacactcgaaccagcaaaggaggcgagcgcatgaatctggaaatcatcctggtcaggacggtcctggtgctgaccgccgcgctgtcggtggggatttctctgtggggcggatactatctgctgacgggcctgatgtcttggcgcaggcccatggactacggccggcaccccgccggcacccggttcgcggtgctgatcgcggccagaaacgaggaactggtcattggtccgctgatcaacagcctgctggagcaggagtatccggcggagctgtatgacatctatgtgatccccaacaactgtacggataacacagcgctggccgcccgacagttcggggcggaggtgctggagtgcaccgtgccggtccggtcaaagggggaggtgctccgcttcgcggaggagcagctctccgggcggcactatgacgccttctgcgtctttgacgcggacaatgtggtggaccggtgcttcctaaaggagatgaacaatgcctatcgggccggggcccgggcggcccagggctatcgggacagcaaaaatccctatgacagcgccatctcgggatgctactccatctactactggatgatggaccgctttcacaaccaggggaaagccggactggggctgtccgccatgatcaacggcacaggcttcatggtggccgcctctactctgaagaagctggggggctggcggacggagaccatcagcgaggacctggagatgaccgcccagtgcgtgttggcggacgtgcaggtggcttgggtgccgctggccgtcacctatgacgagcagcccctgacttaccgggagtcggtaaagcagcgcaggaggtggagcagcggcaccatccaggtggcgcggcagtacctgccacggaccggacgccagatgacagcggccccccggggagcgcttctggacataggcatgacgatgctgatcccggcctatcagctggtggcggtggtcaatacgctggccgcggccgcggcggccggcctgagcggacggcccttcaccttcgcggcaggggcgttctgcggcgcgatcctgctgaacgtgggactgacggcggtgttcgccaccttgagcggcgccctggtgctgacagtggagagaaagtgggaccgccgcctttggaagagcttgctggtctattggctcttcctgctgagctggctccccatcaccatcgggagctttttcaagcagactacggtctgggaggagatccggcacacccgcaatgtgctgccggagccggtcctggcccggaagtggtgatacatgtggaaaaaggaggaccgcccatgcccatgggcggtcctctcagtttgtgggaaaagccctcctgcaaaaagctccggggaccgatgggcggcaccaaatcgaagccaaacgcagtggattcgatttggaacggaggagcaagggagcggcagaatgagtgcgcgatgagctttgcaattgaaatgaaaaagctcgtggcaagcgatatgtcgcttgccacgagctggcgcagaaggagggattcgaaccctcgcacggtttaacccgtctactcccttagcaggggagccccttatagccacttgggtacttctgcagctatcaatagcgcctcgtcaggaaagaggtggcggagagagtgggattcgaacccacggctcttgcgagtcaccggttttcaagaccggctccttaaaccactcggacatctctccctgttgatctccaactcagaggcgaatgaaagcataccatattttgagccgtatgtcaaccttaaactgcgttttttgtgggctgttttttctgagcctcaaaacaggggcggtcagcccgccggcccccgaccgaaaaggcccctggaaaaaacgggcagtgcatgttccgcagggcgcttttggtttttgatataataagaaggaccccgtccaaattcatatttgggacggggttttttgatggaacttcccgattcccatttggtgcggcttgtttatgcagggcgttctctgccgcatcgatctgaattggggcgatgaaagaggaggagccggaaagcgtggaatatggatatgttcgggtgtcgggaaagagtcagaatgaggagcggcagctctatgccatggagaaggcggggatcgccagggagaggctttacatcgacaagcagagcgggaaggatttcaaccgcccggaataccagcgcctgctccgcaagctgcgggagggagacgcgctctttgtccagagcatcgacaggctggggcggaactatgaggagatcctggagcactgggggctgctgacccggaaaaagaaggtggatatcgtggtattggactttcctctcctggacaccagggggaggggagaggaccagagcctcaccgggaaattcctggccgacatggtgctgcagatactggcctatgtggcacagaaagagcgggaaaacatacgtcagagacaggcggagggcatcgccgtggcgaaggccagcgggaagcgctgggggagaaaaaagaaaaacttacctcctgatttcccggcactctacacggcctggaaaaatggggagataagtgaggggcagcttctggaagtctgcggaatgaagcgcagcacgctgtataaacgtctgcaggagaagagggcgtgccagagggagtaggaagaaaagtcccaaaaagtgtactcagatagacgaaagaaaaaaatcttttctctctgtaatacttaacttttccgccggaatgccgaagtacataacagagacccaggagcagacagaagtctatctgagtacacttttctggacttggaaaagccttgggcgtttggagggaagagcatgctggtgttgggagtgcgctccggcgaatacatcaccatcggacaggatatcgtgatccaggtcgtcaaggccggtgaagtgacgcggctcgccgttcaggcgcccagggagtgccctgtggtgcggggaaagctggtggagtccagcggcggggcgcccgactgcatccgtaagctgcgccagaagaagacacctccccatgcatcaagattcaaacaggaccgggacgagaccggggccctgtctgaatagtaccatccacccctgcggaccggagggaaggaaccgtccgggaatatcaaaaataaaggagaaatcactatgcgtattcagcacaacatcatggcgatgaacgcctaccgcaactacagcaacaacaccagcgccctgtccaagaacctggagaagctgtcttccggctataagatcaaccgggccggcgacgacgccgcgggtctggccatttccgagaagatgcgtgcccagatcaccggcctggacaaggcccaggacaacgccaaggacggtatctccctggtgcagaccgctgagggcgccctcaccgaggtccacgacatgctcaaccgcatgtatgagctggctgagcagtccgccaacggcacctttgaggacgccaccgaccgcaatcagctccagaaggaggtcgaccagctcaagagcgagatcgaccgcatcgccgactccgccaacttcaacggcatcaagctgctggacggctccatgaaggaaggaaatgccctggatacattcactacgactatcagcgggaaagccacagcttccaaggctggtgtggacgtgagcatccaggccgaaggcttcaaggcatccagcgccgctaccaccctgagcaagcccacctttaagtttgcgacgtcgagcaccgcctctgctgcggcaaaggtggcaaaggacggtacagtcaccatcactctgaaagagggtgagtcttacacggcggcagacattgaggcactccttaagaaggctacgactggtactgccagtggtaccaaggcatctgacgctatgatggatgctgtcaaaaatgctaaggtcagcggcagtggtgtcaccgagatcgggacgaatggttcccttgcgaaagcaagcgctgcggccgtgcaggatacaggtaaggatctgaccctccagatcggcgacaccagcgagaagttcaatcagctggaggtctccatcaacgactgccacgtagatgctttgggactcaccgaaatgaagatttctgaccaggacagcgccgctgaggctctgaacatgatcaagagtgccatcaactatgtctccgacgtccgcggcaccctgggtgccacccagaaccgtctggaccacaccatcaacaacctgtccgtcatgcaggagaacatccaggatgccgagtccaccatccgggacaccgacgtggccgacgagatgatggcctacaccaagaacaacatcctgatccagtccgcccaggctatgctggcgcaagccaatcaggtcccccagggcgtgctgcagttgctgcagtgatcccgggcagttgttctggaacagcgaccacagggggccgggctcagtgcccggcccccgttttttaggcgcggagggcgctggcccctcgcaggaatacttgcggaccgtgaggtttttctatggatacgatcaaaatcgcccgccggctggcggagctgggacagacggcggacgcccagcgggcctacaccctggcgctccaggcggcaggattgtccccggaggaggagctggaggccgccagctatcttctcttttccaaaggcgactaccgggtggcctataccagcttcctgtctctttaccgccggggcctttttcaaaaggaactgctggagctgatgacccaggccttctacctgcccaatgtggaagctctccgcaggcagtatgaggagaactgcacactgctctcccgctatccctatctgtttcggagagactttcttccctttgaggacctgcctattcaattttacccctatgacgatgacggctatcttccctttgactggaagagcggccttttttccgactatgtgaatttccatactccggtgatcgaccgaaattttttccatgacctcgaaaagcctgtactggcatcagatgtgtactcccagtatcagctggagtacctgaacgacacggtgcgcaagagtgagtgggtgggccgggagaatcatatctaccttcactacacggattgggggaccttctgcgcccatctccagtgtctgtccttcaaaaaattgctgaaggaagagaagcttgttttcctgatcgaggacgagcttgcccaatatcccatcgattttcaggcacggttccatatcgattacagccgttacccggtgcgcccggtgggcatccgggaggtgaaccgcctgatctggcacacacagctggcggcccacaacggcggcgatttcttcaacgagatattctatggacacccgaacctgttggcttatgagtcgctgatgtttgacagtatcgaatcccttttggaggatatgcgccgccgggtgcgtaaccgttgcatggagacggagacagaccgacagcttattcagctcaaacatccgaccgacaaggatttgctggtagcctattttttgaatcagcagaggtcaaatcaaggcatggaccccaacgcccgcattgccccagccctcttttttcagcctcattttgcgaatattcactatgaaattaaagtttatgacaagacagaagcctgcctgttgcattcggatgagtatgaccgtatccgaaataccacgtttttccggcagttcaaatacattaagacctttacccctatccggcgtcccacgaccagttatgccgcaacggtccgtttcatgattaagcaggcttttgctgatgaggacaaaaccggcggcgtcagcgatgtggtgatggagcgtctgctcaaccgcagctaccttctggacccagacgaccgtctctaccaggacagcatccttgttcgctttgaggacgggaagctgaatccgaaagcaaccttcactgccttggcggcctttttggacctgccttataccgagagcatgacctactgctccggctggacgggaatcaacccggaatcactggagggtaatgtccgcggctttgaccctgctaccgtctaccgcacctatgacgactatgcagacgatgccgaccgcgcattcctggaatactttctgcgggatgcctatcaggcatatggctacgactttcactactatcacggggaaccggtggatgagacttgggtacagaaaaagattgaaggctttacccatctcaatagctttattgagaagtcggttcgcctggttattcgccaggggttcattgagcagggaatggctcccgagaaggcggatcaggcaggcgtagagcatagcagaaagcagattgaggcattgaatgggaaccggctccatgtggctgggcttctgatgcgtcaactgcgctttgtaaaccagcggggccagcctctgtgcttgtcccgtctgctggagctggacccggccctgctggaacagccaatctatcactgaggaggaccacatggaacacaagggaaccgtttactttttcaccggcctctccggcgcgggcaagaccaccgtaggcagcctcttttaccggcggctcaaaaacaccaagcccaacgcggtctatctggacggtgacgagatccgggtggccttcggtgaggatgtgggctacaccaacgacgagcgcctccgatgggcggggcggatcttccgggtgtgtaagctcctctccgaccaaggcatcgacgtggtgtgctgctccatcgccatgtatcagagcgtccgggcctggaaccgggccaatatccccaattacaaggagatctatctgagggtgaagccggagaccctgctggcccggaaccagaaggggctctacaccggggggcacaatgtggtgggggtggacctgccctttgacgagcccaagacccccgatctgatcattcagaacgacggagaatgcacccctctggaggtggtggaggagatcgagcgggtcctgtatcccaacatcgtcgaaaaccccatcgataaccgggactactggaaccgctattatcaggacggcctctgtcccatggacccctccccctttgcccggtatgccgccactctggtggaaccgggacggaccctggtggacctgggctgcggcaacgggcgggacgccctctactttgcctccctgggcctctctgtcatcgccattgacctgtcagacacggccattcaaacgctgcgggagcggggcggagacaacccgcgcttcctctgcggggactttatcaacgcccccatccaccggcctgccagctatgactatgcgtacagccgctttaccatccacgccatcaaccagcagcaggagcggatgctgctgctggccatgcaccgcgcgatcaagcccggcggaaagtttttcatcgaggtgcggggcgtccatgatccgctgtacggcaggggacagccccaggagaaaaacgcgttcttctacaacaatcattaccgacgcttcatcgtcatggaggagctgaccgcctctctgcaggaggcggggttccgcgtggagtacgctcaggagcggaccggcttcgccccctacggaaatgatgacccgccggtgatacggatcgttgccatccgcaaggagatgaaagcatgaccgtcctggcagacctccacacccactccaccgcgtctgatgggcagtatgcgccggcggcgctggtggaaaaggctgccgccgccggcatccaggtgctggcggtcaccgaccacgacaccattgacggcgccgaggaggcggtccgggcgggcacggccctgggccttacagtgctgcgcggcgtggagctgggggcggccgaggaccggcacatgcacatactcggcctgcacctcggcccggagtgccccgccctgacagcgctctgccgcaagctgcgcgccagccgggacgagcggaagttccgcatcgtggactttctccgggaaaagggcatggatgtgtctttggaggaagtggaggcgctggcaggcggcggggtcgtcgcccggcctcacttcgcccaggtgatgctccggcgcgggtatgtcacctccctccgggaagcattcgaccgctatctggattccgatgaatatcagcgcatcgaacgctggaaggccggcgccgcggagtgcatcgccgccgtccacagcgccggcggcagggccgtgctggcacacccttaccagctgggctatgcggacgatcgattggaggagaccctccgtaccctgcgggagaaggggctcgacggtttggagtgcttctatccccgtcataccccgggacaaactgccgcctatctgcgtcttgcggaaaaatatgggctctatatcacagcgggcagcgatttccacggggaagccgtccgtccggacaccagactgacgcccatttccctcgaactggggtggctgatttaacagcgggggaggtagacttgacaaacacatcgcttccatcagcgcaggtaatatgagaccgggtttggcaagagcgccaaacccggtcgtttttcagccatcccagcttccagtatgttcaaaattcctctttttccttgagaaagacatagtgatcgtgcccggaatgggcggcgtcataccggtaacccagatcctgaaagtctttcagctcctcgctccggcggacgccacgctctgccatccatcggaccatctgcccccgggccatcttgcacagcgtgcccttttccaccacccggccgtccttacgcagctcgccgaaggtgcaggtgagcacctccacagaggggggcaggtgggggagcaccgcccggctgtactcctgggaggccaggtccaccaccaagccggcctctccggccagcgctcgggccagcctgtctccccagaaggcgtacagatcagggcagccgttcaccgacagacgggcctgcatctccaggcggtagggcgtcacgccgtcgaaggggcggagcatgccataaaagccggagaggatgcgcagatgttcctgaagataggtgaactggccggtctcaaagacgccgggggccatgtactgatactggatgccctgataggagagcagggcgggggtgaggcccttccccagctccatgcgggccagccgctccacattcagatcggtgatggcgtcgctgcaccgccacagctgcttcagctcctgccgggacagggaacgcagagcggagagcaggcgctccgtctctgggagaaaggcgggcagagcctggggagagagcgtgtcggtgtcggtccgcatctttttggcgggggagatgaggatcttcatgtgctcgcctcctcccactgcctcagaaccgccagctgttccggggtatggaaccagtgctccatcccctccgccgcagtcagggagcagcggaagcggcgggcaaagcggtccactgtgtctcggggcaccagatggtccttttgggcccagaggatgcgggtgggggtctcccagcgggagacagggtgggcgcggacgtactggagatagggccaggacagggtctcaccgaactcagtggaaatctctccctcggcctccaggcgtgactcggtcaccccggcccaggacatcatctcctggatcaggcgctccatgtccagcaccggggagacgaagagggctcggtccagggggcggtcctgaaaggccagcagggagaaccacgcccccaggctgacggcccggagggccaggcggttccacttctgtccggacagggagagcaggtctctcaactcggggacagcgtgccagggggtgaagagctccggcccgccggaccgtgccccgtggccgggcaggtcgatggccagtacctgccagcccttggggcagaccacctgggcgaaggactcggcctcctccttgcggccgcccttgccgtggaggcagagccagacctgaggggacggggagccgtagaggacagcggggacggaggcgtggttcagagtcagagtcatggtatccataaggttcctcccgctccctggggagcgatctgtcgtaggatggctggggaggcgtcagggctggatggccaccttgatgacgccctcccgccgggactcgaagagctggtaggccgcgtcgatgtccttgagagggtaggtgtgggtgatgaggggagtggtgtccagcttcccggcggcgatcaggtccagggtctgggcacagttgcagccatccaccccgccggtcttgaaggtgagattcttgccgtacatgtcgggcagagggagcagctgcggccggtcgtaaagggccaccaccgtcaccaccgcattgggcctggcgcactcccaggccagacggaaggtgtcctcgctgcccgccacctccagcaccacatccgcccctccgtgggcgctgtgggccaggaccgcctcccggagcccctccggctccagtgccagcacctgaggatagtgggcacggacgaaagccaggcgctgggggtcccgctcacagacgatgacccgcctggggttttccagcaggacgcactggagagtgcacaggccggtggggccggcgcccaggacgagcaccgtgtcctccggtgagatctgggagatctgagcggcccagtatccggtggccaggatgtcccccacgaacagggcctgccggtccgtcacggcgtgagggatcttggtcagcccctggtcggcataggggacccggacatactccgcctgcccgccgtcgatgcggcagccaagggcccagccgccgctgggatcggtgcagttgttgacccagccgtgtcggcagaaaaagcaggagccgcagaaggtctccacattgacggccacccggtctccggggcggagggtacggacgtccgggcctgtctcctccaccacgcctaccatctcgtgtcccaccgtgacgccgggcaccgcccggggaacagagccgtgcttgatgtgcagatcgctggtgcagatgctggccagcgtgacccggacgaccgcgtccccggggtccagcaggaccggctttggcttgtccagcagggcgaatttcccccgctccagataggtgtaggcgagcatggatcagacctcctgtgttttgagatggatgaaggcggcgccggatcggagagaaggtgccggtgcccatgtcacacagcgcgccggaacccagggcgcgccctaacagcgccgcccggcctgcccattatacctcaggaagagaaaaacagcaactcgggaagttagggggagcggcaggggacatgtgatgataaaacctgagaggaactaaggccgtcaggcagtttggtcaaatgtcctgatagtttgttccctgaaaaagctgcagtaatctgcagactccccaaggaatttcatcctgataggacagagaggcttctgactgctcctgcgctagttttatgatggtgctgtctgttgcttcgagttcatttccgtttggatctaaaagctttcccaataacagcactccgtgcggcccgcagagttcctctttaaatttcaaggcgtcaatagccttattttcttgttctgaagtcactgcataaaacatcagcttcttttcgatctgctccagttgttcttttgctgttttaaaaatcgggaacaaatcgaaacactcttccagtttggtaaaagcggcgcgctggggagcggtaaagcgggagttgtcgagcaaccgttgacgatgtgcatatatctgcgcgggcatgtctaaacgcacggatataccgtcaaaaacatcgtctacatgttggaaatttcgaagggcatatgtaattttatactcatcgtaagtatcgaaggcaagcgtggtcagcttttgataagcggaaaaatagttggatccctcgccataagctctgactatataggttctccaatgatcaagacactcgttgaaagagtacaagaaatttgccacagcatcctttgcgttacgttctaactttgcggcgtttttttcaggggcttccaggatttccgctaatgcagaaaatcgatcttctaccctctgaaaacggtcaatattcttctgataggggcccagctcctgtgctaatgagtgataccacttgtgctcatcgcttgtggccggacgcagatgctgaagagtgctatcatcgacatagaaaaaatactctatatccatatctatattctcctctctcaaattttaaaatcaagaatctcatagagttacttttggtatatcatttattaaaaatcctgtcactcaattttgctttcgagtgtagttataggatttccagttatgaatattcctactattccacatgcacacaggcatagcaaaagaccgccgataaacgtcgacggtctttccaatttggtcggagtggaattataggatttcagaaaacgcagatatatcaacggtttgctggcagtcggaaagaggtatttattctaaaaatctaaaatgacaagaacaacgccgcccaaacaggacaacgggcggcattgtgcatgttacttttgaaatattagacccgttgagtacctttatgacgagggtttatgaaacaaggcgcctttcaatctcatgaatgaaatcattgaaactcggcgattcgttcgatttcaaatccatatgtattcctatattttgcgcccattcagctttcaactttccgatttcaataaaggaggcatgctctctggataacttcgaagttccacccggatagacagcatcagcgagtacttcccaagttccacatatgctatcctgaacataagtatttaatacatgcatttttgcatgaggatatgcggacaaaagtgcatgcctatcgcccagcagccatgcttcaatttcttcaaccgcaaggcaaaacacatgatctatctttatcatgttctgcattgcgacagcttctaattcagatcgaaattgttgcacatcgtgatcatcgctatctaagacaacaatgattacagaaggaaaactttgaaggcttctgtcaaagccgcgcaagtatgttgctaaatcgttgagtaactttcctgtttttgtttcttttatcgtattttttcttgtgaatccaccgatccctcgaaaacctttgcaatcatacgttgcatttgggtaaagctccacgattttttgcatcaaaattcgaataagcgcagcacctgactgatcttcaacaagatactgaaaatgcatatgcattcctcctcagccaaagtacttatcattccacaagtcgccaatatatgcgccttcttgaaccaagtcactcacaaaatcatattcagatgagcgctttatagtcgaaaagccgtctgcccctttatctaagacccagacttgttctggcgaaagtgcattaacaaaaaatggactatgcgtcgtaacaaatagctgcttattgtatcctgttcctacattttttgacatttcaatagccaaatcagccaagtattgatggtacaggccattttcaggttcctcgataaaaactaattggcggggattcttttcatgcaagagcatataataagcaaacaatttcaaggtaccatctgacattcgctgggaaaaaaagggctcattaaatccattttgccaaaattctagtaccatttgtccgtttttaagttttacaggttcgattttctttatattaggaatttttgtttgaatgctcgtgagaattctcttaaaatcaccaggattctcacgatacataaactgcgccacgttattcaggttgctccctgtacgatttaaatacggagcaggggccgctgtctgaatttgtcttgcagtatcgggagtaaaataacacagataccagctctttaagaatgtcaggaacttttctattcttgaatattgcttcattgcgccaagcgttacaattcccagcttacggatatcacttaattcgacatctactttacttccggttacgactccttcgtcgtcttgccccccttcagcgccttcaaatgcatacccttttccatcgatgaggtacaagaacgataaaggccgaccacttttgtttcccggtctacgttgacgcaacctttcgtcctttacataaggcctatcatatttgtcttttccgattgtcaactcatatgttattggacgagaattactattctctttataatagatttcaaagtgtatagggccattgcttccttgcgaaacaagcttgtcatatccgccccgattactagcatcacaagcactctcaacatcggttgtaagtgcatcagcaataaaaccgaaggcatcagctaatgtgctttttccatttccactagggccaataatcgcaaccatattgccgagcggtacacctgtctgtcccgaatacaattgtcccattttaatatctttaagcgacccgtagttttttatggcgattccaagaatttttcccatagcacttacctcgcaaatatattttacagttgttatgtcacgacagactacaaagtatactactattattaacagaataatagcatattaagtgagagttttcaaatataacattcccaatgtctaaataaaaaatgggtgagtcctataaggactcacccatggtcggagtgccgggattcgaacccggggcctcttggacccgaaccaagcgcgataccaaacttcgccacaccccgatgcagttagcttatctattatattttcttttctaagatctgtcaagaggaatatagcatcttttctcggaatagattgggggtatccatcaaacaggacagggaggggcatctatgtacagccagtccacacaggcggcgcgtcggaggagaccggccgcgcaggggaggcgcacagggaaacaggaggagagcggcaggagggagcgtgtccggctggtccagctgctggcgtgtctggcactgttcctcaccgtgttcatcggaaagggagtctttccccagcggctggaccagctgggggaggatatcctggcgctgatcggctccaacactgatttccgggcggcattttccgacctgggtgagtcgctggcggagcaggactccgtgctgggagacatcggggagttctgcatccaggtgttcgggtccgggcaggactccggcggagaggcatctcccgccctggctggcggggtggaggaggagagccgcttccttaacagccggccggacatggcggagctcaccgcccactatctgcggctggaccgggtgcccgacagctggctgccgggggagcaggcggagggagaggcagcccagcagacaccgcaggcccagacggcagcgcctgcggtgggaacggtgctgctgaaagccaattataacggcccggagctgccggccaactatactatggaccagatctccctgggggacctggagaccgtgaccccggtgttcggccccctctggtccacctacggctaccgggaccaccccattgacggagaatacagatttcacaacggagtggatatcggcgcctatcagggggaccccattctggcattcgccgcaggcacggtggagtatgtgggggagaacgacgaccacggactgtatttccaaatcgaccacggcaacggcatcaaatcattttacgcacattgcagcaggatctgtgtgaccacgggacagactgtgtccgcgggggagaaggtggcagaggtggggtccacagggaactccactggtccccacctgcacctggagctgaaatacgcggggacccatctggacccggcatactatatcgactacaagcaggccgtctgagtggggcgggggaggatcacggtcacgcccggattcctgttcctgatggcctggtgcaactatgcggaccagcaggggctcctgctcccggccctggcagggtgcgcgctccacgagttgggccacctggcggccatctgggggctgggcggatcggtgcggcgcctgcggctgacggctgtgggggcggagatccagctggagcggcccatgtcctatccgggggagctggcagcggcgctggcgggcccggcggccaacctggcggcggcctggctgtgctgccgggcagagggcggggccctcttcgccgggctgaatctggcgctgggctgcttcaatctgcttccagtgggcaggctggacgggggacgggcgctgcactgtctgctgtccatgtccatcgggccggctgcggaggaggcggaggcggtcctggaccgggtcttcatcgcctttttgctggcgctgggcgtgctcctgatcggctggggaggcagttttaccctcctcctggtggcgctctggctgctggcaaaagaaaaagaggggaaaaagggaagaaataggtcttgtcaagggcttcagaaacgggtaaaatggttcctgcactcgaaatgagagttacctggagggacgtcatgaaccggacactggagcgtattctgccaaaagtacaaaagcccgcccgttacaccggcggagaatataatgcggtggtgaaggatcgggcccaggtggatacccggtatgccctctgctttccagacacctatgagatcggtatgtccaacctgggggtgcgtatcctgtatggggccatgaaccaggtggagggcctgtggtgcgagcgggcttttgctccctggggagacatggaggaggagatgcgccgggagggcatccagctctacggcctggagagcggtgatcctctgtgcgactttgacattatcggattctcgctgggctacgagatggcctacaccaatgtgctgaacatgctggatctggcgggcctgcctctgcgctcggaggagcggcgggacctggccccgctggtggtggcgggggggacctgcgcctataacccggaacccctggccccctttgtggacttcttcgtgctgggggagggggaggaggtcaccctggagtacatcgccctctaccgccgggcccgggacgaggactggaccaaggaggagctgctccgggaggcggcccgcatcccgggcatctatgtgccctccttctacgagccggtctaccgccccgacggaaccctggaggagatgcgcatccgggagggctccggcgcgccggagctggtgcgcaagcgggtggtggaggatatgaacaagtcctatttcccggtgaagaccatcatcccctctacagagatcgtccacgaccgggtgatgctggaactgttccggggctgtatccggggctgccggttctgtcaggccggatacgtgtaccgcccggtgcgcagccgggaccccaaacagctcgcagagtatggaaaggcggcctgtgaggactccggctatcaggagatgaccctgtcttctttgtcctccaccgactatccctgcctgctggagctgtgcgatgacctgctggactactgcgccccccgggacatcgggctctcactgccctccctgcgggcggacaccttctccatgaatctgatggagcggctccagcgggtgaggaagggaggcctcaccttcgcgccggaggcggggacccagcggctgcgggacgccatcaacaagaacctgcgggaggaggacctgctccaatcctgccgcaccgctttcgccggcgggtggagcggcgtgaagctctacttcatgctgggcctgcccaccgagactgatgaggatgtgctggggatcgcggatctggcccgcaaggtctatttcgcctggcgggagtacactcccaaccccaagcggggggtgcggatcacggtgtccacctcctggttcgtgcccaagccccacacggccttccagtgggaggcccagatccccgtggaagagtaccagcggcgggtgggcctgctgcgggacgccctgaagcgggacaagtccatcacctacaactggcacgacccccagaccagttatctggaggctatcttctcccggggggaccgccgcctggccgacgtgttggagtgggcctggcagcatggggccaagttcgactcctggagcgagtatttcgactaccagcggtggatggatgccctggaggcctgcgggttggatggggacttctacgcccaccgggagcggccgcgcagcgaggtgtttccctggtgccgcatcgaccccatggtgacccccgctttcctgtggcatgagcgggagctgtgctaccagtcccagacaaccccggactgccgcacccgttgttccggctgcggggccaaccgtctgctgaaaggaggggtgtgcaatggctgaccgcctgctcttctccaagactgggagagccaagtacatctcccatctggacctgatgcgcaccttccagcgggcctttttccgctccggcatccagatcaggcacacggagggcttcaatccccaccccttcgtctccatcgcgctgcccctgtcagtgggctactccagccagtgcgagatcctggagttcgggctggtggggggcgcatcctatgaggaggtgccggcgcggctcactgccgccatgccggagggcatcgtgatccatagctgctatccggcccagcggccggtgaaggagctgtctcgggtcaactacatcatcaatatggagtacgaggaggggcggcctttggaggcagagaccgccctgagccgcctgctggggcaggagagcctggtggtgcgcaagaagtcgaagaaggccaaggccggcttcaccgaggtggacctgatccctctgatccacagctggaacctggaggtgcagcgggacaccatgaccctggatgcggtgctggcggcccagaacccgggactgaatccagaactgatccgggcgactttttgcgagacttacccagatctccagccggatttcgtcaccttccaccgccgcgcggtgctggacggggagggaaaggagttccgctgaccggcgtgtaaaaccaggtttgagaaaatttgcaaaaaaggcttgtcaaccgaaggggaaacaggtataatgacaaagacgccttttggcagcactaccgaatttttggagggaatctaccttggatagtgggatgtacagcattgttttgttagtcctgatgtttgcgctgctctacttctttatgatccgcccggagaacaagcggaagaagcaggcgcaggccatgcgggactctctgaccgttggggacgagatcaccaccatcggcggcatcatcggcaccatctgtgctgtgaaggagaacaccatcgttatcgagaccggtgccgaccgtgtgcggatcgaattcaccaagtgggccgtgtccaccaagggggcccagacttccgagaccacgaagtaaaggactccgtgccgtgcttccgggctgctgtgccctggggcagaaatgacaggcatgacaagcacccttcccgcataagattccatacctggaacttgcggggagggtgttttttgtgaaaacgaaaggaaagcgggaagaggcggagagcccctggctggggaccatgtgcgggatgctgaaggggggcgcactggcgtttctgacggcggtggccatcctgttcctgtgtgcgctggcggtgtccaaccgctggctggggcaggggatgatggacagcgcagtgatggcggcctgtgccctgggggctctcgccggcggcctgctggccgtccgtcagggccggggcaggagcctgctgatgggcttcggggcaggtctgatcctgttcctgctgctgctcactgccggtttcctgttctatgagtcagcggatctgcgcaacggcgggctgggactgctgctctcctgcggctgcggcggtgccctggcgggcgtactggggggaaaaccaaagaaaaaacgcagaagatgattgaaatcccggcctgtgtatggtataatcctaccatacatattggcggggccatgctccgccctatgacagcatattagggaggaagattccgatgaagcacatccagactctgaacggagccactttgaagaacagcgcagcccacggcggctgcggcgagtgccagacctcttgccagtccgcctgcaagacttcctgcacggtcgccaatcagaagtgcgagaacgacaacaagtaaggacaacatcctgaccggaaaggggcgggcgtcagcctgcccttttttcgcggctggaatcggccgccaatctttgcaaattcggaggaatatcattatggtacacacattttccgcgctgggccggaacttggcggtggatgtgaacagcggggcggtccatgtgctggacaagctgtgctgtgacctgctttctctggtggagggccccatgggagatgcctgtccccaggatctgaaggaccgcctctctcagtacgacgccagggaactggacgaggcctggacggagctgctggagctccagcgggcggggctgctcttctcagatgacgactacatcgacccggctgccgccatggccctgcccaaggcggcggtggtgaaggcactgtgtctgcatgtctcccacgactgcaacctgcgctgccgctactgctttgcctctactggcgacttcggtaccggacaccgcatgaccatggactttgataccgccaggcgggccatcgactgggtggtggagaagtcgggcaagcggcggaacattgaggtggactttttcggcggggaaccgctgatggcgctggacaccgtcaagcggacggtagagtacgcccgctccctggaggaaaagcacgacaagtgtttccgctttacgatcacaaccaacggtgtcctgctggaccaggacaccatcgactacatcaaccgggagatgtctaacgtggtgctctccctggacggccggcgggaggtcaacgaccacatgcgccccactgtcaacgggaaggggagctatgacgtgatcgtccccaagttccagcagctggtctctcagcgggggaccaaggactactatgtgcggggcaccttcacccgggagaacctggactttgccgacgacgtggagcacctggcttccctgggcttccgccatgtttcggtggaaccggccagcggaccgctggacgaccccttcgccatcaaggagggagacctgcccgcagtggaggcagaatacgagaagctggcccggcagctgcaggggaggaaggacgtgaacttcttccacttcaatgtggatctggctcaggggccctgcgtcatcaagcggctgcggggctgcggggcgggctgtgagtatgtggccatcactcctgatggggacatctatccctgtcaccagtttgtgggcagggaggagtaccggatgggcaatgtccgctccggggacttcgatatggacatctccgggaagttcgcggagctgaacatctacacccgggaggactgccggaactgttgggcccgcttctattgcagcggcggctgctccgcctccaacctgcttgtcaacggcgacataaaaaagcccaatgcggtagcctgcgaaatggagcgtaagcggctggagtgcgccatcgccctgcgtgccattgcggccgggatgggagagacggagaatacagaatgtaataatacggactgtagtctgtgcggctcctgcgcggaatagcaggaaacacaacatctgcggtgcctgacggtacaaaatcactatatttagaaagaaggcgggccagcagacactggcccgcct

SEQ ID NO: 13605 - DNA, 839 bp, Unknown
  gut microbiota DNA sequence
ccgggatgagctggacggctgtctgttctctgtgctattcaatcagcaaggccgtgcctttgcaggctattactacggagagggcgacagcccctactatcctgccgatgttgacgacaacgccctccgcttcttcggcccggagcggtatcactctgatgagttccaggatgaagcctacctgttcatcccctttgacgaggactactatcaggctatggcagaggtgatcggggaacggtttgaaaactggcagggacaggacttcgacgaggacacgctggagccttccgaggttgctcaggccatcatggagtatctggactgcgagtgtacctatttcccatccatggcagatgatgaccccatcatgtcggcatacagctacgcccagcggctgggggtacgggagggctttgttcccgtgctcatcaaggcggatgatgaaacgctgttggagtgtctggtgatgaacgccgatccggagcatgatgcggacttctacgaatttgacctcaaaacagtagaggagtatcgaaagaagatgctctccgctcccatcaaggacggaaaggcggttctggaggaattgaccggccagcgcaaggaagaagccgaggacgatgacatggactgggaggcggaagtcctgggcgagatggagggcggctatgacaatgaccgattctcctgctattgggattcggatagccacatgacctatccgctcattctggccaaaattccggtcaagaacccctgggagatcttcgcctatctgccctttggaaattggaatgagtgccccgacacgccggacctgatggcagtggcgaaat

SEQ ID NO: 13606 - DNA, 550 bp, Unknown
  gut microbiota DNA sequence
tgactgacatacacgaggaaaggagcaatccctatgaaagcatttgaccccaattacaagctgctggacgagatgtatcaggacgattactatcctgcttttctggtggacaaggtaaaggacgagcttcagaaggtcatcgacctgttggagagcggcgaaaccgacaccgaagtggtgcaggaaacgctggacgaggcggtctgcggcatcaatgatctccaggaggagtttgacgagcacgacagcgagatcgaaacggtggcacgggaatgtatcgcggcaaccgtggcctacattctggagtggtttggcattcctattgacaccgaggaggccatccgggaacgggactggtgaaccctatggcagaaaaagaactggtcctttgtgatgagtgcggaagcctgtttttcaaaggctcctcacagatgatggggctgtgcccggaatgtgcccatgttctctatggctacccgaattgtgaccatcatttccagaatggccgatgtgtgaactgctactgggacggctctaagagcgcgtatat

SEQ ID NO: 13607 - DNA, 4349 bp, Unknown
  gut microbiota DNA sequence
caccgattacggggtcatgagcatctattcctgcgacctctgaaacggagaaatgaactatatttatttttcctgtaaaaaatggagggggcacaatgaactttaacgaagcaatgcaaatgcttggaaacaagttgcaaggaaagtacgggcatttaggctttaagtataaaaaatccgacaaaacacttacgaggcacagtaaaaatttcacatatatgattgcgttttcctcatttggcgggaacacaaaggatagcataagcatagaggtttgctatataatcaacacccgtccatacgacccttatggttacgccaaaccggacatcaacacacaaccactgttttgcagtttaagagacaatgaaatatatcttgatataggaaatgaagaaaaaattgacaatacctttgagattgtttgtcagtggatggataaattactgattccaaaaatgaatgagctttgtgcttccgagtaatgtggacgaggattttattcattacacttatatcaatgatgatggcgaagccatagaatcacaagtatcgtgacagctgagaaagagagtatgtacctatgaacaaagaatcattgacagtaaaactcttggacctggccgaggggcgggaaacgcccgaaacctggcggagctggtgggacaagcatgagtccgaactggaaaccctgctcaatcgcggtgaatttctgaaactgaaaccttgccgacatgactttcagtgggtcccggtgcttaccagccaaaagggagccatcgccattctggaaaagagcggcacagcatttaaggccagtgatctctaccaggagcggtatctggcggagctggatgcgttctgcgaggagcagaagcgagagcagcggaaaaagcaaacggaattcaaggccagtcacccggagtggtttcatcgttaccccaagttctccaaggcattggcaaaggtgcttaacctctttgatgagatcaagcccgccgccacagaggagcaaatcgcaggacgagaaagggtgctggatttcacgcttccggcccaggtgcgggagttcttcctgctgaccgcaggcatcaatgtatccacaggtgtaatcgttgaactctctggaacatttcatctgaccatccatggagagcggtattgtgtgctgggcgagttctggaaagaagcggacggcgaccagcttctgctccgccccggagaggaaaccatctggtactacgcccatgagcaggataaggtaaagcgcctctgcaatgatatgacggaactgctggagaagaaattggcgaggtatctcaatgagcaataaaaacagcgcagcagttgggggctgaaccgtaaatgagtgaaggaaaaatgacattagaagaaatgttctgtgatctgtacgacaaatatggtaaaaattttaactggtatatgatccccttcacacaggcggacggggcatttgttgctgaactaaacaaagaaataggacaagaccacttcttatacggcaaaaaaatccaggcggttgcgaagtgtgaatccaatgatgatgtgttatatgttgtcagaaacggaataggaagagacatttactatctgttccatttgacttactcagcacataatgtggacggatttccccggtatgaggagtttgcagatatatttgcagtaaaagaatttatagaacgatcatatatcgaggattatatgtaatcttcaaatttcaatttattaggaatcaaccttacccacagcggcatcagaaaggaggcggctatcatgtcaacttggagcggaatccgcaacaaattagagaatgattacctgtgcccggcgctccggggccacatccagtattttgccgccagttacagcaaaagtgctgaccatgagggccgggcagccattcgcatggacggtgtagaagtgctgcggagcaactactacacctattttgagaatgtgtggacgaaatttcatcatctgcggtccacaaccctgaaagatcacgactccacaaaagaggccatcgaccgggctcatgcctatgcgctggaacagggtacctttgaccaaaaggtgttctatgaggcgtttgggatctttgacaaccagagcatcgagaaaagcctcgtcagcgagaatccccttgtccgtatctttgcccttctggaccgcaggctgggaaagcgccgcctgttggctttggaggaatccatggagcaggagctggactgggtgtgggccttctatgtgatccggatgcaggcagaagggctgatggaaaaagaataacatgcaggaggaaccactatgtcacagatcgcatccttttatctactcaaagacgggcggcggcaggagctgtccaacggtgactgctccggcgcggtctatatggccatctgggactggtgtgagagcgagctggatctggatgttcgttttcctgctccccagacggaggataccctggactgcgctctgctggagggagaaccggcgtctaaactgctggcagctctgcgggagcaggacctcccggagctggccgctgaaattgccccagactgggatctgcccaccgaggcggtgcaaagcggactggaaacgctgcgctcccacctggagctggtgcagggcgacgttgccctgctgtatgagatgacttgacggggccacgccccatagaatattgcgaggaaattatgatcgaaatgaaaggaaaatacaatgaggccaagatcttcaccgatgtggtggacagtgcctccatcgcacaggttcaggagctgtgcaatcaggaatttacggcaggcagccgcatccggctcatgcccgacatccacgccggggcgggctgtaccatcggtaccactatgaccatcaccgacaaggtggtgcccaatctggtgggcgtggacatcggctgcggcatggagaccacccgcatccgggagggacggctggagcttcaaaagctggacaagctgatctatgagaaaatcccctccggcttctccatccgggataaggcccaccgctatctcaatgagatcgacctgagtgagctgtgctgtgcccgccatgtagatttgttgcgggcggaaaagagcattggcactctgggcggcgggaaccacttcatcgaggtggacaaggacgatgagggaaacctctacattgtggtccactccggcagccgtcacttgggtgtagaggtggccagctactatcaggaggcgggctacaaggtgctcaaccgcactgacgatgcctccatcgaggcgctgattgcccgaatgaaagcggagggccgggaaaaggagatccagaaagagctgaagaagctgaaaaacctcaagcagaccagcatccccaaggccctggcctatgtgtccggggagctgtttgagcagtatatccacgatatgaagatcgtccagcgcttcgccatgctcaaccggcaggccatgatggacgagatcgtcaaggggatgaagctccatgtggaggagcagttcaccaccatccacaactatatcgataccgacgccatgatcctgcggaagggggccgtgtccgccaaggcgggggagcagctgctcatccccatcaatatgcgggacgggagcctgctctgtgtgggcaagggaaacgaggactggaactgctccgccccccacggcgccggccgcctgatgagccgggcggacgccaagcagtccttcacggtgtctgaattcaaaaaacagatggcagaggtctacaccacctcggtgagcaaggccaccctggatgagtgccccatggcctataaggggatgcaggatattctggacaacatcggccccacggcggaggtgaggaagatcatccgccccatctacaacttcaaggctggggatgaggattaaaaaacggagagaaatgccatggtgagagatggacttgtgttcaacgatgaggatggtcaggtcatattcaaccagtacagcttctgcgaattagtgaagcacctgctggtggagctggtggggatctcctatgaggaagcctcccagatagtggaacgctcaccgctggcagagccagtggccgatgccctgggagtggcgatattcagccataatctgccttattactgggctatgtttttctactatgggaacggttactggtgggaaaagggtattccagcgcagccagaggatatggatgcctatgaagttttggaaaagaaaattatggaaaaatatgacttaaaagagccctttgagtggtaatcttggaggtgtacaatgctggcgaagtattttgaaaccatgtta

SEQ ID NO: 13608 - DNA, 302 bp, Unknown
  gut microbiota DNA sequence
ggagcaatcgtaactgaaattgatatttcaacggaggcttattcaacgatacagtctgtttttgaagatgcagatgtgatatattttaccggcggaaattctttttttcttatggaccggctccgtaaaacgggaactgatgggctgctgaaaaaggaattggcaaatggaaaattgatgatcggcgagtcggcaggcgcaattatatgcgctccaagcatccaatatatccagcaaatggatgaaaagccggaggactactcacaagaagatgatgcagggcttgatttgattgatttcta

SEQ ID NO: 13609 - DNA, 32036 bp, Unknown
  gut microbiota DNA sequence
aaacacagtgatgcataaagcgaaaaaacgtagagatttcaagggtttggccggggtatcgctctcaacgagtgatgccccggcacatcttttttcagccctgttctggtatggattctggtacaaaatatatggactatccatggtctgcatgccccgccgccaaaatctcaccaacgctccatttcttccagcaagaatttgcggaaagtcagaaccgcgggggacagccagcggtttttgaattgcgccaggtagagcgggaaatcgtagtcctccagttcatcaagggtcaacgccttcacattcaggtctgagtaattcacggctgtattcaaaattgcgaccccataattgacatctaccaatccggccgcagcacactctccctggatttcagacagaatattcaggggaaggccgcggctgcggaagattcggcgcaggctggagatttgttccgtagatactaccagaggatattgagagacctcttccagggagatgtgttcccgggcggagagggggtggtcgatggacaccagaacaataaatttccgaggcaggatctccaccagttctagattgggatcaggggtctccagaggcgaacacaaaatcaaatcgcactgcccctctgtcagcatctgcactaagcccgtagtcggtgcctgagaaagcctgatccgaaagccccgattttcgggacgggctgcaaagcggcggatgatgtccggcatgatcttgggccccagagaatagatcagtccgaggttgatttcgccgcaggtagggtcggccatgtcccggacaaatttttcgccggtctccagcaggttcagtccatcccgaatatagcagtagtaggcttctccatattttgtaaggcgtatattgcgcccctgcttctcaaagaggtacacgcctaactcctcctccaatgcggagatggaacggctgagcgaggactgggcaactccaagccgttcagcagtggaggcgtaatgctgggactgtgccaatgccctaaagtattgcagctgtgtcagattcatgggaatccctccggtcgatgtgtcttgtgcagttctgttcccccattcttccgtgtatccccccttgtggagagcgggaatacgcggaagaatggggacttttgctctgagggctgattagtttttttatcatatcacaagtgtgaaaagatagcaattctgtaatgaatctttgtcgctgaggcgcttgattgtaggccgctcccaaaccataataatatcatcaaaagaggactcaaacaaccgaaaggagtttaaacgatgaaacagacaacagatattctgaccatcgcagtgattggcgcaggatatgcggcccgcctgcacggggatgcctataagcgggtctacggggcctctctgaggctgaaatggatcatcgatccagacatggagcgggcggaaaagctgagagcctcttatgggtatcaatctgccgctttggactttgaacaggttctgaatgacagtgaggtagatgtcattgacatctgtaccccgccggtctgccatcgggacatgatcctggccgccctgaaggcgggcaagcatgtcatctgtgagaagccgctgctaggctattttggggaggcggatgaccaggaaccggtgggactcaaagtaccgaagtccaaaatgtacgcgaaggtgctctctgacatggaagaaatggaacaggcactggagcagtcaggcaaggtgttctgttacgcggaaaactatgtctactctgcggcggtccagcgtgctgcccagctgatccgccacaaaaagagcaagttgctctttttgaaaggcgaagaaagcttaaaaggctcccaggcccgggcctccggtgagtggaagaatatcggcggtggatccctgatccgtgcgggtgtccatcctctgtccagtctgctgatgctcaagcagaccgaagctaaggcccgtggagaagtgattgggatcgccagtgtgacagccgacacgggaactgctacccgcagcctaaacaagtatgatcaccgttatattgccgccgaccccaccgatgtggaggactacgcaagcctcagcatcaccttcaccgacgggaccaaggctcaagtcaatgcttccgacctgctgttgggcggtacccgcggctttattgaggcatattccagtgatggtgtgctttatggaaaaatctcccctgtggacatcgtaaagagctattatctggacgaagacggactggaagatgtggagctgtctgaaatgctgctgaccaagacgggatggaacaatccctttgtagcagatgagaccattcggggatttttaggggagcttcaggactttgtggagtgcatccagaccggtcgggagccgatttccaattttgcgctggctcgggacactatgaaggtggtctacgcggcctatcagtcggcggaagaggggcgtaggatcgaatttggccagtcataagcctctggtatagtgatttttcttgaaaaggagttttgcgcgatgtatgaagtgttatttcagccaatgaagattggcggcatgtcgttgaagaatcgaatcgccatggcacccatggcaacagttgccgacccagacggcggcttttcacaggtggtcagtgactactttactgcccgggccaaggggggagccggcctaatcatgagcggcgctctggccgtgacggaccgatatggtacccctgccagcggctggattggaagtccaatgcacaccgcccgtctgactcagttggctgaccgcatccacatttacggagctaagttctgcctggagctgacttatggaaacggccgctgcggttgcagtgaccccagcaagccccccttctctgcctcggcggtgcccaccctgcaatatcccgatgtgttgtgccgggagatgcccaaggaagacatccatttcctggtccagcaggcggggaaggctgcggcccaagccaagctggctggggtggacggcgtggtgatccacgcctacgccgggtatctgctggatcaattccagtcttcagagtggaatcaccgcaccgacgagtacggcggcagcctggagaatcggatgcgttttactgccgagaccattgacgccgtccgcaaggcctgcggtccccagttcgctatcattgtaaaattctctgtggagcaccacgcggagggcggccgggaactgcccgagggcttgaagatgtgccagatgttggagaaaatgggagcggacgctattatggtggacggcggctctttccccactcaatggaaccgttgtattcctactgtttatgagcacgccggattttccattgacctggcccgccaggtgcgtgagaaagtatccattcctgttattggacagaataaaatgaatgatcccgcctgttccgccgccgctgtggagaagggctggtgtgacctggtagccctgggccacggcctactggccgaccccgagtgggttaacaaggtccacaatggacattcggacactattcgcccctgtattggctgcaatgagtgtttcctggctatctgctcaggccagaacttccggtgcaccgttaacccctatgtctctcatgaggaggacccccattttcaggtccccaaagcggaacaccccgggaaggtcctggtcatcggcggagggccagccggcatttctgctgcagtgctctctgcccaggcaggacatcaggtggagctgtgggagaagtcgcaggagcttggcggcaacttgaacgccgccggagccccctcttttaagaaagacctgatgagctatcgggactatctgctgcggtgtctggagatcagcggcgtcactgtctgtctggggcaggaggccacagtggagcgggtgaaggagagcggcgcggagcaggtgatctatgccgccggagcgacggcccggatactgaatgtgcccggtgtggatcagcctcatgtaaagactgctctggaggtcctgcatcgccgggaaaggccgtccggccatgttgtggtcattggcggtgggctggtgggatgtgagactgctctgatggccgcagaaagtgcccagagagtcaccgttctggagtacatgccctctctcccgcttttccgcacggaggcccgaaataaccagctagccctgcgtcagatgctcgccgaccgaaacgtggagatccagtgcggcgtgcagacccagtccatcggtgcggacaccattacctatcagcaggccggacagacaaagaccatactggcggacacggtgattctgtccgtaggcttccagtcccggcagcagctggcccaggaactagatcaggctgggatcaagattcgcatcataggcgatgcccaggcccctaggaagatcatgcatgcggtacacgagggactgtctgccgccatcggactatccacatgatttgaagatatcctcgcccggtacatccaaaatgtatctgcggcgggataacaccttgcagactatgagattaaggaacggatgatttaataatggcaagaaaatattccatggcccatttgggctgcctgaattggacccctgcggagatgatttataatgcgaaagccattggatacgactatgtcagtatccgcaccattgtgcaggggatcaagggtgaggtagactatgattttcatcggcacccagagctgttccgcctggccaagcaggccatagccgaaaccggtgtagggatccacgacatcgagctggcgaaagtcgatgacaattccgacgtgacaaagtatgaaagcgcctttgccgcagctcaggagttgggggtcatcaatgtgatcagcagcatctggactgatgacaaaccctgcgctcttcggcagtttgagcagatttgtgatctggccgcaaagtatgatctgctggtggcactggagtttgtgacctgggcatcggtctggaatttacagcaggccaaagaagtgctggaaacagtggatcgccccaatgccgggatgttggtcgatactctgcatgcacaccgctccaaggttacggtggaggaaatcgatgcctgtccccacaaatggtttgaatttgcccatatctgtggcgggccaaaagaaatccctgaccgctctgatacacaggcgttgatccataatggccgggaagctcgctactatctgactgacccggacaatggagtggatgctgccagtatcattcaagttatgaatccggacacagttctttctctggaacttccaaactgggagaaagcgaaagagcttgggacatttgaacaccaaaggcgggtcctagaaacgaccaaagcatacttagcgtcaaacgagataaaataaagtcctttttaagaagtcgatttggagttgaatacgatgaaatatgggtgttgtgtcaatattctacctaaatcgggtccaaaaacagggatcgagtatgtacagaagctaaaagacattggctatgattatgtggaattacccttgaacgaactgtctaaattaagcaatgcggaatttgactcgtttcttttggcgctgcagggaatcggctttccctgtttgtgctgtaatgattttatgccttcgagctttagaattgtgggcgagaagttgacctcaacgaaagagcttcaaaattatctggaattggccatggcacgtctaaagcgtttaggggccgcctattctgtgtttggaagcccttggtctcgaaattgtccagatggattttctaaacaggaagcatttcaacaaattgcggattttttacatatggctggggaagttgcagctgcaaacgacattgtgatcgcggtagaacacaacaatcacgaagaaacaaatatgctgaaccacttttccgacgcagtacatatggtgaaaacagtaagccatccaaatgttaaggtattgtgtgactattaccatcttaggtttgagcaggatacaccatcggtattgtcagagggaaagggcatactggtccatactcatattgcacagctggaaaatcggaagtatctgacagatttgagtcatgagcctatgctgactgaatatgcggcagccctccatcagctcgggtatcagggaggaatcagcatagagggacgtgtggacagccctgaaatttgggaaacagaagccagactatgcttgtcaaacctgaaagcagtatttgaataactaatagattttaatagaaatttgtacctgacttttccaacagacttggtttgaggtggaaaactgcaaaaacttgcctcaaattgaggcgaatttcgacaaaataaattgcaccgtgagatccgatttgtggcgcagccagggccccgctgtatggcggggccctggctgtttgccgccgcaggagcggcggcgttgttgttcaaggtgtagtggcagtccttggacggaggctgcccctctcaaccacccaggccagtagcgggagtcgctctcccataacagagagaacgccgggccatgcccgacgttctttggggatttgccccttggttacttttactccgccgcccggagccggtcaaggcccggcccgcccccgatggggcgggccggttcattttagccttgacgggcgacagggcggcggagtaccctcccgccggggcaaacaccctcaccgctggagcggcctggcgcggcggcgtgaagggggctttttctccttttccggcgtgggcgttaacgcgcggatttttggctggatgtcgggggcctctacttctatccgggcgcagatccgtaactcccgcctgtacgtttggatggattgattgatggattgaatgcggagagagaggggttcgttttggggttctcgccgctttcggcggtagagttctttccgctgctcggcaagcgtatctatctccccctgtattgccccggtcagtgtgtaaaactgctcccaggtgtccaccttgtacttcatcagcagtttggcctgctccacatagcggtcaaacttaatgacttccgccatattgtaccgccgttttttcggcggggctgcgggcttttgcagtttgcccagcagatacaggtagtggtagtacaaggcccgaaagcctgtcagtttcctgggcttgcccctggttttgtaatatctctttggctgggctgggggccgatggtaaagaggtatccgctcatggtcacggatgcgtcggcggatcgcttgctccgtgtagttgtcccccagggttttcaggcgcacaaaccgctcccggcccggcggcctcagcgctatgtacttccctgtcttaacctcatacccctgctttttcagattggtgataaagtgttcaaacaggaaggagcgggtaatgcaggaatccacgtccgctcttatctggctataccatgtaggcttgcccttctgctccgcctcccaagtgtcccggctcatggtgcggccctgctccggattttctatcacggacaggccatgctcccggcaaagccggtcggaggtctggcgcatgagggcgtaggtggctttgcagtcgttgtacttctttccatccacaaaggagacggagttcagcacaaaatggttgtggatgtgctcacggtccaggtgggtggctaccactatttgaaacctgtccccccacagcctccgagccagttccacgccgatctcatgggcctgttccggtgtgacctcgccgggagcgaaggactggtagccgtggaaggcgatgatcccgccctccttgccgtactgctgtttcaccatctgcatttcatccctggcgatctccggggcgcagttgataccgctgacatagtgctgccgctccgtcttgtagtcctgggtggcgtagtccatcacatcccggaggccctgcaagtcctgggcggtaaaggcggggttttccgtcttgtccgggttggcggcgtagcccaccacccggcctaaattgcccttgaccttccaaatggcggtagtagccatcagattttttccgggagcatagccgcccgctccaaggtcaaaatttcagcaaacaggcgctgtactgtaacggaatactcctgtgtgtctacggccccatgcatctgggctgtatgggcgatttgggccatgctcccgctgatttcccgcagttgcctcatggcctcctgaaatggctctggcggggtctgtctgggcagataccctcgaatgagcattcggaggtagttagacttgctcatgccggacagggcggcggcctgttccaaatttgcaagttcctccggggacaggcgcagggccatccgctctgtcctgttcactgccgcaccccctctctgccgggggttgcagggggacacccctgcccaagcggatttgtcgcacaaatccagtgcttgctaacatctctcacacacgtcacccccgtcccccgtcccggccgtctgccggtctatccaggccatcagtttgtcctttggcaccatgagccgtttcccgatttgcagggtgggaaagtccttcctgtggatcaaggcataggcccctgccctggagatacccagggccccggccaactctgccgccgtcagcatggcgggcaggtcgtccaggctcttgcagtttacggtcatcttcgattctccttccgtgataggttttcatccactcctattcgctttccttctttctcttatagggtgatatgatgttgttatattatatcaccccctctttctggtcaagcagaatcgttccccaagatttgacaggatattttttgacaaactgctatatttgtgctacagtatattcgtgatatagtttctataattcctataacgaaggagggcgaatgaaatgccggccttgaattttatacgattccaaggggctgtccccaggtgccagtactacacgctgtccgagtaccaaggctttttgtatatcatcccggaggacttgaaaggggcccgccgctatgacccctttgcggatatggaggcccttcttctggacgtggtgcgggctgggggacaggtagccgcctgtgacagtttctttgagtatgccatagcccatgatatgttccctctccgggacgctggattctggctccatggggatttctttgcaaagcatcccgacgaggcccggcccgtcctggacgcgctcatggcttttgtggaacggtacggcctcccggcctgggaagtgcagtccatggcctacgccgattatccggcccggtacgctccccggcttatgagccgccgccatgacccggaccgggagggcacagaagaaacccggtatctgattgaatatgagttgatgaaacgcagttgccagtccaaaggctccctgcctgtctgcacgctggcgattctgttgttagacctctatctccgtttcctggaagggacggaacgtggggatttcttccttcgcaattccgagtggatgatccactatgagcatgaaaaaacacccaggctgaatgcccaggtgttcgatctgctgtcctgtatcaacctggcccatgctttcctcgtttccggggagggcaaggccgtccggcagtgcaagcactgtggtaagttttttatcgcggaggatttgcgtgcggaatactgttctccccgctgtcggggtgcttataactccaaaatgaccagaaagagggtgaaggagcggaaactgcgggaagggcagtaaatttgtaatgaaggagggcagtctatgccaggaaaacgctccaatggggaagggacgctgcgtaagcggcccaacggcctgtgggagtgtacgatgatggtgggctaccaggaggacggcaggcgccgctacaagagtttctacggcaagacccagaaggaggccagggacaaggcggaggcatataagcgggacaccgccgccgggctctacatagacccaaacctgaccttccaggagtgggcgcaaaagtggtatgaggggtacagggattccgtttcccccaccacctatgagagttacggctacacgctgaaaatcctggtcggggctttcggcccccgcaaactgggcagtatcaagcctctggacgtggagcagttcctaaagggcctccgggccgatgggaagtctgattcctacctgaccaaatgccgggggatgttgtaccagatcatgcacaaggcggaggccaacgacctgatccgcaagaatcccgtccgctttgcggaaaagatgaaggcccacaagccggtaaagcggaaagaggcgtttacccaggaggaagtcaagattttaatggagcagttgccagacaacaaggtgggacataccatccgcctcatgctggcaacgggtatgcggacacaggaagtccttgctctggagccccagcacattgagccggacggctcctgtatccacatcaggcaggcggtgaacatggtcaaggggaaaccccatgtcggcccgcccaagaccgccaacagcgtccgggacgtgcctgtgccgcccagtgtgcgaacctgtgccgtgttcctccgggaacaggccgggaaattcgtgtgggacagcccgatccccggccagcctgtcaatcccagccacttccgggataaataccgaaacgccctgctccgcattccgggcgtccgtatgctgacgccccacagttgccgtcatacctacgtatcacagttgcaagccctgggcgtggacatggaaaccattcaaagtatggtgggacacgctgacattgaaatgacacagcactacctacacgtacaagaagaatcccggcgggccgccgccgaaaaattcagtaagacttttggaatctcacgctgataacgtagaaaattcactgtgttttcccttataaaattctggtacagtaccagaattcaagggagcagtttatgatagatgataggctgtcctatccgttatcctctcgtgacagcatatctattcttcattctggtatcattctggtacgggcaatctcgcaggggttcacagcattcctgccagaaagcgcagaaaagccctggaaccttacggtcccaaggctttccgcacgcagtttcccttgcttttcatggtggagataagcgggatcgaaccgctgacctcttgaatgccattcaagcgctctcccagctgagctatacccccatattgtgcctcacagggcagaggttattttagcagacgcacttacctttgtcaagggcttccgccaattttattgcaaaatatttcttagagccgggatacacaggccagatacaacacacgtcacacgtccgactgagtctccccggttctgccccacccgttctggcgtctttgctctccggcgctgagccgcccttcccccgcttttctcctctcccgcaagatccgccttttttctatttttctattgatggcccggcgtctgttgtggtaggatagaggcatcattcaacaagaagtggaggtaccaaaatgaaacaggacatgatccttattctcgatcttggcagcgaggaaaacccccgtctggcccgtgagatccgcgctctaggcgtttacagcgaaatccacccccacgatatcacactggaggaggtcaaggccctccccaacgtgaaggggatcatcctaaacggcggccccaaccgggtggtggacggtgttgagatcgacgccgccaaggagatctacaaccacgatgtccccgtccttctggccgaccacaagggtgatcagccctggcccagcgatgaggaggaacgcaagcaggccctctccaatttcgtgttcggtgtgtgcggcgcccagcccaattggaatatggagaacttcattgccgaccaggtggagctgatccggcagcaagtcggagaccggaaggtcctgctggccctctccggcggtgtggactcctccgtagtggctgcccttttgattcgcgccatcggcaaacagctcacctgtgtccacgtcaaccacgggctgctgcgcaagggcgagccagaacaggtggtggaggtgttccgccatcagatggacgccaacctgatctatgtggacgcagtggatcgcttcctggataaactggccggcgcagctgatcctgagcagaaacgcaagatcatcggcacggagttcatccgagtgtttgaggaggaggcccgtaagctggagggcatcgaattcctggcccagggcaccatctaccccgacattatcgagtccggcaccaagaccgtcaaggcggtcaagagccaccacaacgtaggcggcctgccggaggatctgaaattcgagctggtggagcctctgaagatgctcttcaaggatgaggtccgggcctgtggcaaggctctgggcctgcccgattccatggtgtaccgccagcccttccccggaccgggtctgggcgtgcgctgtctgggcgccatcacccgtgaccgcctggaggccgttcgggaatccgacgccatcctacgggaggagtttgctgccgccgggctccagggaagggtctggcagtacttcaccgtggtgcctgatttcaagtccgtgggcgtacgggacggcgtgcgcacctttgactggcctgtgatcctccgtgcggtgaataccgtggacgccatgactgccacggtagaggatgtgccctttgccctgctacaaaagatcaccgcccgcatcacctccgaggtcaagggagtcaaccgtgtgctctatgacctgacaccgaagccctctggaacgattgagtgggaataaataatcagtgtttcctgaatcctgaaaagcgttggtaatacagcgtttttcaggatttttcttttttagtggctacaaattggctacatttgcagcgatttttgtagccagaggctcacggcataatgccgtcaagctgtctggctacctccacctgcttgttggggtacaggtggctgtacgtgtccatcgtggtctgcaccttctcgtgtccgagacgctccgcgatcagcagcggggagaagcccatctccaccaacaggctggcgtggctgtgtcgaatgtcatgcacccggatgcgctttacccccgatgccttgcagccatactccatttcgtggtacagaaagctcttggtgtagggaaacagccgatcatcattttgcagtccgtagcaatgggacatatactcctgcaaacaggtgcaaagaccgtcgggaatggggatagtgcggatgcttttcggtgttttcggagtggtgataatatcctctctgccgaggcgctgatagctcttgttcaccgtcagggtcttcttctcgaagtcgatgtccgacggcgtgagcgccagcagctctccctcccgaatccccgtgtagtacatggtcataaataccgtgtagctggcgggacggtctttcatgctctcgataaaggtctgaaactcgtcctttgtccagaacagcatctcgtcggctttcttcttgcccatgctccccgccttgtggcaggggttttctttcaagccatagtatttgactgcgtagttgaaaatcgccgtgagctggttgttgatgcacttgagataggtctgggcgtaaggcttgccgttttcatcccgatagctggtcagggagttctgccattggcgcacatgagtgggcttgatctcgttcagcgggattttcttgaagaaaggcgttaccttcaggtcaatcagccatttcttgctggcaacggtggagggcttgaggcggtgctccatatccttgacatacagggtgatgaagtcaccgaaggtcatgccgaggctgcctgtggattggctgataaagtcccgttcccattgcagggcttccttcttggtggtgaatccccgcttctttttgtggatggtcttgcccgtccagtccgtcacgcggatctgagacatccagcgaccggtgtcgccgtcttttgttactgacatttttacctccttccctcaagaatcaggctttgatggggttatttactcattactctcgtttttaccgtattccttttccaaaaatgccgtccgttttgcaatccgttcgtcgcagtcaagttcttccggctctgtgcatttgactgcgttcgcggcgtaatatgccaaagtctgctccttccagcgcttatatgctgcctgcgtggagttataggcgcgaagctcgctgcgctcttcctcccattgttcaaggaacaggcatatatccgcgttgaactccgccgtgctctttccgtcaaaggaaatggaacattcccaccgcttgctgcggggtggcttctgcacgtcgatcttgaagtcgatgccttctaccgtttccagcttaaagagaaagtccatcacgtcggaaagcgttctgatctgcgttgtactggattcgtagccgaggatataggtcggcgttgaatccaacaggtcggcaatctgattgacaacggcaatcgacacttcgatctctccggtttcgtacttctgtacggtgcggagggatttttttagcatttgtgccagctcggtctggttcagccccttccgttttcggagctgcttgattctctgcccaatggcgggataatcgaaattgtccatatctgattcacctcgtccatatcatatcacagaataaagcgaattgcaagtacatatttttattttctgaaggcttgacagatgcatcttgtatgcgtataataaaatatgtactcaagatgcgcattttagaggagagcagagaaaggaggatgaacaaaagatgcgcagaccgaggcgaatcactttgaaacaggaggtactatgagagcacagtttatcacagcgtcagaggtggcggagatcatgggcatcagccgcagcaaggcgtatcagatcgtccgggaaatgaacagagagctaaaagcccaaggctatctgaccgtagccggaaaatgccctgcccagtatttcaagcagaagttctacggcttccagattcccggaggtgagcgcaatgacgggaaatgagaaaacgaccgccctcatcccatctgttggcgcagatggagggcagccgcctcacaattcaactaaacaaaggataccacatgaaacctgcgaaagcaatcccccggaggaaaatattgaggaaatacgtgagagaatccggcgcatgaacgacccacattatcttcataccgtttccatgacagagctgtatcagaccgcatacaagagcagaccgcccgtcatcgatggcttgctctatgcgggagcgtatatcctcgcaggagcacccaaaatcggaaaatcatttctggtagcgcagcttgcctaccatgtcagcacagggcaaaggctgtggggttatgaagtccattccggcacggtgttatacctcgcgctggaggatgatttccagagaatccagagccggatgtttatgatgtacggcgtggcggataccgccagcctgcattttgcaacggcagcaaacaaaatcggaaacggtcttgacgagcagcttgagaatttcataaaggaacaccccgacacgaagctggttatcattgacaccatgcagaagattcgggaggccggaggcgaggcttacagctacgccagcgactatgagatcatcggcaagctcaagcgttttgcggacagacacagcatttgcatcgttaccgttcatcacacaagaaagcagccagccggagacagctttgaaacgatctccggcacaacaggacttcttggttgtgcagacggagcactcctgatgcagaagaagaaacggactgcattggaggccacggtcgatgcagtggggcgagatcaacaggatcagattctatatctgaaaaaagatgccgacacgcagatatggagccttgaacggacggagaacgagccgtatcaggagccgcccgacccggtattggatacggtttcccagcttgtttcctccgaaagcagagaatggacaggcagcccgaccgagcttgcggaagcggtgaatacaggcatggcggcaaatgccctcaccaaatacctgaacgttaaatccggcaggctgctggacgagtaccatgtgaggtatgagaacagggccaaacactccgggcggcaggtgaagctcacccatatgataattgacaatgttgagtacgaagtaatcgactgaggacagcgcgacggctgcgacggtcgcgacggtggaaatgatgccatcaaagcaaccgtcgcaatcgttgcgaccgtcgcggataggaaaggataggaaaatgaaaagcgtacaaatcccctatgatctgttcatcgacctcgccatgtaccatctgcggggcgaggatgattttgaagaagaaatccggcagggcttggagaagaagctcgacgccatgctgaaccgacagctctactcacaatacaagaccgctcctaccgaagaacagcgggaacaggcaaggcaggagtatcttgaccggcgtggagtgccgcagagctaccgatggactactcctccttgggaactgtgacaggagcgtgccacgctcctgttgctggaggacaaggcaaagcccctcgcatccccgtccccatcgaaaaacccgcagattttgagatggatggcagagaggatttcccaaatcttctctgcctgtgggcggcagcgttgaagcaacttcgattgctgaaaggctgtcggtcacgccgtggattttgcaaagtgggtactacttgcaagccacggcagaggcttccgcagaagccgcattccccctcggagagcccacgatactttgcagccgcaggatgaaagtatcatagtgggttattacacttccgcagaagtgtctccccgaaagctgccccgtcctgcacaatctgaaatcaggaggtaaactgcctatggcaagaggcgacggtattcatcgtaccaacgcaagaaatatgaggctgaccgctgccaaaatcggcaacgcgcagcagcacaacgaacgggaaaaggaatcctatgtcaatcaggatattgtcccggagagaacgcacctcaatgtccatttcaaggaaccgaccgccggatatgcggagatgtttgagcagttgaaaaaggacggaatcatctccacacgtggattgaaagaggatgcctttctctacggcgagctggtctttgacgtaaacaccgcctattttcataatcacggcggctatgacttcgcaaaacaattctacaccgacgcatacaaatccgcaatagaaatcgtcggcggtgagcagtatatcctttcggcggttatgcacgccgacgagcgcaaccgcgccatgtccgacgcgctggggcaggacgtgtaccactatcaccttcatgtggtctacattcccgtcgtggaaaagcaaatcctatggtcgaaacgctgcaaggataaatcgctggtgggtacggtcaaggaaacgatacagcaggtcagcatgagcaaaaagtgggattccaagcccgcgctggacgagcatgggaaaccgctgctgaacgcaaacgggaaaactgtgctccgaaaatcctattccgttctgcaagatgatttcttcgccgccatgcgaaaggcagggtatgacgatgtggagcgaggcgagcgcggcagctccgaggaacacctgacggtgacgcagttcaaggtgcagcaggaacaggcgcggctggcagaattcacagagcagaaccgtcagcaggaaaaacaggcagcaacgcttgggagcaaaattgaaaaaatccagaaccagcgggtcgatgtgcggtctatcgaaaaaatcgtggcaacgtccattcccttctcatccaaagttgccgtggagcgtgaggactttgaccgactttccactctggcaaagaagtacgttacagcagagaaaaaggaatccaaactgcaaaaggcgttggatgcggcaaacaaactgattgcaaagctcaaggctgagattgacagtttgaaacaggaaatttctgattataagtctgtccacagaaagctccgtgcggcagaattggagcgtgaaaatacggagcggcgcgggaaagtccgcagctatgaggatgtgattcagcgtaataatctgtggcgattcttccatccgcacagagaaaaagcggtcacaagggacgaagctcgctgattcctgtgtagagccggaaaaaacgcattttatcgaatgggagcgcgtcggacagggcagacatcgtccggcgcgctcctgtttgaaaatcgccatttttcccaagtcaagagccgaagaaaacacctgaaaaacacccctattgcgtgacagagccgcagaaaggataagcctatgagaacaggacttaccaagcaggaaaagaccaccgaaatctattttgacgagaaagaccccaccatcttcatccgcacccacaacaccgacctcaaaaacaggctgaccgcatacaaccgcaaacaccctgccgtctgcaagctgacggacgtagacccggacacgggctgcaaggaatttgagattgaaaagggacgcttctctttccggctgaccgccccatacagagaggaacgccgcagggcggcaagcgaagcggcgaaaaacgaataaaagggttttagggcttcgttgattgttgcgttggcaaccccaccgcaatggtagtacccttctccgaacttttctctacccaaacggagccgccgtggaggtcggcgatctcccataccagtgagagccccagtcctgcgccaccgtattcccggctgcgagacttgtccacccggaagaagggctggaagatactgcgctgatacacctccgggatgccgcagccggtgtcggagacgcggagcaggagcttttccaactcctgagtgacagaaacccgtaccgagccgcccggccggttgtacttgacagcattctccgtcaggttgaagatcagccggtagatcagtgcatcgctgccggtcataatgccgtcgccctccgccgtcagcgtgacgccgagcttatctgagagcggcgcaagatctgtgaagatctcctcgatcatgggagcgagctggatccgctcgttccgcgccacctgccgcagattgctcatctccagcagtgtcctggtcatctgtatcagccgttccgtctgctcacgcaaaagcgtgaggaactccgccgtctccggtcgcacatcaggatgctccgcggaaaacagctccaactgcgcctgcattagtgccagtggcgtgcgcagctcgtgggcggcgttgccggtgaactgccgctgggcggaaaaggcgttgttcagccgctccagcatctggttgaacgagcggctcagctgccggaactccgaaatagcatcttcatcgatcctcatatcggcaagattgttcagctgcacctgctccacctgcgaggtaaagctgcgcaggggcttgagagcgcgtccgctgacgaaataggcgaggatgccgctgagcagcgttaccgccgccgtgatgtaccagttggtggtgcggaagcgcccctgcaccccatcgacgacgatggtcaactcctcgttgggcgctatgagctgcgggtcaaagctcgccgctccgccatcattcaggatcaccgtgccgccgccttgtaaactgtccgcaatggtgtccatatagtacacaccggaggagcacagcagcaaattcatggccacgcaggtgatgccgatgagcaggacggacatcagcgtgatgcgccactgcagggaaagccgcttcattcctcctcgcctcccatcagatagccctcgccgatgcggttgcggatggggtcatagcccagcacggcgcggagctttttgcgcagggcggagatgtggacgcgaatggaattgctgaagctgtccacgctattgtcccaaacgtgatccatcagctcctcctgacttactggccttccttgatgcaccatcaggtattccaggattcccgtttccttccgggtgagcgtcagcgtctgcccgttgacggtggcggtacgggagcgggtgtcaaaggtcaggcctccgcagcttagcagcacatcctgctgggtgaactgccgcaatgtcaggctgcggatgcgggcctccagctccgccaagtggaagggcttcgccagatagtcgttcgccccggcatccagcccctgcaccttgtcctccacttcgctgcgggcggagaggatcagcacccgcgtctcccggtcggtctgccgcagggtgcgcagcaccgtcatgccgtcctttttcggcagattcagatcaagaagcaccagatcgtatcgttccacgcccagaagcgccagcgccttttcgccgtcatagcagtagtccacgctgtaggccagccgccgcaggctgcgaacgatggtctcgcacagggtgcgttcatcttcaattactaaaaggtgcatgagagccctcctttttatttcttcgtttttgtgttgctttcattatagcaaaaacagataaggtttgcgttaagttttcgttcttaacagagactttaactctcccgcgctatgatggaggcagaaaatcggaaagggtgatgaaaaatgagctgcgggaaaaaggccgcggcgcagatcgtgctgctgatggccggagccgccatgctgtgctttggtgtctggcggggcgaggcggcgacagtgctgagcaaagcaatcaaattatgtctggagtgtgtgggcattgggtaaaaagttttcaggcgtttcacagaccatgtcccgcttccggggctggattcaggcgggggcgacgctgctgaccaacctgcatctgccgaactttctcaagggcggactgtatcagggggcggggaagaccgtctgcgtgccggggctgaactgctactcctgtccggcggcgtccggggcctgccccatcggggcgtttcaggcggtggtggggtcttccaagttcagcttctcctactatatcacaggcttcctcattctgctgggcgtgctgctggggcgctttatctgcggctttctatgccccttcggctggtttcaggagctgctgcacaaaatccccactaagaagctttccacaaagaggctgaagccgctgacatacctgaaatacgctgtcctgctggtgatggttttcctgctaccggcgttccttgtgaacgatgtaggcatgggtgacccgttcttctgcaaatacctctgcccccaaggcgtgctggagggagccatcccgctgtcccttgccaattccggcatccgggcggcgctgggcaagctgtttacatggaaattcagcattctgctgtcagtgatcgtgctgagcgtgctgttctaccgtcccttctgcaagtggctctgcccgcttggcgcattctacgcgctgttcaaccgggtgtccctcttccagatgaaggtggacaagaataagtgcgtctcctgtggaaactgtgccagagcctgcaagatggatgtggacgtgacgaaaacgcccaaccatactgagtgtatccgctgcgggatgtgcatccgcgcctgtccaacgaacgccgtgtgcttccgctacggcttcggcaacgggaaagaaacaacaaagaaaacaacgatggaggaattaaaatgaacaggaagagaatttttgcactggcttttgccgtgctgatggtgctgtctctggcagcctgcggcacgcgagacaacgacaagatggctaatggaagcggcaacggctccgccatgactggcgagccgaaaaccgccgaggaggcgctcgccctgcacaaggagctgctggagcgggagaacgcgctcctgtcggaaaataccgagctgtgggaaaaggtctttatggaggccgacaagggcatggccatgatcgaggacgggaaaaactacggcgacttcctgctggacaccgttgaggccgctaaagagcagttcaccgacaaggagtatgagtggctgaaggagtcagccacggagatcagcaatatcgaaaacaagctgaccgcgctggaggaaaagtaccccgagattgtgcagcaatccatggacggcgatatgagtatgcccgcgggcagcgacacgagcaaccctcccgacgacggcagtatgcagaagttccccgcctttgagggcaaggacctggatggcaacgcggtgaaaagcgacgagctgttctccggcaacgccgtcaccgtggtgaatttctggttcaccacctgcaatccctgcgtgggcgagctttccgagctggacgcactgaacaaggagcttgcgaagaagggcggctccctcatcggcgtcaacaccttcactctggacggcgacgaagcggcaatttccgaggcgaaggatgtgcttgccaagaagggcgccacctatcagaatgtgtattttgactccgacggtgaggcgggaaagtttaccaccaacatctttgcctatcccaccacctatgtggtcgaccgcagcggcaatatcgtgggtgaccccatcgtaggcgccatcacggaaaagaagcaggcggagacgctgcaaacgctcatcgaccaggctcttgctgccgatatgggctgacaaacgaattcatcttctcagaaaggagggatacaccatgtatcggagagtattgccgcttctgctcaccgcggtactgctgctgagcggctgcactgccgggcagaaaaatatgccgcagaaaatggacgagaaggaaatgaccggacagccctctgatatgtccggtgaaggaagcatgtatatggataccacggaaaatgtcatatatctggcgggcggctgcttctggggaatggaacagctgatgcagtctattcccggcgtcatcgatgccgagagcggctatgccaacggcacctgcgaggcggacgccgattacaagaccgtctgcaagggcgagaccggctttcgggaggccgtgcgggtggagtatgaccccggacaggtgagtctcgacgccctgctgctggcctacttctatgtgatcgaccccacggtggagaaccggcagggcaacgaccggggcagccagtatcagaccggtgtctattacaccaacgaaagcgcgaaggaaacggtggagcgcatcgcggagatcgagcggggacgcagtgaaaagttcttcgtggagatcggcccactcaagaactactaccccgccgaggagtaccaccagaactacctcgaaaagaacccgaacggctactgccacatcccgcgcgcggagatggagctgttttcccggctgcgcatcgatccgggcgactatcagaagcccgcggcggaatccatccgggacaagctgacggcggagcagtaccgtgttacgcaggagagcggcacggagcgcgctttcacaggcgagttctgggataagtttgaaaagggcatctatgtggatgtcgtcaccggcgagccgctcttttcctccacggataagtttgagagcggctgcggctggccggctttcacaaagcccattgaagagcctgccgtagtggaactggaggacctgagccacggcatgcgccgcacagaggtcagaagccgtgccggagattctcaccttggtcatttgttcaccggcgatccggagtcccccaatggcgtgcgctactgcatcaacagcgcgtccctccgctttgtgccttacgcaaagatgaaagcagagggctacggatatcttctgtatctgttcgaggaatgagttcgcaaaatacaatgatataataagcagcgtcccaatcattatgaaccgggacgctgtcgtttatgctcatgtcggtttattcaaacaggacgttcagcttgctgttcagaatcagatcggcataagcaagcgggtcattgtagatcagataatccagctctgaccgctggaagcggttgtcagcagcttcgctttcaacggcggtgaagtcaatggaaatctggcttctatcgtcaaaaaccaattctacgcaggctgtgtctatgttgaattgataggatataagtttgctcatggtcatacctccaagatgttttttgaggtgaatcaggcagtcaatttccgggtgattattggcgggaatcatatcgaaatctgctgcaaatcattcaaaataaatcgttgcgaacggttagtacgtataaaatagctggctacaaaacggctacaaaattcgtaaggaacctatgtacagcccgaaatacgtggattatttggacgaaaagtgcatcgagagtgcattttataaccctaaatcaaagctcaagacttgagtgggaataatttcagaggtcgaaaaaagcctttaaaatcaaggttttttgaggattaaagcctttcgtggcaacgatttggcaacactttttcattattcataaaaagagagctaactgattttgattagtcagttagctctctttttctttttattattgtcctgtgcaacaaacgacctctcccgtggcctacaagtgagagggtcaagcgagatcctggggtggcgtcttcacatagttctgggtcttgtcaaactccggatagtggtagcgccacttatcgtagtcttccttagagatttcgcccgcctccaacagggcagcggcttgctgccaagagcagagcatctcgtgcagctgggcagcgtccttgttctttcgcacatcgaccttcaagcagacttctccatccagctcactgactttcagcccgtagttgtcctccaaggtaaatagagtgtgcatgagccccacataggagtctatgtccgggacggaaagtgcataaggcgagacatccagcacctcagccaaggcggcggtcaggtctgcttttggggttcttgatcctgtttcgtactgtgcaaggcgcacatcagcagacttctccgggaagcccagtgacatgccaagatatttttgtgtcatcccccgcaggagacgaaaaaagtgaattcgttcaccaatcgccatatcatcaactccaatccttggttgtctttacaaaaagcgtagcagaaatgcttaggaaagtcaataggatgctaaacaattttatttaatttattttgtgtacgccgattgacataagctattatgcttagtcaaataactggagaaacttttttcaaaattcttgggtgcaaaatccgaaaaaagtggcagtagagagtaaggaggtctttatgaaaaacaaaattggcaggcagaaacaatcaacaaggaaaggaaggtattttatttatgcagaaacagagttttatgcgagcagacgaagttgctcaggaattggacatctccaaatcccacgcctacaaggtaatccatgggcttaacgaagaattgcaggagaaaggatatctgacaatctccggccgtgtcaatcgagaattcttcagggagaagtattactataccaaaacagcaaaggaggagtcataatggccgtttacaaggaagaaaaaaccggtacttggcgggcagtttatcgctataccgattggaatggtgagcggaagcagacccagaagcgaggcttcaagaccaagcgagaggcacaggcctgggagcgtgaacaggttcataaaaccagcgctgatttggatatgaacttcaaaagctttgtggaactttacacagtggatatgaaaacccggctcaaagaaaacacctgggccacaaaggagcatattatccgcacaaagctgctcccctacttcggcaagttgaagatgtgtaacatcactgcccagcagatcatcacctggcagaacgagatgctgaaccacaaggatgaaaaggggcaaccttattcacctgtgtaccttaagacggttcacaatcaactcagtgccatcttcaaccacgcgattcggtattacaatctccgggataacccttgtaaaaaggcaggtagcatgggaaaaaagaaaaaccgagagatgatgttctggactaaggagcagtatttgaaatttgccgaggtgatgatggataaaccgctatctttctatgcctttgagatgctttactggtgcggtatccgagagggagaacttctggctctggccccggcagattttgactttgagaagcgcactgtcaccatcaacaaatcctatcagcggctaaacgggcaggatttgattaccactccaaaaacagaaaagagcaatcgtgtcatcactatgccgcagtttctggcagaggaaattcaggattacctcaaaatgctctacggaattggagcagatgaccgaatgttcaccgtcactaagagttatctccaccgggagatggacagaggctccaaagaggctggagtcccgcgtatccgaatccacgatattcgtcacggcgcggtttcgcttcttatcgacatggggttctccgccactgccatcgcagatcgggtaggtcatgagagcatcgacatcacttacaattatgcacacctgtttccgtccaaacaaacggaaatggcagataagttgaatatggaaaggggcaattaaaaatgtcagcaaagaatttggataagcacaaccgttggagaaacaaggccgtatctttccggatctctccggaggaggatgcccagattgaaacagcagtcaagctcaccggactgaccaagcaggattatatcatccgtcggctgctctgccgggatgtggtggtgctgggaaatccaagagtctataaggcactgcgagatcagctggctgctgtgctggacgagctacaccgtattgaagccgggcaaggagtaaatgaggaactgttggacaccattcagatgatcacaaccattatgaaaggaatgcaggaggatattgcctatgatcgatgaaaaaaagaaaatgaccacccaggactcatctgttggcgcagacgatgggcagtcaatctctaaaaactctgacatcagtataaccacttccaaggaagaaatcaacgatgaagttgtaaatccgcaggaaagtctggaggaaatgtaccgtaggatacagcgcatgagcgacccagcttacctgcacactgtaaccctggacgaacttatggacaatgtgtttgaggtaaagtccgcagtgattgaaaacctgctctatactggagcatatatccttgccggaacgcccaaaatcggcaaatcctttctggtggcgcagatcgcacaccatgtcagcaccgggcaggatttgtggggctacaaggttcatcaggggacggtactttaccttgcacttgaagatgacgaaagccgtttgcagcgcaggatgttccgtatgtttggtgtggaggggacaagctccctccactttgctaccagcgccaagatgatcggcagtggtctggatgaacagctggaaaagtttgtccgggaacacagtgacaccaagttgattatcgtggataccctgcaaaaagtccgggagatggtaagcgacaattacagctattccagcgattatgaggtgattggaaaactgaaacaatttgcagaccggcatggagtttgcatcctgattgtccaccacactagaaagcagcctgcgggagatagctttgagaagatttccggcaccactggactgtcgggctgtgcagatggggcactcatcatgcagaaagaaaaacgaactgacggaaaggctacactggaaattagtggacgggatcagccggatcagcggctgtatctaagcaaagaccaggagcgtttggtatggcttctcgaccatgcagaaaatgagctttggaagcagcctccggacccggtgctggaagcggtagcgaaaatggtatctgacgagaaccgcgagtgggaaggcagtccaacagagctttctgaagccctccagttgaatatggcagtaaaccgcctcactaagcatctaaatgtaaatgccagccgcctgctggaagaacatcaggtgaagtatgaatacaaaatcaaacacgaagggcggcgtattcggttgacctacatggtgatagaagcacctatggttgaagtaatagagtaaagcgcgacgcttgcaacggtcgcgacggtgttttgaggggtactctcagtaccgttgcgaccgtcgccaccgttgcggaaaaaaaaatatgaggtggtgtttcgccacctcatatttccaagcgcgccctattttagggcgtaccatgtaaatattaaggagtagccctcatgacttgaaaccggggcacaggatgcgaagtaaaagcgaaggatgggaaaagattttgcccacacatctagcgatggctactgtgtttcgcggcagctatcaagcgtaagggtggaacgatttgttccatagcatcttaaaggggacggcgctttagcgtaccctttcaaagcgttcgcagaacgcgcagccacagaattaaattctgtgttcaagggggcttgggggcgctgccctcaacaagcagacggcagaaaatgtgagtgtgtattaacactcgcattgcttgccggatttgtgtgtggatagccacacgcattgcttgccggtaactaaaacaaccgaaacggcccttgtgccgctgcggaaaatcaatcaaaattcaagtattgggaggtaacaactatgagaaagattttgtcctacgagttcaacctggataccgcctgtgtggagctgtgtttagaggacgggacgctgctctccatcgactgtaccgctgtagagaatgaggtggcgaacagcatgtaccagcggtcggagctggactggctgatctacaacgatcccgcatcttatgccgagatggttttgaatggagatccagaactatatctaaaaacagtgaccaagtatgagcctttagatgaccgattggtataccacctgtaacagatattccaccgagatcaataacattaatgtttgattttgttcgtccaagagagtataatataattacatgagtaaccagaaatttggaggtagctatgtatatttcagttagtgatgcagctacaaaatttaatatatcgaggcggcgagttcagttcttgtgcgaacaaggtcgcattagtggcgcaaatatgattgacggtgtatggcttattcctgagacggctaccaagccagcggatcgtcgcaaaaagcaccttgacgaaaatcaaatgagtcttttcgatacgcagaaaggctcatttacaatagatgacatttgcaaaactttatcaatatcaaaagcaacggcaaagaactggattcgcttaggcaagattgttcccgatatgaacggacaattatttagtcctgaatatatcgagaaatttgtagctgatcttaaatcaagcgataacacgaaactcaaaaggcgtaggaataagaagagcgcgacaggtaaagttttatataaagactatgttcatactgaaagcaaccagatgttggccgctgagttgctagagcttggcgtaattgagaacgaaaaagagttgcgcattgttcttgctaattttgctgttcagctttattaccaaagtcataatatttcatacccaaacaacagtgttttgctggattttttatctcagcgccctacggatgatttcaatattttgatcagagatttactaggaagttatgcgattgatggggattcgatccagaagttacaacctgcattaacaaaaggaattacctttgtacagggagaagactcgttaggtcttatctatatttctttgcaggatatagggcggaggaaaagttctggtgcctattatacacctgaaaaagtggtgaacgagctgattgaaagactgtatgagcaggatgggaatttagatcaaaaaacaatctgtgatccttgctgtggtacagggaatttcttgttaagtcttggtgcaaaaggaatagattgctcaaatttgtatggtcaggatattgacccgataagcgtctatttatctcgaatcaatattgcattgatagcccctcaaatatctgttgcggatcttcaatctagaattattataggcaatacattctttgaagcctttaagcaaaagtttgatgtgattctcggtaatcctccttggggttgtgatttttcagaggaagatattcttaggtgtcgccagctcttcaaaacagcagttggtaagagcgtagaatcatacgatttgtttgttgaaaaagctttgaccatgcttgttaataatggtgtgctggcttttgttcttcctgaagctattttaagtgttgccgcacatgatactgcaagaaggattatgattgattcttgttctttcaaattcattagttatttgggcaatgtcttttctggggtccagtgtccttctattattcttggaattacacctaacgatgaaagaacggtggtgggttgtagggttacaaccgaaaatgatagttttgttatatcgaagccaagaacttttcctgatggcacgctctctctcaatgtatctgatggagaaaaacagtgcttggatgtgattgtaagcatcaaaaatgctgcctatttgaaaggaaatgcaaaatttgcacttggaattgttacaggcaataataaggaatacatattagctgaaaagcgtgatgataatgagattattctaaagggaagcgatattcaaagatatggtatgacaccatcagggaactatatcagatttgttcctgagtcttttcagcagatagctccaatagaaatgtacagagcaaaagagaagctattgtatcgttttattagtgaagttcccgtgtttacttatgatgaccagcaaacactttctttgaacagctgtaacattgttattcctgaaattgatggcattgagatgaaatatgttcttgcaatccttaactcaagtgttgcgtcttactttgtcacaaagaaattcaattctattaaattacttcgttcgcacattgagcaaataccgataccgattgtttcaaaagatattcaagtagctatcgtaaaaaaagtagaccgcataatgaattcatccgaaaacatcagcggtctatatgaagagctggatggtgatattatggcgttgtatggattaaatgccaatcagattgaaacaattcaaaccgcactgagcagaaaaaatttattccttaaagagagctgagcaaattatatagttcctcgtatgtaagccactgaacgaagtggttctgcatatgataatcaatactactacggtttagatgaaattgtccttcaccttcgttgcctttgtgctgcttgtccgagtatccaaagcaagacaaaatctcactagaatgcattttgaaaatggcaattcgatcagcaaagaaaaggccatagtagaggacatcaaattccaagcgctttacctgttgaatgttgcaatcaaaatcatattcgtacatttcagtgctgtttaatgcccgattgccgaggttcgcttttttacactgacctatagcatttgagcggttaattaccgcttcatttgctttcatgacagtagaaaacttgatttcaattctttggtggccaacctcgtcatatcggtcgtggaactgattatgcgattttgtgaagctgtaaagagcctctatcatcagttctgctactgtcccaaatctgcgtgtgcgcaaagcaaaaattccatcccgaaattctttaatttcatcattcattttgatcattctccctattttctaaaagtagttggtagggctctatttcaagagcatctgcgattttttgtatattttctaatgatatgcttctgcgaaaacattcgattgcactgatatatgttctgtgcataccacatttttcggcaaatgcttcttgggataagccaattctctgccgataagccttaacattcgatccgaaaactttaattatgtccatacttgtaaacctccaatttatatgct

SEQ ID NO: 13610 - DNA, 19340 bp, Unknown
  gut microbiota DNA sequence
atacaataagtcactacattttgtttgcaataaggagatagcaaatgaaactacggaactttttatatctgaacacgaaggtaattgaggattatatcgctgcgattgacggatatacctatgatgaagagtcacaagcaatcgcaaccagtagcgaaaacgctttgacagggaaaagtgccctcggcattgcttcaggaagtggttcccacacaggtaagcagtctgaagaaatcaaaagatctgtacatatcagtgatgcggcgaagttcgaaaaggttcataaatatttgcggtcagatgaagaagatgggctgaagtactttgaatttttgaccgatacagactatagtggcctatatcgggatgattttctggaagtcttggttactgctcgcttttctaagatgaaagagttgaccgatagtgtaatgaaaattgcagagttggctgcggtttttgagactattacaaatcagcagattttggacaaaaagacaaccgaatctgtacaaggtttttcggcgttagggcagattaaatccggtaaagaaattacctgtgtgtttgaatttgcagacggaaagcatccaatagttgcgtatttggatgaaagttactttagatgtagccaagataattttgttggacaatcctatttgctatgtaaaattgttcgtaaaatacctaaggggcaaagtatcaagttggatgaaattttcgacgatttcaagaagctacctcttaacagagctcagcgaaggaatatgccgaagaatatggataaccccgcagagcttcgtgatgttattaaagggcctgcgctcgttgttcttcccatcgctgtatatcagtgagagtgcattaaatctgtggcaacaccatggcaacaaaaaatcagatagcccctactatctgaataatgaaaataatgccgataccctgaactaaatctcataagcaaatctgtttagaaaacttctgacaggattgaatgggaataagttcagaagcctagaaaagcctgattttactaggtttttgaggggttaaggccttctgttccaacgatttttcaacattttttcatgattcataaaaagagagctaactgatcttgattcgtcagttagctctctttctgctgatagtatcttttacggtatataggctctgcatatttggctatctaaagcgatggtcaaccattcaaacttttgatatctctgcattctttccataccctaacaggtggcaacaaagtctatggtcttttgaatattagctttggatgtatttttcagttaccttactgcggaagttatctctaaaattaaacacataatagggcactcctgttctgaacgcaacacttcgcgcatcctccacatcttccagagcacaaaaggttcggctccgagcagtttccgtagatggatcatcaaatagcttcatggtgcatccaacgtagtcatagcctctattctgtgtcagcagagcggcgacgctgctgtcaacgccgccgctcatagcgatcaagctttcacctgctgcagtgagcacaatgctcacaatccgggaacaggctgtggtcataaggaatgccatttttatcgtaataatccttgaccgccttttttatagcctcctccgccaatacagagcaatggagtttatgagccggaagtccatctaatgcttcagtaacggccttgttggtcagtgcaagggcatcggtcaacgatttgcccttaatcagctctgttgccatagaactggaagcaatggcgctgccgcagccgaatgtttcaaacttcacatcggtaatggtgttatccgcgattttcagatagatcttcataatgtccccgcagacaggattaccaacctctccaacaccgtctgcatcgtctatgatacctacattccgaggatttcggaaatgatccattactttatcactatacaacgccatagacacacctcttatctttcaaatatgtggggccgtttaccattgaccaagtctctccagaaaggagagatattccgcagatagtttaccacatctgtgacggcaagaatgatctcatcgatatctgcttctgtcatgtcctcaccgaggctgagccgcagagaaccatgggcgacctcgtggggtctgccgatcgccagcagcacatgactgggatcaagagagccgcttgtacaagcggagccggaggaagcgcagatacccttgtcatccagcagaagcaagagcgattcaccttcgatgccctcaaaacagaaattcacattaccgggcagccgatgtttgtgatcgccgttcagttcgctataaggaatctgatccaatccatggatcagccgctcccgcaggaccgttagttttgcgctgtgctcgtccatggccgcacaggcttcttccagcgccgctgccatgcccatgatggcagggatattctctgtacccgcgcgttttccgcgctcctgcgcgccgccgttgattatagtttccaggataataccgcgcttggcatacaaagcaccgattcccttcggaccgtgaaatttgtgtgcggaaagggagagcatatcgatgttctgttcttttacatcaatgtgcaggtgtcccgccgcctgtactgcatctgtatgaaacagcacgcctttctcccggcaaataaccccaatctctgtgacgggctgaatagtaccgatctcgttgtttgcatacatgatggtcacaaggcaggtgtcttcccggatggcttcagccacctgctccggcctcacaagtcctgtattgtgtacatccagaagggtgacctcaaagccttgctttttcaatttttccagggtatgcaaaacggcatggtgttcaaacgccgtggaaacaatatgctttttgcctctgcgcatccccagcgcagcggcggtcataatggcctggttatccgcctcgctgcctccggaggtaaacgtgacctcccgcggatcggcatggaggcaggccgcgatccggctccgggcattttccagcgcttccttggcctgctgtccaaaggcgtagaggctggaagggttgccgtaatattcttccatatagggcagcatagcatcgatagccgccttgctcattttggtggttgcagcattgtctgcgtaaatcataatatactcctcggtctttcatctgcaaacatgggagtggaaaggtatctgtcgccggtgtccggcagcagggccacaatggtcttacccttgttttcggggcgctttgccagctctacagcagcccagacagcggcgccggacgagatgcccaccagcactccctcctgctgtcccacacgtctgccatattcaaaggcatcctcattggacactgccaggacttcatcatagatctcggtgttcaggttgtctggcacaaagcctgcgccgatgccctggatcttgtgggctccggccactccctgagaaaggaccggagaggccgccggctccaccgctgccaccttgacagcggggttccgactcttgagatattcgcccacaccggtaatggtgccgcccgtacccacaccggcaacaaagatatccacctcgccgtcggtatctgcccagatctccgggccagtagtggcgcggtgcgcggcggggtttgccgggttgacgaattggccgggaataaagctgtccggaatttcctttgccagctcctctgctttggcaatggctcccttcattcccttcaccccctcggtgagcaccagctccgcgccatacgccttcatcagctggcggcgctccacgctcatggtgtcgggcatgacaaggatgatgcggtagccccttgccgcggcaacagatgccaggccaactcccgtgttgccggaggtaggttcaataataactgaccgggtattcagcgatcccttcgcttcggcatcatcgatcatggctttcgcaatacgatccttaacagatccggcggggttgaggtattccagctttgccaagatcctggcttccaggccctcggatctttcaatatgggtaagctccagcaaaggcgtcttgccgatgagctggtcagcagaagtataaatgtttgccatggtcatacctccttgacacgctggaacgcctgctccagatctgcgataatgtcatcaatgtgctctgtgccgatggaaagacggatggtattctggtaaattcccacgttctccagttcctcctccgtaagctggctgtgtgtggtggaagctggatgaatcaccaaacttttgacgtccgctacattggccagcaaagagaaaatcttcaaattgtcaataaaccggaaggcatcctcccgtccgcccttgatttggaatgtaaaaatggaagcgccgccgttcggaaaatacttttcgtacagcgcgtgatccggatgttccggcagagaaggatgattgactttttccacctggggatgggaagtcaggtatttcaccactttctttgcgttctccacatgacgttccagccggagactcagggtttccgtaccctgaagcagcagaaaagccgcaaagggactgatgcaggcaccctcgtcccgcagcaggattgcgcggatataggtaacaaaagcggcctttcccgcagcctctgtaaactttacgccatggtagctgggattcgctgcgctgatccaggggtattttccgcttgccgcccaatcaaagctgccgccgtccacaatgataccgcccagggtcgtgccgtggccgccaatgaacttggtggcggagtggatcacaatgtcagcgccgtgttcaatgggacggatcaaatagggggtgccgaatgtattgtcgattaccagcggcagtccatatttgtgagcaatgtcagcaatggcgtcaatgtcaggaatatcactgttggggttgcccagggtctcaatgtagatggccttggtgttgggctggattgcatgttccacggcggcgaggtcgtggacatccacaaagctggagttgatgccgtagagtggcaaggtgtgggccaacagattactggtgccgccgtagatggtcttttgtgctacaatgtgctccccctgttttgcaagcgcctgaatggtataggtgatcgcggcggcgccagaagcgacagccagaccggcaacgccgccctccaatgcggaaatgcgctgttcaaaaacaccttgggtggaattggtcaggcggccatagatgttgcctgtatcagccagaccaaagcgatctgctgcgtgctgactgttatgaaatacataagaagtggtagcgtagatgggaaccgcacgggcatcagatgcagggtcagggtgctcctggcccacatggagttggagcgtttcaaatttgtaatcagacatagttgtgttcctttctgttccatgatttattttgctaggaagaacagataacacattcgtccgaaacggaagttattccgcagaagtctgaaaaaatgtttttgcataacctgctccttttacccacggaattggtatgtataatgttataccaccattttcccactaagtcaaggggtaattaaaaagttgctgttgcgtatttgtaggaatacaatacacgttcgtggggaatttttttataatagcccttgacaagtagagggcatagtagtatagtgataaaaaatttaatatcctaaaccgttgaagcggagataacggcaatcatgcctttacagagagcctgtggtgctgagagtcaggtaagaaacaagttgtcaaatggaccgctgagggcgcagtcaaatgtgagattcacagagtatgctgcgacgttgcaggcagacgtcatttgccggggatatgttggtatcccgctaagcgcacgggtcatgccgtgaatcaaggtggcaccgcggataatgtgttttattcgtccttgacagaccgtagtttctgtcaagggcgattttttgctcctctggcagaaacgccagaggagtatttttatttggaggtgcagaccatgcagatcgttcccacattggagaaagtccaggagatcgcttccgccagacgataccgggtgctgccggtgagctgtgagatcctgtctgacttcaccacgcccatagaagccatgcgtatcctgaagcaggtttccacccactgctatatgctggagtccgcagccagccatgagacctggggacgctacaccttcctgggctttgatcccagtcttgagatcacctgcaggaacggggagatgcgggccggatgccttcacttcccaacggcggacccatccgcttacctgcgtcaggtcctggaggagcacaaaagcccccgctttgaccatctccctcccttcaccggcgggcttgtgggatacttctcctatgactatctggggtacagcgagccgtccgtccgggcggaggtggaggacagcgaggaatttcgggatcttgatctgatgctctttgacaaggtcattgcctttgaccatctgcggcagaagctcattctcatggtcaatatgtccctggacgagccggagaccagctacaacaaggcggtgctggagctcagacagcttgtggagctgctgcggaccggagcaaagaagcaggaccgtgccgggcggctcctgggcccggtgacgccgctgttcggccgggaggacttctgccgaatggtggagcaggccaaggtccacatccgggaaggggatatttttcagatcgtcctctccaactgcctgtcggccccctttgagggcagcctgttcaacacctaccgggtgctgcgcacccttaacccctccccctatatgttctatttttccggaacagatgtggaggtggcgggggcgtcgccggagactctggtcaagctggaaaacggcgtgctccacaccttccctctcgcgggcacccggcccaggggaaagaccccggaggaggaccaggttctggagacagagctgctctccgatgagaaagagctggcggagcacaatatgctggtggatctggggcggaacgatcttgggaagatcagccggttcggtacggtccaggtggagaagttccacaccattgagcgcttctcccatgtcatgcacatcggctccaccgtacggggagagctccgggaggacaaggacgcgctggacgccatcgaggcggtgctgcccgccgggaccctctccggagcgcctaagctccgggcctgccagctgatcgcagagctggagaacaacaagcggggcatctacggcggggccatcggctacatcgacttcaccgggaatatggacacctgcatcgccatccggatcgcctatcagaagaacggcagggtgtttgtgagaagcggagcagggatcgtggccgattcggtcccggagcaggaatttgaggaatgtatgaacaaggcgcgggcgtccctgagggcgctggagcttgcacaggaggcggagctatgatcctgctgatcgacaactatgacagcttttcctacaatctgtaccagcttgttggggaattcgagccgaatatctggatcatccgcaatgatgagatgaccgcagaagaaattcgggcgcttcagccggaacggatcatcctctcccccggcccggggaggccggaggacgcgggaatcaccatggaggtggtgaccgccctggggcatgagatccccattctgggggtctgtctggggcaccaggccatctgcgccgcctttggcgcctccattacctacgccaaggcgctgatgcacgggaagcagtcccaggtccgattcgatctggactgcccgctgttccggggctgtccggaaacagcccttgtggggcggtaccactccctggcggcagacaccgaaacccttcctgagtgcctgaaaatcactgccagaaccgaggacggagaggtcatggcggtgcagcacagggcgcatccgatctacggcgtacagttccacccggagtccattttgacgcccgacgggaaaaccatgctgcaaaacttcataaaggagatgtaaaccatgatcaaagaagctatcgtcaagatcgtcaataaaggggacctcacctacgaggaggcctacaccgtgatgaatgagatcatgggcggcgagaccacgcccacccaaaacgccgcttttcttgccgccctctccaccaagagcgcccgggcggagaccaccgacgagatcgccggatgcgccgccgccatgcggggccacgccgtcaaggtggagaccggcatggagctctttgagatcgtgggcaccggcggagacaacgccggcagcttcaacatctccaccaccgccgccctggtggcggcggcagggggcatgaaggtggccaagcacggaaaccgtgcggcctcctccctgtgcggcacggcggactgtctggaggcactgggggtcaacatccaccagagccccgaaaagtgcgtggagctgctccgggacgtgggaatgtgctttttcttcgcccaggattaccacacctccatgaaatatgtgggagccatccgcaaggagctgggcttccgcacggtattcaatatcctaggcccgctgaccaaccccgggacgccggtccggcagctgctgggcgtctatgacgactatctggtggagcctctggctcaggtgctcatcaatctggggatcaagcggggcatggtggtatacggacaggacaagctggacgagatctccctgagtgcgcccaccaccatctgcgagatccgggacggctggttcaagtcctcggtcatcaccccggaggattttggctttgaccgctgcaaaaaagaggaactgaagggcgggacgccggaggagaacgccgccatcacccgggctattttgaatggcgggcggggcgccaagcggaacgcggtgctgctcaatgccggggcggccctgtatatcggtgaaaaggcggacagcatgaaggacggcgtggccctggcggcggagttcatcgacagcggaagggctgctgctgtgctggacaggctggcagaggtcagcaacggcccggaggtggaggcatgaccatactggaccagctggccggccatgcccgggagcgggtggcggcgtccaagagcgctgtccctctggaagagctgcgtcggcaggcgctttctctcctcaaaggagattttgggtttgagaaagccctgagaaaagacggactctctttcatctgtgagtgcaagcgggcctcgccctccaagggactcatcgccccggagtatccctatctgcaaattgcactggactatgaggcggcgggtgcagactgcatctcagtgctcactgagcccaaatggtttctgggcagcggccggcatttgcaggagatcgcccggacggcctccatcccctgcctgcggaaggactttaccgtagacgaatacatgatctatgaggcgaaggtgctgggggcgtcggcagtcctgctgatctgctccattttgaccaaggggcaaatcaaagaatacctgcacacctgcgatgagctgggcctgtccgcactggtggaggtccacaacgaggcggaggcggaaactgccctccaggcaggggcgcggatcatcggggtgaacaaccgcagcctgaaggatttctctgtggacccggacaacagccgccggctcagggcgctgatcccccgcgaggtgctgtttgtttccgaaagcggcgtccgcagcgccggagacgtcgcagtgctccgagagctgggagcggacggagtcctgattggagaaactctgatgcgggcggccgataaaaaggccgctctggccggactgcgaggcggagcatgacaaaaatcaagctgtgcggcctgtcccgcccccgggatattctggccgcaaatcagctgaggccggagtatatcggatttgtatttgcccctgaaagcaaacgatatatcgcacccaaaggggccgctgaattgaaggaattactggacccgaacattcaggcggtgggcgtatttgtcaacgagacagcagagacagtggcccgcctgctgaacctcggtgtaatcgacctggcccagcttcacggcagcgagggcggggactatgttgaccggctgcggatgcttaccccaaagcccattatccaggcattccggatcgccacggttcaggatgtcctccacgccgaggccagtgctgctgaccatatcctgctggacgccggtgcgggtacgggaaccgtttttgactggagtatgctccggcagctccggcggccctatttcctggccggcgggctggggccggataatgtggaagaagcggtggaacggcttcacccctatgcggtggacgtcagctccggtattgagacggatgggggcaaggaccctgaaaaaatggcggcctttgtggccgcagtcagaaagggagcgagagcatgaccaatccaaagggacgcttcggcgtccacgggggacagtatatccccgagacgctgatgaacgcggtcattgaactggaagcggcatacgatcactacaagaacgacgaagctttcaaccgggagctcaccgagcttttgaatgaatacgcggggcggccatcccggctgtattttgccaaaaagatgacggaagatctgggcggggcgaagatctatctgaagcgggaggatctgaaccacaccggggcccacaagatcaacaatgtgctgggacaggcccttctggccaagcggatgggcaagacccgcctgatcgccgagacgggggcggggcagcacggggtggctaccgccactgccgccgccctcatggggatggagtgcgtggtctttatgggggaggaagatacggtccgccaggccctcaatgtgtaccggatgcgccttttgggagcggaggtggttcctgtaaagacgggcacagccacgctgaaggacgccgtatccgaggcgatgcgggaatggacctcccgcatcgaagacacccactactgcctgggctctgtgatggggccccacccctttcccaccatcgtccgggactttcaggcggtaatctcccgggagatcagggcgcagcttctggagaaggaggggcggctgcccgacgcggtgctcgcctgtgtgggaggcggttccaatgccatcggcagcttctatcactttatcggggacgaacaggtccggctgatcggctgcgaggcggccggccggggggcggataccccggagacggcggccaccatcgccaccgggaagctgggcatcttccacgggatgaagtcctacttctgtcaggaccagtacggccagatcgccccggtctactccatctccgccggactggactacccgggcatcggcccggaacacgcccacctccatgacatcggccgggcggaatatgtcccggtcactgacgaggaggcggtcaacgccttcgagtatctggcccggacggagggtatcatccccgccattgagtcggcccacgccgtggcccatgccataaagcttgctcccgctatggagcgggagcagatcatcgtcatcactatttcaggccggggcgacaaggactgcgccgccatcgcccgatacagaggggaggatctccatgagtaagatcgcacaggcatttgcccgcggaaaggcatttatcccgtttattacctgcggcgacccgaatctggagaccaccgccgccgccgtccgggccgcagtggaaaacggcgcggacctcatcgagctgggcattcccttctccgaccccaccgccgaggggccggtgatccagggggctaacctccgggccttgcagggtggggtcaccacagaccagatcttcggactggtgcgggacctgcgccgtgatgtaacaatacctctggtttttatgacctacgccaatgtagtgttctcctatggagcggagcgctttttctccgcctgccgggagacggggatcgacggactgatcctccccgatctgccctttgaggagaaggaggaatttctgccggtttgcaggcggtacggggtggagctgatctccctcatcgcgcctacatccaaggaccggatcgccatgattgccagagaggcggatgggtttctctatgtggtgtcctccctgggcgtcaccggagccagaagcgagatcaaaacggatctggcctccatgatggagactgtgcggcagaacacccatatcccagccgccatcggctttggaatctccacgccggaacaggccaagcggatggcagagctcgccgatggcgtgattgtcggctctaccatcgtcaagctgctggaacagcacgggaaggatgcccctggctgcatcggtgcgtatgtcaaaaccatgaaggacgcgatacggtaaaaatcagtcaatccgtgaaacgacagcagagtctcgttgggaatttccaacgagactctgcaaaaaataagaaagatgtgtttgatggcggagctgctttatgggaagccatctattccagacagatcccgctcaggaaacgggcacttccggggcggaaggagcctgtttcccgccaggccgtccgccgcccattccgccgggattggactcggagccgtcgttggtggtcaccgacccgccgttgttggtatagctgccgctgcaatccagcgcggtgtttccgtttccattgcaggtgaggtccagcgtcccgctgttgatggtgaggtccccgttggagtccaggcagtccccattcgccacgatggtgatggtcccgccgttgatggtgataaagctgtccgcgctggcggcaaatgggtctcctctgccgccgaagccggagctgtccgcgccgccggcggcgttgaagccgtcatcgtaagcggtgatctcaaaggtcccgtcctccacggtgacggacagaccctcgacgccctcatagcagtaggggatggaaaattctccggctcgaatggtcactgcgtcatcggagtggacggcgtcgtctccgctggaaagagtgaaggtcccgccggtgacgaccagagcgccgccgctgtgaatgcagtcgtccacggtgtccatggtccaggtcccgccgttgatggtcaaggtaccttccgccttcacacccttttggctgacggtgtcctccgcggtgtctgtcacttccactgtttctgcgtcaaaagccggttcctcgcctgccggctgggtggggaactccggagattgaccattgtcaccgctgtccggccgctcaggcggcgtcccgctctcgacggatgggccgccgtggggccgcgccccgttctgaccgcccggaccttctcccatgccgccggggccaaagctgtccccagtggacatggtgacggaggcgctgccctccccggtggtcaggtcaaaggtcccgccgtccgcctgaagcgccccgctggcgctgacggcgtctccctgggcggcaatggtaaattcgccatccgccacatacaaaaatcccagagaggagtcatcggcgttttcagcgtggagaccgtccttaccggaggtgatggtaaatgtgccccccgccacagctaggctgtccttgcctgccatgccgtgcccggcggcggtaacggtgtagctgccgccggtgatggtcagctcgtccttggacaccaccccgtggcctgcctgggcgtcaatggtcagactgccggagccgttgagggtcaggtcggttttggagaacaccacggaatcgatgttgttctcatcaatgtcggcatagctgccgccgttgatcagggtattttccgtcccatctgccagagtgaggaacaccttgtcggcgtttttggaatagatggcggcggagtccgtgcaggtgatatccgcgccggccaggacgatctggaccttgtccgtatcatcggcatccaccacgatctgtccgtctgtcagggtaccggacaccagataggtcccctcgtccagcagggtaatccgggcgccgtcaatggagacagcgtcggaagcgcaggcagcggtctctcccgtcagctggatggggatggcggcgctctcatcatagctgccgtccagatcccggtcgctgaacaaggccgatgtatcaatgacagacaccggctctgtgtcagccgatgcgggggtgctgctggaagaagcggcgtctgtgttctggcagccactgagcagcaacgaaatgctcagcagtggcatagcgattcgtttcatatcgttcctcctgttcatagtccggccggtccggtctcctgctggcacagggagatctccagatttccattgcgctggcgcagggtgtcgatcaaggccttctcctgccctccatcccggagggtcaggtcgtaggtcagcttgaagagactgcccatgttggtggtcttgacctgtttcaactcagacttggtggcatactgtgccaaaatcgggtcaaagacgccggtgtagtccagatcctccggaatggtgatgtgcagggtgcggcagcgcagggctgcgtttccgccgccaaagcccagggcgtggtaagccatggtgatcccgcccaggatcagggcaaagagcgcggcatagcccagatagcccatgcccgccatcagccccgcccccatggcggcgaagatggccccgatctcccgggcggagccaggggcagagcggaagcgcaccaggctgaaggcccccgccaccgctacgccggcccctacattgccgttgaccatcataatgaccacgcacaccaccgccggcagggtagccagggtgacggcaaagccggtgctggggcgggtgcgccacagcatcatggcgcacaggaccaggccaatgaccagagacgcccccacgcacaaaagaaactgctctggggcgatcaccgccgtcagctgcgtatcaaagatcccttgaaaaagcgtatcaggcataccgttttcctcctttgtattcctgttccagtaaaatttgataggccgttccatacttggagaaggacgtcttatagagtcccatctctgtcagcaggcggaccatccagagggggatggccccaggagcctttaactccatcagaacctgatccggcctcagcagggctgtgccccacaggtcggagtccagcgtcaggtctgctgtccgaaagcggatggcgtcgtcgaaggtgatgcgcagaccgctctccggcgcataccaggagtcccgctcgtaggagaggaacacccgtggctccagatccggatagaagtccatggcgtagcctatctctctgccgatctgggtctccggccatggacagtccccggtcagacagtccagcgcccggccatagggcagggtgagccgccgcttatagacgatggagcggtactttttcttcagctccataaaaacggggtgttcccggtccgcccggccatagctgcgcagacgcagcttttccttgtagacgggcttttccaggctccggcggatgagccggaaatccggagtgtccagatagagattgcggatagagctgtggctgtattcgtcgggacgcaaacgagctccggcggcggagagcagccgggcctgctgcccccgtgtcagcagatatttgaattcatagcgctgaaagacagtctcttttttcatggtgagatcctccttgtgttgggatggtaaagccagtgtaaaaaccaaaccataactgaacttaaaaaatcaaaaacttttttgctgacaacgagccatgaccgtgctatcttttaattctatttaaggtaaatccggcaaaataccgtcagaacaaaaaggagggatgcggtgtgcgcattttactggcggaggatgagcgatccctttcccgtgcggtgaccgctctgctggagcggagccactacgcggtggatgcggtctatgacgggcatgaggcgctggattatctggagagtgggaactacgatgccctgattttggacatcatgatgcctaagatggatgggatggaggtgctgcgccgcctgcgtcagcaggggaactccatcccggttctgatgctcaccgccagaggtgaggtggaggacaaggtgctgggcttggactccggggccaacgactacctgaccaaaccctttgccacggaggagctgctggcaaggctccgggccattacacggcagagcgtccagctcagcagccagctgaccttcggaaatctctctttggagcagaccacctttgagctgtccaccccggctggcagcttccggctggccaacaaagagtatcagatgatggagctgttcctgcgcaatccccggcagatcatccccgcggagcggtttctggagcgaatctggggctatgacagcgaggtggaggtatcggtggtgtgggtctacatctcctatctacggaaaaaactcaccgctctgcaggcggatgtggagatccgggccagccgcaacctcggatactcgctggaggtgcggacatgatccagaagctgcgggtgaaattcatcaccgcctccatgctgtctctggccctggtgctgctggtgatcctgggcggggtcaacgccatgagctatcaaaaagtggtccgggatgcggaccgcatcctggcgctgctcagcgaaaaccggggcgtattccctcagcagacaccaccggacgaccgggggggaaagcctgggccaattccggtcttgggccatgggatctctccggagaccccatttgaatcccgctttttttctgtccttttgaatgaaaaagggcaggtcctccagagcgacacggggcagatcgccgccgtggatgatcagagcgccggcgagatggcgcaggcggtatggtccagcggaagcgccagcggattccagggggactaccgctatatccgcgcggcagaagcggaaggtacccgcttcatcttcgtggactgcgggcgaagcctctccaatttccggacgaccttgattgccagcgtcctggtggcgctggcggggctgctggctgtctttctgcttctgctgatcctgtccaagcggatcgttcgcccggtggcagagagctatgaaaaacagcgccggttcatcaccgacgccggacatgaattaaagacgcctctgaccatcatcggcgcggatctggatctggtggagccggagctggagggcaacgagtggctgcaggacatccgctgtcaggtccggaggctgaccgggctgacccaggatctcatctttctctcccgcatggaggaggaaacgccgcccatccagcccatcgagtttcccctctccgacctgacagaggagatggctcaatcctttcaggggctggcaaaggcgcaggggaagcggctcacgctgtccatcccccccatgctctcctataccggagatgaaaaagctatccggcagctgctgtccattctgttggacaatgccctaaaatataccccggaagagggggaagtggagatcgcactgaaaaaagaggggcgcatgatccgcctttcggtctccaatacgattgctcaccccatggagcgggagacgctggggcgcctctttgaccgcttttaccggggcgatcagtcccgcagcagtcagaccggcagttacggcctgggtctgtccattgccaagggcatcgtgctggcccacaggggaaaaatccgggcagagagcagcggagcgtccctgtcggtgatcgtttctctgccggcataaaacttcatccgccaagcgcgtatctggaaaacaggaaaagactgcgttacatagccaattttgtaaaatctccgttttcttagtccaatcatgactcaggataagggcacagcgagagaaagatcggttgtcatatccgaagaatgtgttaaaatggcatcgaagaattcgcttttaggaggcctgtttatgtatcagtctgctctctctgcgtccgatgaacaagcgaccaattctcagggttttaacggccgtattttgacgctgctgacctctgaagagctggagcaaggaccgtgcctaccggggctggagaatatactgtgccatacgccgcttgcgagagatgcgcgtgtctgcaaagcagaagcacaccggacctatctttgcggcaccattgtcacgccccgccataccaaggaccggcgccccatttctttcggctatctgctgacgaaggatcaaattattatatgcgatgacgctggagttgcacataggatgtttcagcggatcagagaagaaaatcctcaactcactgaccatattggcggattgctctatgggtttcttgaattactgattgcaaaggatatgcaccatcttcaagagctggaagagaagctgtcggagctggaagaagaggtattggagggagttctggacaatttcaattaccagatgactgcgctccgaaaagaactgacaagctggagccgctactatacgcagctggaggatatggtctgcgagtttgaggaaaacgaaaatgaattctttactgacatagaaacacgccagttccacatggtagagaagcggatcgcgcggctgaaaaacgaggcgcagattctccgggagtatgggctgcagattcgagagctatttcaggcggagatcgatatacggcagaaccggatcatgaaaattctcaccatcgtcaccactatttttctgcccctgaccttagtagctggctggtatgggatgaacttttccaatatgccggagttgtcgtggaaatatggctatcctgcggtaatcgtgatcagcttggtaatcgtgatgatttgcctctggaccatgaaaaagaaaaaattctggtaacttcaattttgtgcatgacatcctcccgcaaagatggggaaagccgcgcgtaaagcgtcatccgctcgcttgtctgggaaaattctgttctacataatcaaagggataaatggccggagagttcaagtaggccggaaaaagcagtaagtctgaaaaggcttactgctttttccggcctgccagtactgtggaaaaactgcacagtatgtttctctgacgtatctctacactgataggttcgtgttcaaacaaactggtagtgctctgagttttatatacagcctcattcccactcgatggcgggcatatggcttctactatatacagtgtctgttgcaatctgataaacgctatatctgtatatattatatagattatcagggtttactgcatcgtttgtggtcaaaatgaggtcacggaaccgttactca

SEQ ID NO: 13611 - DNA, 6581 bp, Unknown
  gut microbiota DNA sequence
cttgcgctcactccatatttctcacatggtaggatatttcctgccgattattatagcgcaacaatgtaaggctacacaaaaaaatttttataatgcaactgtaagttatctgcttctatgcgaaacagataacttatctttagaaataaccccaggctattagggggagtattttctcctaataccgtagtacaccatactaaggccttattctactagcatttttgtctgtttggtcaccgggccggaagttccacggtgaagcgattgtatccaccgctgctctccacccagatgcgcccgtggtgctcctctgtgatgcgctgggcgatggagaggcccagaccgaagctgccgtcccggctccgggctggatctgtccgatagaagcgcttgaaaatatccttctgctccgccgccgagagaggcgggccgggattgcttacagtcagccggcagcggtggtgcccccatcgctccagacggacgttcacagttcctggcggctcggtatatttccgggcattgtccagcaggatatccagcacctctttgagccggccggcatccccgttgacgttgatcccctcggcgagttggctggacagcatcaacccctgctcgaaaaacaccggatcgaaaggcagcagagcgtccgctgccaaagtgctcagatccaccggcctcaggtccgcctttccctggccgctgtccgcccgggccagctccagcatttgctccaccagggcccgcatctgccgggacatggtgagaatgttggcagaaaaccgcacctggctgtcccggtcattttcttcgctttgcagcagctccgcattggtcatgatgacggtaaggggagtcttcagctcgtgggaggcgtcggaaacaaactggcgctgctgctgccaagcccactccaccggtttcactgtccaggcggccagtttgatgctgatccccagaaaagcaaaaaagcagagcacgccggtgaggatgcagttcttgaccagattgtttaaggtggactgctcactggtggtatctgcaaaaatcacactctgtccaaacggagcgtctactcgcagaaaacgcagatgatactgcttcaactccccggatgggcggttcacccgctccacctcctggatcagttcctgcaaaaaagtttggtcaaaggcttctccaggagacaggtcataataccccacaccggcagcagtcagtgttccgtcctccgcctcctgcaccacaaaaaagggcagacggacctgctcctgttgttcacccgggcgtgcaaagggggcaagcggacgatcaggggccatgatacctaccggaacggcgcgcatcatggcaaagctttcctgctccaggctgctccgtgtaaaaaaatagagcattccaaagaccgtacacaacatgatggtgacgatcaccatgatgaccgcgacaaattgaaggcgcagacgtttcagcattcctcatccacctccagacgatagcccagccgccggactgcctcgatgcggatattggaaccgatgctgtgcagcttttttcggagaaagcccacatagacctccacatgattctccaccgcatcggagtcatatccccacacccgggccaggatcacttcctttgagaggatggtgctctgggagcgcaggagaatgcgcatcacgtcaaattctcgggcagagagctggacccgcttttctccgcagatcagggtgcaggctcccagatccagagcggtatttcccagggtcacctgatccacctggggcccctgccgtcggagcagggcattgatgcaggccagcagctcccggatatcgaagggcttggtcagataatagtcagccccggcattgagcccctcgatgcggtcttccaattctgagcgggcggtgagcatcaggataggggtgccgcagcgcttgacccgcacctcccgggccacctgacagccgttcatttttggcatcatcacatccaggatcagcaggtcgtaaatccccagctccgcatactcagccccggtctcaccgtcgtagacacactccacctcaaagcccttgcgctctaaaaccgactggatggagtccgccagcagtttttcatcctcaattattagtactttcataacagcctccgatgggatgcggtattcctttttgatattatactacacaaaaatactgaatcgaagctgaaaaagcagaaagatccgcagcactttcccgcgtattttcagtgtctattcagcaaacggtgttatcatcagatatcatctgccgtatcactccagaacttaagtgcggcacgaaaggagtttctcgcatatgaccttagtgaaaccaaagtccgacgaccaagtgcagggagagcaaacgaaaaagcgaacacaccgtctccctcgccccaagcacgggaagcggtggtcgctcctcattgtagctctccttctgatcctggccttcgccggaaaattcctgctgagcaaagggccttcagcggcggcaatcacctacacagaggaaagggtcgccccacggaccattaccaactctcttaccggcagcggtaccctccagcccgccaattcctatactgtgaccaccctgatcgaaggcgaggtcctctctgccgactttgaggagggcgatatggtggaacaggacagcgtgctctatgagattgacagcgaggacgccgccgccaacatcgaaaaggcgcagatctccctgtctcaggcccagcgcagctatgagagcacggcagaaaaccagacagtcaaggcaaattcctccggtacgttgtacacattggatgtcaaagagggggacgaggtcagtcaggggcagaccatcgccaccatccgcaacgacagcaccatgacactgaccgtccccttccccgctgaggacgctgctaccttccacgtggggcagaccgctcaggtgacactggacggctcttttgagacgctgaccggtacagtccagtcgatctccggcgggaatgccgtcggaaccggcaacaccattacccgagatgtgaccatcgccgtgcaaaatcccggcgggctcagtgcagttcaggtagccacagcctccgtcaacggtctgggcagcgccggaaacgggacctttacctaccagtcagagagcacggtcacggccagcgccagcgggactgtcgccgcggtccacgtctctgaaggcagcgctgtttccaagggacaggtattgatcactctgggcggtgatgatttggaagatcagctccaaaacgcggcagacagcctgagaaatgcggagctgtccatggagaacacacagaagcagctggagaattacaccattacatcccctatcagcgggaccgtcatcgacaaggagtacaaggccggcgataccgtggaatccggcaagaccctgtgtaccatctacgacctgagctatctggagatgaccctgaacatcgatgagctggacatctccacggtggaggcgggacaaacggttcagatcactgcggaggcggtggagggcaagacctttaccggcgtggtcaccaaggtctcggtggcaggcaccacctccggcgggatcacctcctacccggtcaccgtccgtatcgacgagaccgacggcctgctaccaggcatgaatgtggacgcggagatcgtgctggaggaggccgccgataccctggccatccccagcagcgccgtcaccaggggcagcgggaacacctctctggtactcatcactcaggactctcccagtgcggaaagcgccgtggagcaggagtcgcccgagggctacgtctatgtgcaggtggagaccggcatcagcgacaacagctatgtccagatcctcagcggtttgcaggagggggacaccgtagcgtatgtcacccgctccacagagtccggcagcatgatgatgggcgggatgcccggcgccatgggcggcgatatgcccgccggaatgccaagcggtatgggcagcgctcccggcggcggcatgccaagcggcggcggccccggaggggggttcccgggatgagcgcgctgatcgaatttcgtcaggtctgcaagacctatcagatgggggacaccacagttcgggcggcggaccacatctccatgcgcatcgaaaagggggaatttgtggctatcgttggccagtccggctccggaaaatccacctgcatgaacatcatcggctgcctggatgtgcccacctccggcacttatctgctggacggacgggacgtagggcagatggataccaatcagttggcagcgatccgcaacgagctgctggggttcatctttcagcagtacaacctgctgcccaagctggacctgctggaaaatgtggaggtaccgctgatgtatgccggcgtccccaaggcggagcgccggcagcgggcccgagaggtactggagcaggtaggcctgggcgacaagctccaccatctgcccaatcagctctccggcggtcagcagcagcgggtgtccatcgcccgggccctggccggccgtcccgccgtcatcctggccgacgagcccaccggcgccctggactctcacaccagccgggaggtgctggggatgctccaggacctgcaccgtcagggcaacacggtggtacttatcacccatgacaactccattgcggtccaggcccagcggatcatccgcttggaggacggccatgtagtctatgatggggacgcccgcgcgccggaggccgtggtgacccccggcctaaggggaggtgtgtcgtcatgagcctctgggagacttttacgcttgctgtcaaaaatatctccggcagcaaaatgcggacctttctcaccatgctgggcatcatcatcggcgtgtgcgccgtcatcgtcatcgtgggcctgggcaacggtatggccggatatatggaggacagcttcgcggagatggggaccaacaccctgacggtgtccatcatgggccgtgggacctcccgcaccgtgtccgaggagcagatgtatcagatcgtggaggacaacgccggctatctggaccagatttcgcctactgtgtccatgacaggcagtgtaaagatcggcagcaccacttacagctccacctccgtatccggtgtcggggagacgtggtttgatatgaagggctacgaggtagctcagggccggggtatcgagtatatggacatcgtcaaccggaaaaaggtgtgcgtggtgggcaattatgtggcccagacctgctttggcgggaatgccgtgggccagagtctgaaggtgggcggcaccaccttttccatcgtgggcgttatggctcaggaggcggagcagatggaggaggggggcacggacgactgtgtctatgtcccctactccaccgcagcccgcctgtcctttaccggcaccatcagcagctatactgtgaccgtgaccgatgaggaatacgccgccctggggaaagaggccatcgaaaccgctctctacaaaatttttcaggatgaagacgcctataccgtggtcagcatggcggagatgctggacaccatgaccagcatggtcaatatggtcatcgccatcctggcggccatcgccggcatctctctgctggtgggcggcattggcattatgaacatcatgctggtctctgtcacagagcgcacccgggagatcggtatccgcaaggccctgggggccagggagggcatcatcctgcggcagtttgtgatcgaagccgccaccacctccgcccttggcggagggctgggcatcatccttggctatctcatgtcggcggttgctacacaggtcatcaaacggctgatggagacggccattaccgtctctccctcggccacggcggtcttggcagcctttgggatctccgccggcatcggcatcctgtttggctatctgcccgcaaaaagagccgcccgcctcgatcccatcgaagccctgcggtatgactgataggaggtatctgttatatgaaatcaaaagttctctctctcattctggctgtgtgcacgctctgctcgctattggtgtccccggcctccgcagtcggcggagacagcgcagtccagatggtccaggctttgggtattttggacggcacagatctggaaagccctgttacccgggcggagttttccaaaatgctggtggcagcctcctcctataaggatagcgtcagcagcgagggcagcggatattccctgttcagggatgtgaaaagcagctactgggcctcggagtatatccgctgcgccgtgtcagagggctggatgaccggctataccgacgggaccttccggccggatgaaacagtaaagctggaggaggcgtgcgccgcggtgctgaagctgctgggctacgacacctctgctctggccggctcgttcccaagcgctcagttgagtaaggccgcagcactgggcctgcgggacgggatcagcctgaagcagggcggcactatggcccggcgggactgcgctgcacttttctccaatttgatgacagctaaaaccagcggcggtcagatc

SEQ ID NO: 13612 - DNA, 47161 bp, Unknown
  gut microbiota DNA sequence
gaccaacggagaggtggactataccgccctgacgctggaaaacctcagcggcccctatgtagctgagaacagttccacctctctgcccttccagcctgcaacagtctaccgaaacggagaaatttcctcttccgccgtactgaatcagtacgatgtctactattatgatcagggcagcagcacgctgtggatctacaccgaccgggtctccggcaagatcacggagctgtctcccagcgccacgtctcctacttccgtcacggtagccggcgctgcctatgaaattggcagctctgccgccacttataagctgtctgcgctgggcggaggcaaagccggcaccatcgtgacgctgctgctggggatggacggttccgtggtggatgtgctcactgggaccagcgtggaagcggtgtactatgggatggtggaatcctctgaaaaagtggtcgccgaggacggaaatgccgcagttcagaccaatgttaccgtgctctgcacagatggcacggcaaaaacctttgcggtggacaaagccatggactataaggccggccgtctggtctctgtcaatgtcagcgagggcagcgtgaccataaaaacactgacagaaaagcataccagcggtaaggtgaacagcactgctacaaagctcggcgatctttcctttgcggacaatgttgagatcctggataccagcagcgaaggtactgctgctgccgtggatgcctcccgtctgtccgggatgagcctggacagtgacgacatccgttattacggactgaacgaggaaggcaggatcgagtatcttattctggatgatgtaactggagacctctggacctacgcctatctgaccaatctggaggatcagtcccaggagatgtccatcaatgtcacctacacctatttggtagacggcactgaacagaccctgcgttctgcttccgttaagtatcctgtggagaccggcggcatagccatcgcctataagtccgacggcagcatccagaccatgcagcgaatgaagtccgtaaagctgacggagctgtccggaagctgggctatggcctctaatcagaggtacgccattgcggatgatgtgcaggtctacctgcgtaaaaacggttcttactacctgactgccctttccgctgtcaatgcggaggactatacgctgaccggctggtacaacaattccagcagcagtgcaggcagacagatcaggatcatcatcgcgacggcgctggaaagttgaccggatcgattccctccatcctatcctgttgacaaggtaaaggccgaaggaccagccgtaatggcttgcccttcggcctttttattcatctgaggctgtgctcagtgccagccgatcgttcaccgtgtcgatctgttttttcacatttccgacaataggggcgccgatgatattgccctcaccgtccacgatgtaggtggtgggatagctgaagatctcagagacaaagtccttgtagaactcgccttccgggtccggggagatgttcacataggtgacgcccttctcctttagaatgttttgggcggtctccagctgctcctctccctcgccggagtcggtgcctacgccgatgagattgatgttccgctcctgaagctggtgatacagctcctccagctccggcatctcctcaatgcaggtgccgcagccgttgttccagaagttgacgatggtggcgtcgtagtctgcgaagatgtcgctgctcaccgggttcccttcggtgtccgcctctgagaactccgggaagggcgttttggataccagggagttgtcctccccggtggaacagccggccagcgcagccagcagcaggaccgatgccaacagcagagaagatccttttttcattatatagtctccttcttgttcgtttgttttttcagagaaaaggtcttggtgatggcctgatgggggcaggcggccacgcagtccccgcagcggatgcactcggcgtggttgggtgtgcggaatacgtccacatccatctgacacacccggctgcacgcaccgcaggaggtgcatttgctttgatctacctccagccgatagaccgagatcttgttgcacaggccgtaaaaggcccccagagggcacagccatttacagaagggccggtagaagaacaccgacagcaccacgacgcccagcagaatacagctcttccaggtgaagagccagcccagactggcccggatgccggtgtcggccagggacagagggattccgccttccaagatcccggcgggacagaggtatttgcagaaaaaggggtcccccattcccacctcgttcaccaccgtcataggcaggacaatgacaaagaggaccaggatcacatatttcaaataggtaaggatatggaaccgctttgtgctgaatttttttgtagggatcttgtggagcagctcctgaaaccagccgaagggacatagaaagccgcataccacccggcccagcaggacgccgatgaacagcagaaaacccactacatagtaggcaaaatggaatttggaggagccgatcacggcctggaccgccccgatgggacaggaggccgccgcagccggacaggagtagcagttcagtccagggacgcagacccccttcagctttccacgagagatattcccctgaaagaagttcagaaagaaggggttggtggccagcgtcgctcccagctggatcttccagcgatgtctgttcttagccaatgcccacacactccatgcacagattgatccccttggagaggacggttcccccctcgccccgccacagaccgaggcccatcatcagcagggctgccagcaggcagagcatggtcatctttctcatgccggctcagcccataggactcatggcagatgctccgctgctgtccggatcggagtttgcgctgtcggcctgcccgctgaccttggcaaaggccgccgcgtcctcgggcagttcttcggcatccagcaccagtgcccaggcggacaggaaggaaccgttcacataccaggaggccgtgtttggcacatccttgtcctccaccatgccgctgttgttccccagcgcctccttgagagagtcgttatagaggatcaccgggaagggggcgtcggcaaactgtccgcgctcatcctcacccttgaggcagagcaccatcccggctcccgcctcctgcacaccgtcccacgccgccgtcattgcgtcataaaatgcgcctgcatcctcactggccggatctacaaaggcaaacaggagcacatgccccagatcctcctgagtaaagggctcaccggacagggtcgttgtagtaaactctcccacccggttgatctcgattttatccacggcgggtaccgtgcgcgcttcccaatagccatccacccacgcctggtccacccagcccttgtcctgagcgtcctctacggtgagtgtcccggcctcgatggcctgctccacttcctccaggctgggcgccttttcgccgcaggcagccagggagagggttagcagtgcggccagccccagagccgccgcccgtttcttcgtccaaaatttcatccataaaacctccttgttctgatggaacaggagggagtatatcaaataccatgtaaatttttcatcaaggcagcctattgcgggaatatactgatatccccttgacaagtaaacgtctgttcactatactgcttaagtgaacagacgtttacttattgggagggtcatggtaatgaatacgaaggagaaaatattggtgactgccttacggctctttgccgtttatggatatgaggcggtatctgtcagccggatcgctggagaattaggcataacgaagggcgccttatataagcactacaaaaacaagagagacatttttaactgtatctttgaatatgtctgtcagttggacgtggagcgttctcgaaaaagcggcgttccggaacaggactactcagatatgccggaagctttttctcatgtactgccaaaaagtttaggcgattatatgaaagcgcaattccattattggagcgaagatgaaattgcttgcaactttcgtaaaatgctgacgcttgaacaatacaagtcttcggaaatgagcgctttatatcaaaaagttcttgtcagcggaccattggagtatattgagcgtttgctttgtgaaatgtcaaagagacaaaagaaacagcttccctcccctcatgcgttggcgatcgagttttattctcccttttatttgttgctcagcatgtccgatggagtagagcgtaaagaaacaaaagaggaaatcgccaaaagctatgagtgttatattgacgattttcttcaaagacatttttcccaaaaactgaaagaagaaaggaaattatagtggagcatttcgttctcataaaaaaatatggattttccgaagtatttttaagtcaaatttcgcaagagaatcatttagaaccagctcgcgttctttcacaggagaaagggttttatcgaattataacggacaaaggagaaaagttggcagaggtgtcaggaaagttccgatttcaagctgtagtttcttccgactatccggctgtcggagactttgtactggtaaattggaacggatccggcagcagcgccatcattgaatcggttctgccccgaaaaggcgcttttgtccgaaaagcagtcggagaaccacaacaggagcagatcgttgctgcgaacattgacactgtatttctgtgcatggcattgaaccatgattttaatctgagacggttggaacgatatatttcgatcgcgtgggacagcggcgccatgccggtcattatcctgacaaaatcggatctatgtgatgatttggaaaacaaactttcagaagtatcttcggttgcttttggaatagatgttctggtcacgacttcaacagaagaaaatggatacaaggaacttcttccattgatttcggagggaaaaacgattgcttttatcggctcttccggcgtggggaaatccaccctgatcaatcgtctattggggaaagaacggctgaaaacaaatgggcttcgcaatgacgataagggcaggcacaccacgactcgcagagaattgttcctcctcccctctggcggcatggtaatcgataccccgggcatgcgtgaattgggaatgtgggacaatgatgacggaattgagagaacctttagggacattgaggagcttgcttctcagtgtaaattccgcaactgtactcacacaaacgagcccggatgtgctattcagaaagcactggaaatgggagaattggacatggaccgctggcaatcttatcggaagttaaaggctgaaaatgattatatggaagataaagagagctacatgattgcaaagggaagacgggaaaaagaaatttcaaagctgattaaaaaaatgccaatcagagtgtaaaaggaggtactgctttatggaagaaaatattgttattagaaatgaaaagaaagaagattgggaaactgtagagaaaatcacaagacaagccttctataatctttatgtgccggggtgtgtggaacactatttggtccacatcatgcgggaacatgaggattttattccggaactggattttgtattggaactggacggacaggtgatcggcaatatcatttatacaaaagcaaaattgatcgatgaaaatggaactgaaaaagaaattttaacatttggtccagttagtatccatccaggttatcagagaatggggtatggaaaaatgcttatggagcattcattccaatcagccatacagtcaggatatgatacgattgttatctttggcagtcctgtcaactatgtcagccgtggattcaaaagctgcaaaaaatataatgtctgtatcgaaagtgggaaataccctgctgcgatgatggtcaaagaactgcgtcctcatgcactggatggtcataaatgggtctatcaggatagtcctgttatggcaatcagtgaggaagaggcggaacgctatgatgctgcattggagcctatggaaaagaagcaccttccaagccaagaagaattttatattatgagtcgttccttcgtggagggatgatgagccgtgtccaagaaccgctcatttgcccttgatgaaaaatttacatttttctgttatcatggtatatcatgcggaggagggctgatgatgcgtattctggtggtcgaggacgaaaagctgctgtgcgatggtattgcggaggatctggaacttgaaaaatacacggtggaacggtgctatgacggcgcggaagcctatgacctgcttctgagcgagtccttcgacctgctgatcctggacctgaatctgcccggcatggacgggctggacctgctgcgggccgttcgcgcggagcagccagagctgcgggtgctgatcctgtcggccagagcggagttatccgaccgggtggcggggctggatctgggggcagacgactatctcacgaaaccctttgccctggaggaactggaggcccgagtccgcagcctgctgcgccgggagtttgtctcccgaaatacggtacttactgtgggtggtctcatgctggacatatccgcccgtgctatctccgccggagaaaggccgctggagctgacgcccagagagtttgccattctggagcacctgatgctccaccgggaccgctgggtcagtcaggaggagctgatggagcatgtgctggagtcggacgccaaccccttcagcaatgtggtccggatgcatatctcctccctgcggaaaaaactgcgggatgctctggggaatgaccccattcagacgaaggtcggtcagggctatcgcctgatggaaaaggaggctctatgaaaccctttcgttccctgcggctgcgtatcaccctcttgtgtgccctgctgctgacgctgtgctgtgccgccctggccgttaccagcaatctgtctgccatccatctgacagacaccatcgccgccgctcccctctcacccgcccttgatccggaggcggccgcgaaagggactatgcctctccttaccacacaggcagctccagtggtccagcaggcccagcagctatttcagatccagagtattctggcctctaccgtaatcctggcaacgggacttctattgatctacctgctggtgggccgggctcttgcgccgctgaaagacctgaatgaccagatccagggccggaccgctaaggatctggatcagcccctgtccatcccggatcgaggggatgaggtaacacaactggcacattcctttgatgacctgtctcagcggctgagccgggcttttttgatgcagcgcagcttctcccaaaatgctgcccacgaatttcgtaccccgctggccgtcctcaagacccggatcggtctgtttcgtaagaaacaagattttgcgccgcagaccacagaggcattcctcagtattatggagagcgaggtggatcgactctccggcatggtggacagccttctgaagctgaccaatctggaacaggtgccccgcagcgaccgaatcaaattgggagaactgctccaccaagctgccgaggatgtttcccctctggccgccaaaaagggcatcgccattttggtggaagcctcccctggcacgatcaccggcagcagagagctgctccgccgggcactgttcaatctggtggaaaatgcggtcaaatacgggccggatggcggacagacacggctctgtgcggagttgaatggagccgatattgtcatcaccgtggccaatcagggaccttgtatcccgccggagttacgggagcggatcttcgagcccttctttcgggcggataccgcccgctcccgggaactggggggtgtcggcctggggctggccctggtccgggccattgcagaaatccacggcggcagcgtatgggtggaggaaaatcaggctggctggaatcgatttttggtccagcttccggcagtatgttcatgagggagaaccatcattccctgctatgctattagcagcgaaactagaaagctttttgcacaatttctgattgtttactgtctgtggttgtcgatgtgttcaataaatgggaacccgttggtcagttccaataggtccccatttctattttataacttgtagtaattgtaaaagatatttccaccatcaggccaccgcaaggcgtgctatgctatagacaatttgaataactttcatttgtttttcgctattttgctccgcttgatttgttttccgccacgctttaactgcaatactttcatgtgttccgagcgtgtctatggcaatttctgtggtcagaaaacggcgtggagctggcccgtttcctgcgggaacgcaaggtcaacgcctccattatttacattacggattatcccggtttcgcgctggacagcttctctgtctccccactagaatatccgctcaagccggtggacgagtggcggctggccgccgctctggactgggcccggcagcaaaagcgcccggtgctgcgtgtgggtggccgtgctatttcctctggacgagatcacctgtctgaatacctcgggccgtaaggctgccatacaaaccagtaggcagattgagcacgccgtctctcttcaaattgaaagaggaattccagaatcaggacttctgcctaagccatttcagctgtctggttaatctgtcccatgtgacacgggtggagtgggataccctgaccccgggaatacaggcgaatccattcccgccagccgccgtattctcccgactttatggcccgctatgtggaatctctgaaataagaactccgccgttccctgaaactgggacggcggagttcttttatgctcgtgtttcagggagcagcagagcagtgctggccgaaaagacatcctcttcggcctccagtacttccgggtggtggcccggtatccccgcccatgtgaaagcctgggtggaggcacttgtaagtctatggcaaggaatgccgaatatgacactgtgaacgagttatcagggcaacaatgatttctccgtgacactggatctggcggtgcgccggaacaaagatgtgattctgatccataccatgagcatcgatgaagacggcacgactgtcgaagttacgttccagtacaacaaaatgagggggacagccagcggcaacctgatcgttatactgctagacatcaacggtcagcctctggaaaagcaacagagctgtacgaagcaggatggcttgctagagctttccaacgagaggagtgccacacagtcctttacctttatgtaaaagggcgtattggtcctggcggagttttctggcttaatcttcgaaggaagcagcacagagttggatcacgtttccttgtctggggcggtcatgacctatgcctcggccaccaagacctatacgacgaccggcgcagggctgaccagcggcgtcccgggaatcagggctaaggaccccaaaaacgcgaagatcacttttgatggcaagtcctatgaagtggctgctcgctccacgcactctctgccttatggtactaccgagtgggaaatcattgtccaaaacagcttgaataccgaaacctacaagctgatactaaacaatgtggacgtcctcccctccagcggcggcggcagttccagtgtcagccacgccattgactcgtctgaggatacggagcatagcactaaactcgacggggcacagcaattctaaagcccaattacctcccaaagcagattctgaatgggggacagctgggcacctttctggaggccattgagcaggacgaggtgtggcgggactttttcaccgagctgaccaccggcctgcgcgggggtatgatctgcgccctccagtgggataacttgaatccgaaaaccggggagctccaagtggagcggcaggtccatcgagtccggggtgagctgatggcctctccacccaaaaccaaggcatggcggacggctgtgctcctccattgccagcggaaagcgcatgactccggcgggacagtcccgccggagccatgattttttctgtctgtggcttgttctgggggcaaatctgtggcagaagcagtttgaaaagaatcaacccatacaaaatctacgacactgaagcatagaagtgaacattaaacgctttgcaaattatcaatatctcttgtatctactcctgactgattcatgatattctttggctccgattctgaaatttgtcaaaagcagagatattggatgtaacacaccacacccaataaatcacaattctcagtctacaacggacattaagcattcaattgaaggacataatcggtggcatcagcaatcccatagccattatgttcctcaattgcttgacgggtatattcaaaatcttgatttcgaatacctaatacaatgcgattgtgtacaagcttggacttttcagcgcgaaagctgtctatctcgtcggttttcccatgatgaatgatgtttgccagcaaaacccgctgtccatgattttgcaaatagatatcgtatagcctctgattttcggcgagctccatcatgtaacgcttgaactcttcatccttttccataggaaaaacctcactagcctttttctctaagatattaagctcttcctccagcctaggtgaggggttttccctaaggcggcgaataattctagcggcagcctccgtctcgatcattcctgaaatactgaagatttcgtcaatatctttgagcgtcggcgcaaacacataaaaaccacgggaggatgtgttggtcaacaatccctcttttgtaaggcggcgcatcgcatcccgaatcggtgtccggctgatttgaaaaattgttgccagctgggaatctactaatcgctgaccaggtgcaaactctcggctgatgattctctttttgatttcttcataggccaagtcgttcaggttgacactctccaaaatcactgagtccatttgaccgcctcatttcgtatacaaaatacttttttaattatatctatttttatgtggaaatgcaagcttattttccaaattgattaagttgatttgtcttctcatttctatttttacatttcccccaaatttaaacgcctataattgggggtttctataaatattttttatttgctttttaaatcttgactctttcagatttgtattttatatattgtatacgaagtacaaaatcacagcatgaattgaggcgccatttctatttgaggaggataatcatgaaacaaaacccattaaagcgtgtcatcgcatggctagaccttcatctggaagaaactatcctgatcatcacaggcagcctgatcggcatcgtcattatgatgcaaatcatcatgcgctacgtctttcgccacgccttgccttggccagaagagttctgtcggttctgctacatctacttttgtttcataagcctgggatacgcggtgcgaaatcgctgtctgttaaatatcactctattgcaggaccatctcccccgcgttctccgtatggcgttggatatcctcattcaagtatccatgctgatcgtgtttatcatattctttgggggcagcatcgattgtgtgaaagccaccatcatttccggccagcgttcccccgcactgcagatccccatgactatcccttatctggccacatccattggctttttcctcgcaatcatccgttctgtccagtcctccttccagtcaatcaagcttctactcaccggtggagacattaaggtcgatgccatgacggcggtggaggaggagttggatgaggcttctcagcagctgttccgaaatcaaaaagggggtaattaaatggctggtttagtatttttgatcttttttgttttactggcattggggtatcccattattatgtgcatgattggcggcgcaatcactccactggctatggatgcagttggggccaccagtatagcagctttgatccgcggcgcattcagtggtgcaaactctcccaatattctctgtttgcctctctttatttttgcaggcgttctcatggcagagggcggcatttctaaaaagctgtttgatgtatttgcatactttgtgggcaataaaactggtggaatgccctgtgccgtcattatcacctgcttgttctatggcgcgatctccagctctggcgctgccactgccgctgcaatcggtgccatgactatcccactgctcattgaattgggctatgacgccaaattcgctgctgctactgtggcggtatccggtggtttaggtgtcatcatccctcccagcggcccctttatgatgtatggcatggctaccgagacctccatcggtgcactgtttatggccggcattctgcccggcatcctagttgcttgtctgctgatgttctatgccgtcacatactgtaaaatccatggcgaggacaaggcaaagattcaatccaactatcaaaaaattgccgctgccggctttctgcccctgctcaaggacagtttttgggctctgctctcccctgttataatcctgggcggaatttatgccggcattgttactcctaccgaagccgctgctgtatcggtgttctatgcgctctttgtcagcctgtttatctacaaaacagtctccttccaaaagctccctgaattactgcgctctgccgtcaaatctgcggcccctatttgtttcctgctggcctttgctactgctttcggccgcacactatccctgattcatgccgctgatattgtacaaaatgccatcatgaccatcgccactgacaagatctctttcctgattgtagttatcatcgcttttttcctgctaggcatggtgatggataccggccctgcccttatcatcctcggtcccattctttgtcccattgcagagagttatggcattgaccccgtccatctgggtgttctgatggtctgcaacctggctgtaggtctggtcactcctccctttggcctgaacctgtttgtcactagttctatctctggcgaacagcccatgactatcggcaagtccgccatcccctacataggtgtatttgtcatcgcactgttcattattgcctttgtgccgcagtttagcatgttgctggtcaaataaattttaggaggaaaaataattatgaaaaagtttctcgctttggcactcagctttgctctgactctgcccctggccgcctgcggcggcaatcccggtaatgcttctgctcctccgtctggttcctctaatacccaagacagcattcagatttcctatgcacatatgggggctgaaagctccatggtaggggcatggggtatcctgttcaaagagaaggtagaggctgcttctgatggcaagatcactgtaaatatcttctcgaatggcgagatgggctccgatgttgaggccattgaatctgttctggataatactattcagatcgctgccatgcagccttctccctgtgtcgcttttgtccccgagttgggtgtttttgatctgccctgtgccttctccacctccactgccgaggagatcaacgaggtgctgaaccagagcgatttcaagacaaagctggacggttacttcgccaatgccggcctgaaatgcctcggctttacccaaggtgcctcttttcgtcagttctcttctaataaaaagctgacttccatcgaagacttcaaaggactgaacatgcgggttatggacaaccaataccagatcaaattctggagtgatatgggctgcaacacgactcctgtccctggcagcgaactgtatatgtctctccagaacgggctggtagactcccaggagaacgccttggacaccgttgttgtgggcggaatgcacgaagttcaggactatatcaccctaactaaccacactctgtacaccaatatgatggtcatgagtgagagctacttcaacagccttcctgccgcctatcaggagatcattgaaaacgccgtcgctgaaacaactgttgagatgatccctgtctatcaggaggctgatcagaccgcttatgatacactgatcgaaagcggcatggagatcaacgaactgagtgctgaggatatggctgccatgcgtgagatcgctcagcccgtctatgatatggtacgcagcgagatcggagacgaggctgtggatgccttggtttctgtcatccagtaaatgggcaggcgaatataatggctatacgtgaaactgatgtcctttgtggacatatccgtggaatagcggctggtaatcctgcggttactgcatttaaaggcattccctatgcggaggctcccactggaaataatcggtggaggccccccatacccaaaaagccttggtccggaaccttcgatgcggtccgctttggaaatatctgtccccaagtaatccctcagccaggcaccttctatcataaggaattcttctcctatcagcatctggagactcaccacgaagactgtctccaactcaatatttggactcccgcagactcaaagagcgataatctccccgtgctggtatttatccacggcggcggttttcagaccaattacagcttcgctccccaatttgacggtgaactgatggccgcccaaggcatcgtagtagtaacgatcaactatcggcttggactctttggatttcttgcgcacccagatctgcgggacgagtctcctcatggactagccggaaactatggtcttcaggaccagatattggctcttcgctgggtgcgtgaaaacattgcctcttttggcgggaatccagaacagatcactatctcaggcggttctgctggcgcatccagcgtactcatgttgtctgcatgtccactagtcaaaggatggtttcaaggcgccatcatgcagagcggtcctcttctagaaagaaatttttcacagtcggaggccgaaaatatggggaaagccctgctggagcgatacggcttgtactctatcgaagatgcccgcaaggtagatgcttctatcctctgccagtatggtcccgacctggatcgcggtgagtctccatttatccagccttgcatagacggggttattctgcctgaaggggtcagagattccctccaaaacggccatcttcatgatatctgctacatggtaggatgtaccaacaaagaggcatggtccatgcgaaaccgcttccatgccaccagcgaagaaattgcccataagctggaacatgcttatggccactattccgaagcatatcaaagggtcgtaaaatattcaacagacgaagaaatttacgattttcaactcaatcatggatttaccgaggacatgttagcttattgcgctgcattctgccggatgcaaagtctccatggcagaagcccggtctacttctatcgtctggaacgggaattgcctggcgacgatgccggcgcattccacgcatcggaacattggtatgtgttccgtaccttagaccactgctggcgtccttttgacggaaatgattatcagttggcaaaagctgtcagcaattactgggctaattttatcaaaaatggtgatccgaacggaggtacgctaccagtatggacgccctatgaccgtacctcaccagcatatatggcgctggatgttcagtcacatatgcagccacaggttaccaatgaagcagttgacctccgggtcaaatactattgtggtgaatagctgcaggtcgatgtgatcacacacctattcaactccacctcgaagcctcatacatatggtattttcaaacccacaacatgggctgtatatcgtagaagctgcatatccgccatcaagcggggtcaacacattgcatatccaagaagcccgcaggtcacgcaaagacctgcgggctttctgtatctcagcatggagatggtaaaggtaggtggtgtgagctgtttccctaggtttcagaaatggcgcgttgggaaccgataggaggtgggccgcggagcgcagccggtcagcgaggcaggtcctcccagcctatcagcccataggcggaaccggcggactggaccgcccgcaggatggcccgctccatggccagggcggccatggcccccaccacattgatgtcccccgggacatcccccagggagagggcatagatgctgtccccgtctgcggtggtatggaccggccggatagccctggcgtagccgttatgggccatgccggcaagcttggtcaagggcgttttatcaaacttcccgttggtgaccaccacgcctagggtggtattgcccgcaaacagattttccgccggggcgatgtctgcaaacatctcctccaaggtgcaggacaggctcgtcctcttctcattaagcaggccggccgccgggcgtccgtcgggaccgtacacgtcccccagggcgttcaccgccaccagcgcccccaccttcagaggtccggtctggagcgcataggtaccgaagcccgacttcatcgcccggcccatcccccggtatttcccgatggagcagcccgtacccgcccctacattgccctcagcgggggcagagcgccccgcattctcacaggcctggtaggccatctcggcggtaggccgtacctccttgctgcccacccccaggtcgaagaggcaggactggctcaccagtggtaccttggtcacccccacgtcaaagccgatgtcccgctcctccagataccgctggacacccccggcagcgtccagcccgaaggcgctgccgccggagagcagcactgcgttgatcccctgggcggcagccaccggggccaagatctgtgactcccgggaagcggggccccctcctcggacatccagcccggcggagctcatccggtcgcacaggatcaccgtgcagccggtagccgcctccagatcctgggcgtggcccacctggaaaccgcccacctccatgatcccgatctctctcatcatatctctccccttcactccttcagcacgacccgcagggccttgcacaccgagccgctgatgacgcagcccactgcggcctcgatcacggcctgaatgcccacataggcggcggcaaacagtaaaatgttgtcctggaacttggccatcagctcctcgcccagcaggacctggagcgtgggggcgttcaggaagatcaggatcagcaccgtcatatagaacagggtgttcagcaccggcgccgccagccccccgatgtaataggaaatggtgttccccctgtccagcctgcgggcggcccggtagacccagcccacgcacacccccatcaggacacgggggatgatgctattcacaaagctcagcaccaccaccacacctccggtatagccggccaggaacagggtgctgaacccggtcttgatggcggtgtagaagctgatgcagcccatcacgccccccaggacgcccccagccagcggacccagcatcatagcgcccacggccactggtaccgtcataatggacgcgtactgtccgggcagcgggatcatggccaatcctgtgatgttcatcatcagcaggatccccaccaacagagccaattccatcagatacgtgagacttgtttttgcccttaccatattcaattcctcctgctgccgctccgccatctgcggatgcagcgcaattttgggggcgcccccatccgggaaaacaccctgacacaaaagtcaaaggcattatactctaattttccctctttttcaaggcaaaatcagccggggcgccggaccggaggaccagaaaagccccgacggtcctgcgccgcaggaccgtcggggcggacgccgatctcccgtcagcggcccagccggcttttgaaggcgttgtagccgtgggcggtcagctgctccagacccccggcgctgtccagcttccagagattggggagaggcatgccgttgaaggtattgtttttacaggtggtataaatggccatgtcgccgagcaggaccaggtcgccctcctgaaggggccggtcaaagtcgtagtccccgatcacgtccccggccagacaggtggggccggccaggcggaacatatggccctcccctggctcggtactggcccccaggatggggggctggtagggcatttccagcacgtcgggcatgtggcaggcggcgctgacgtccaagatggcgatcctgacaccgccgttttccaccacgtccagcacccggctggccaaatatccggcattcagggccactgcctccccaggttccaggtagacatttaccccccaggactgctgggcgtgacggatacagtcctccagggtgcccaaatcatagtccgggcgggtgatgtggtgcccgccccccatattgatccatttcatttcgggcagaatgtccccgaacttctcctccaccgccgctaaggtggttttcaaatcgtcggagttctgctcgcacagggtgtggaagtgaatgccgtccagcagggacagggtggcctcgtccatctcctggtcccacacgttccgggtcacccccatgcggctgccaggggcgcaggggtcgtagatggcgtggccctcctgggtggagcactccggattcacccgcagtcccaggcttttgcccgcctgcttgccccggggcccgaaggccttcagctggtggatggagttaaagacgatgtggtcggcgtattgcaggagctcctgaaactcgtcctcccggtaggccccgcagaacacgtggacctccccctggggcatctcctccttgcccagccgggcctcatagaggccgctggcctcggtgcccgccaggtaccgggacaggagggggtagaaatcgtagttggagaaagccttctgggccagcagcacccggcagccagtacgctccgccagagcggcgagcacttctccgtttttccgcagccgctcctcgtcgatgacgtaggccggggtgggcagctgggcaaacagggcccgggggtcgtagtttgccaggcccgcaaactggggatcttgtaaggtcttatatcccatcagtccaccagcacggggtcgtggtcttcgctgcggggcaggccgtacttgtccagggcgtctaggaagggatcgggatcaaactcctccacggtgtgcacgcccttctgggtccacttaccagtgagcagcatgagggcgccgcacatggcgggcacgccggtggtgtagctgatggcctggctggccacctcccgatagcactcctggtggtcgcacacgttgtagatgtagtaggtcttttcccggccgtccttcttgccggtgaagatgcagccgatgttggtcttgccgtgagtgcggggccccaggctggcggggtctggaagcagggccttcaggaacttgatgggcacgatctgctgtccctcgaactccactggggtggtggacagcatgcccacgttctccagacacttcatgtgggtgaggtagctctggccgaaggtcatgaagaagcggatacggcgtacctcggggatgttctcggccagagactcgatctcctcgtggtggagcaggtacatgtccttctcgcccacctggtcgaagttgtactcccgcttgatgctcatggcggggatctccacccagcggccgtcctcccaatagctgccgggggccgagacctcccgcaggttcacctcggggttgaagttagtggcgaaggggtagccgtggtcgccgccgttacagtccaggatgtcgatggtgtcgatggtgtcgaactcgtgcttcttggcgtaggcgcagtaggcctgagtcacgccgggatcaaagccgcagcccagcaaggcggtgagtccggccttctcgaacttctcccggtaggcccactgccaggtgtagtcgaagtaggcagagaatcccttctccttgcagcgcttctcataggcggccttccactccggctcctcaatgtcctcgggctcgtagttggcggtgtccatgtaattgacgccgcactccaggcaggcgtccatgatggtcagatcctggtagggcagggcgatgttcatcaccaggtcgggctggcagctcttaatgagggcgaccacttcttccaccttgtcggcgtccacctgggcagtggtgatcttggtggcagtcttgcccgccagctcggcggccagcttgtcacacttggacttggtgcggctggcgatgcacagttcggtaaacacatcgctgacctggcagcacttgcggatggccacgttagccacgccgccgcagccgatcactaatactctgctcataatcacttctcctttgttcttctcattttatacgccccggtcccctccaggggccagatattgtgttttttattgggacagggccagcagcagctccctcagcaccttgcaggcggcggcggtggacacgccgctctgatccagcatgggggccagctcgttcacatccgcccccaccacgttggttttggccaccatctgaatggcctccagcagctgggggaaggtgacgccgcccgcctcgggggtgccggttccggggaaggcggaggggtccaggcagtccaggtcgatggtgagatagaccggggcccggctggcctccagggtctggaccagctcctccaggccgtcaaaggtgaaggggtgcaggtccgtgtgctccctggcgaagcggaactcctcccgttccccgctgcggataccgaactggtggatgcgcccgtctcccagcaggtcgtggcagcggcggatgacgcaggcatggctgagtttcgcgcccaggtagtcgtcccgcaggtcggcatgggcgtcaaagtggatgatatgtacgtcgggccagcgccgctggatggcccggaagctgcccagggtcaccagatgctcgcccccaagcagcacaggcagcttgcctgcggccagaatctcctccgcccggctctcaatgtccagcagcgccagctccgcgctgccaaagcacagctccagatcaccgctgtcgaagatgcgatagtcggtcaggtccttgtcctggtaagggctgtacgtctccaggccgaagctctcatggcgcatggcggaggggccgaaccgggcgccgggacggaagctggtagtggagtcgaaaggggcgccgaacagaacgatgcgcgctttctcaaagctgctgtcgcagccgataaaggtctcgatattgggatccatcttcactctacctccttcagcatctcttccaaaaacgccggcaggcagaaggcccccacatgcaggcggacggtgtaatactgcgtcttcaaatggagccccagccacttgtcccggtcgaagtcatccaccgggtgatacttcttgctggcaaagccgaacagccagtagccggcggcataggtggggatatgggcctgatacacccggctgatggggaaagtgctgacgatgcgcttgtggctgcgctgcatggcctccgcgtcgtggcggtagaaggggctgccctgctgattgaccataatgccgtcatcccggagggcgttgtagcagatgccgtagaactcccgggtaaagtagccctccgaggggccgaaggggtcagtggagtccacgatgatcaggtcatactgggcgtggcggcggcggatgaaccgcagggcgttgtcgaagtagatgtgcacccgggagtcatccaggcggcaggcgttctccggcagatagcgccggcaggcctccaccacctgctcgtccatctccaccaggtcgatggaccggatgcactcgtaccgggccagctccttcaccacgccgccgtcccccgcaccgatgaccagcacgtcctgcacatgggggtggacggccataggcacgtgggtaatcatctcgtcatagatgaactcgtcccgctcagtgagcatcacattgccgtccagggccaggaccttgccgaactctggggtgtcgtagatgtcgatctgctggtactcgctccggtgggagtagaggtgccggtccacccgcatgctgtgcttcacgtcgggggtatgaaattcgctgaaccagagttccatttaccgcgcctcctgtgtgagtatgttgatctcctcgatctccgggtcctcgggtccggtcatagagcaacccttctccttggcgtagcggatgtagtccaggatctccgccgtgatccgctccccaggggccaggatggggatgccggggggatagcacataacgaattcgctgcacacctgtcccacactgtcctccaggcggacgctgcgcttgtccgcgtagaatgcctcctgggggctggtgaccacctcgggggcgatgtattcctggttcatcaggccgctgccgtcggtttgatagcggcggcggatctccgccagggcgctgaccagccgctccagctcctggggccggtccccgatggacagataggccaggatgttgccgatatccccgaactcgatctggatgtcgtactcgtcccggagcaggtcgtagacctcgatgccggccagacccacgtcccgggtgtggacgctgagcttggtggggtcgaagtcgaagatggagtcgccgttgatgagctcccggccgaaggcgtagtacccgcccacagcgttgatctcctcccgggcgtactccgccatggcgcacacctggcgaaagacctcccggccgcggagggccaggttgcggcggctgatatccaggctggacatcagcagatagctgcccgaggtggtctgagtcaggttgatgatcttccgcacatgcccctcgtggatgccggggccgatgagcaggaggctggactgggtcaggctcccgccgctcttgtgcatggacacggaggccatgtccgccccggcttccatcgctgacaccggcatgtgatccccgaagtagaagtgggtgccgtgggcctcgtccgctaggcagtacatgcccgcctcgtgggccatttccacgatggcccgcaggtcgctgcaaatgccgtagtaggtggggttgttcaccagcaccgccacagcgtctgggttctcccggatagcacgggccacctgctcccgcttcatgcccagggagatgcccaggcgcgggtccacctccgggttgacatagacagggatggcaccgcaaagcaccagggcgttgatgacgctgcggtggacattccggggcatgatgatcttgtccccccgcttgcaggtggacagcaccatgctctgcaccgagctggtggtgccccccaccatcagaaaggcgtgggccgcgccgaaggcgtcggcggccagctcctccgcctcccggatgacagagatggggtggcacaggttgtccaggggtttcatgctgttcacgtcgatgctgacacactgctcccccaggaagcgggtcagctccgggttgccccggccccgcttgtgcccgggcacatcgaagggaacgacccgcatctgccggaaggtctggagcgcctcgtagatcggggccttgttctggtccagggtatgttcttctttcatctgccaacacctcgaagcacaaaaaaacacaagctgcatttgaacagcttgtgtttggatcaatttgtacacgataagctccaagtcccctgtccggccgcgatggcggacaaacgcctgcaaataacagctgggggcgggagatatgtctggtactgagagtctatatagcaacaagatacttttaccactctgttattgaccgtttcacaagtctgcgcaaacacgcatctggttatgaagtaaccaacttataaaatttgagcttttaactcaatcaataagggcggtgacccgcccatcggcaatggacccggctgtccgtatggccttgactcccggaggagtggtcccagtattcttggccagataaactccagtcagattgctacaaaatatagcatagaacttccgatatgtcaatcgtttttcccgggatatttggagggcaaagggcgggacgccctttgcccctcctcccgcgcctccccgcgctccgccaatgtgccggcctctgactctccgtacacttggaccccgtgttcctccagcaggcgggcggtcacaccggagccctcagtcagcctgccggtgaagctgccgtcatagatctgccccctgccgcaggaggggctcctctccttcagcaccgccagggtgcacctatgggcccgggccagctccagcacctcttcggctccgaggcggtacgcctccgtcacgtcctttcccgcccggtccaccacccggccgtctctctggagctccgccggcgggcggggcgtgggcaggccgcccatcacctccgggcacacggggatcagccggtgccccagcacctccagccgcgccagctccccgcagggcctggaggccccgtcgtaccggcagggagtccccagcaggcaggcactgaccaaaatatccacctgtctctccccttccccaacatcagaaaagggcccgctgcgccttgcagcgggccctcgatctgctgtcaatgggtcaaataatatttcaccaaagtctggagcagctcatcccggtccacttttcggatcagcgccctggcgttattgtggttggtgatataggtgggatcttctgagaggatatagcccacgatctgattgactgggttatagcccttctcctgaagcgcctgatacaccgtagtcaagatcgccttgatctccagatcccgctgatcgcccagccggaacttccgagtgaaatccatctcatccatcgaacacacctcctgcagcgttgaagtggaacacttgtgcttagtttactccaaaaaggaggcggtgtaaagggtatggggcaaaattttaagaaaaatttaggactcctccggttcctgccggcccttctgctccgccgacacccactccacccgcaggaagcagcacagcaggtacacagcggccaccagaagggcggccaccgccagctcctcgctgggctggccgaagcgcagataatactgggtggacatctctgccttttcctccatcagcctgccggaaaacagggaatagacctggggataggccagcatcccccggaaccccaggcaagccagcatcatggccaggaccgggagcagcatcccccaatgcctccgcttcaggcaggggagcagagccagcacccctgccatcgtccagaccgccagatagagttcctgctggtgctggtaccagaatctcggcaggagagtctgccggtagagataccagaacccggccaggacgatggggcacagagcgggcatggccttgctccaggcgaagggggcccgggccagccggggatgcccccgcaggtcgggcagccgcaccgggagatcccctctctcccccgccagccgccgggcagccagctgagtcagaacggtgaggccgcaggcgcccgccagccataggggccccagaacaaggaccagctgaagcagcgcgccggcatcccctctcagcagttggaaaatcatgttcttccactggctcagaactgtgggaaaaagcacctgaaacaccacgccccccagttcttccgccagggtccaactgacgcaaaagcacatggcccagctgcccaggcggaaccagcgggcgtgataggtgtagtgagcctggagatagatgccgtaggccagacagcccagatagagggcccagcacaccggcacggggacgaacctccgcagtaaataaaaggccagtcctccgccgatggcgaaggcaaaggagagcagattctgccagtcgcttttctgcaatgtggggacaggggcacctgggtccagcagggcatccaccgtcacatccagtgcccgggccagagagagcagggtagggacatccgggtagctcccgctctcccaccgggagactgatttgttggacacgccgatgcgatcggccagctcctgctgggtgagcccccgctcccggcggtaccgtttcagccgctgggcaaattccagttcatccatggtgtctcctcctgtgatcctttcttgcctctatcataccggaaaaacgttcccgccgccaccccggagggtgagaatctgctctcgcgggacaggaatttgttcccggaagtggaaaatcaggtctcaggccgcagggggcacataggatgcgtcccctgcaagatgttgtaaacctccggctcacagcactgtgcattgccgaccggctcagctgtctgtacaggtctcgcgatctcgtccatcactctttctttccgggatcacaaataaaaggatcaaatgccaataggaataatataaaaacagacaacatatcccatacatcaggtacaggatcgcccgccctgctgccgtctctggcttcgtactgctttatggttacatcgggcataaaaagcgggggcgaaactaagtttcgcccccgccaaaacttttctgcgggaaaacgcttgtacgcgctgcgcgccccgtctgccacggggcggcctcagcgcagtaccgcgcccagctccttttccagagtttccaaaatcgctttcacatcggcgtccgcctcttcggcggtcaggctgcggtcgtcagcccggaggaccaggttgaaggccacagacttcttgccctcggccacgcccttgccccgatagatgtcgaacagggtgacctccttcagcagtcccttcgccccccgacggatgcagtcctccaaggctcccacggtgaccgcttcgccgcacaccacagcgatatcccgggtgacggcagggaacttgggcaggggcacgtactggggatcggggccctgcccgcacatcagctggtcaaagtccagctcggcgcagtagaactctgcgtccacgccgtagttctgggccaccagggggtggatctgaccaaacacgcccacctcctggccgttgaccagcacctgggcacagcggcctgggtggtaggagggattggggatctgaggggcctcaaaggtgacgtccgccgcccggatctctcccaggatggcctccaccgcccccttcagggcaaagaagtccattccttcgccgtaagcgcccagagagagcaccttcttctccaccgccaggccgtcggccccgccagggagatagatgcggcccacctcatacagcttggcgcacttgttgcggaagttgtagttccgggtcaggatctccagcatggaggggagcaccgtggtgcgcatgatggaggtatcctcccccagagggttgaggatcttgaaggactggcggcggggatcgtccgaagcccagcggatcttgtcgtagtaggtgggggaaatgaaggagtaggtgatgatctcgtcatagccgcatgcacggcacaccgcccccaaggcgcgctccagctcctgctcaggggagtagccgccccgggtggtctggccccgcatgagggtgatggggatgttgttgtagccgtggaaccgggccacctcctcggccagatcggccatggcctccacgtcggaacgccaggagggcacggtgacctggtctccctccacctggaagtccagcttcttcaggatggacaccatctcctcggcggcgatgtcggtgcccagcagggcgttgatcttctccggctccagcttgagcacccggggctgagggacgtagttgaggatgtcgatgacgccgtccaccacctcgccggcccccagcagctccaccagctcacaggcccgctccacggcggggagggtgttcagggggtccaggcccttctcatacttggcgctggcctcggtgcgcatgcccagggccagggcggtgcggcggatggtggtgccgccgaagttggcggactcaaagaccacgtccgcggtgtcggagacgatctcgctgttcaggccgcccataatgcccgccagacccacggcccggtgctcatcggcaatgaccagcatattgggattgagcttgcgcacgcttccgtccagggtggtgagctcctcgccctcctccgcccggcggaccacgatcttgccgcccttcacatagcggtagtcgaaggcatgcatgggctggccgtactccagcatgacgtagttggtgatgtccacgatgttgttgatggggcgcacgcccatggcccgcagccgctcccgcatccactttggggagggagcgatcttcacgttgcgcaccattcgggcggtgtatcgggggcacaggtcggccgccggggtctccacatccagcagctccggcaacacgccggggccgccgcccttcaccaccggctggtggagggccaggggtgcgtcaaaggtggcggaggcctcccgggccaggccgatgatggagaggcagtcggggcggttgggggtgatctcgaactccaccacgtggtcgtccaggcccaccaccggcttcaggtcgtccccgggtttacagtcctcgtgaaggatgaagatgccgtcggggatgcagtgggggaactccgcctgctgggcgtggaggtcatccagggtgcagacggcccctcgcttggtgtcataggccaccaggtcgccgttgtggagattggcacaggtggtggtgactgtcacggacagggcctcctggccggcccagaacaggcggcaggtccagccggcctctccggcgggctctactccctccaccagggcagctatcaccggcccataaatcttgtcccccggctggatgtccgcggagatagagggcttgtccttatccaggggcttgtagtcccccaggatggcggcaggagtgatgacggcgtaggggaagtcccgggtgtccaggcccagctcactcaggccgcacagcatgccgttggacaccacgccccgcagcttgcccttttcgatcttcttgcccccaggcagggtggacttgtgcatggccacaggcaccaggtcgtctatgtggacgttccaggccccggtgacgatctgcaccggctcctcccggcccacgtcgatctggcacacccacatgtggtcgctgtccgggtggtgctccatggacagcaccttgcccaccaccacgttctggatctcggcacccaggtcgtgggtcagctccaccttggagccggacagggtcatggactccgcaaactctttatcatcggcctcaacgctcacaaactcgctgagccacttgcgagatagattcatagtataaaactccctttgtttgaattaggaatgaggagttaggaattaggaattgtggtgtccggttttgtcggaatatttggaattgagctgcggaagaaaccgcttcaatttctaactcctaatttctaattcctaattgatttttagagcaatcagaattgctctaaaaatctaacgtcgttctcgaaaatcagccgcaggtcagcgatcttgaagcggcgcatggcggtgcgctccagccccatgccgaaggcccagccggagtagacctccgggtcgatgcccgccattttcagcaccttggggtggaccatgccggcacccagcagctcgatccagccctcccccttgcaggtgggacagcccacgccgccgcacttgtgacactgcacgtccatctcgcaggaaggctcggtgaaggggaagtggtgaggacggaagcgggtcttggtgcccttgccgtaaagctgctccaccaccgtgttcagggtgcccttcagatcggccatggtgacccccttgtcgatgaccatgccctccacctggtggaacatgggggagtgggtcgcatccacctcatccttacggtacacccggccgggggcgatgatgcggataggcagttccatagtctccatggcccgcacctgcatggggctggtctgggagcggagcatcacccggctgtcctcgtcaaagtagaaggtgtccgaccagtcacgggaggggtgtccctcctccgcattgagcttgtcgaagttgtactcggccagctccacctccgggccgtccagcacggtgaagcccatgccgatgaagatgtccttgatctcatccagggccaggtacatggggtgcttgtgtcccagcttcacctcgcggccggggatggtcacatccacagcctcgtccttcaggcgctgctccagggcctgggcctccagcttaccggaggcggcctcaatggccgcctccagagcggagcggacctcgttggccagctggcccatggcggggcgctcctcggcagacagcttgcccatcattttcagaacggcggtgagctcacccttcttgcccagatactggacgcgcaggctgtccaactcggcggcggactgggcctgcccaaaggcggccagcgcctccgaacggatctttgctaactgttctttcatctgtgttcttcctttcagaggtaaattgatcggacgggggcggacagcaaaaaagccttccgccccaaacctgttgggacgaaaggcaacccttccgcggtaccacccgtattcgtgtcagacacgcacttgaacttcccgataacggcggaacagccgtccccctctcaggggccgctcccgggcgaaccaaacgacacgcttcagggcggctttcagccggtgaccacccctctctgagaaacgaaagcacgttattttcccgctcttcgcatttgtactaaaggtatatataccacaaatcttcttgtattgcaagtccccggagactataatagaggcgaggccagcaaaaaaggaggtcttctccatgaaacggctcttcacggccgctctctcggcggccctgctcctgtccctcgcccttccctccgccgccgccgggaccggccgggcagtggactgggccctgtacaccgacatcaccgcccagatcaacggccaccctctgcgctcctacaatgtgaatggcagcaccgccgtggtggcggaggacctgcgcggatatggcttccaggtcctctgggatgcagaggaccgcaccctttccgtggagcgggccgcggacagcacaggctgccctgccctcccggcgtcctggccggactacacgccgcccgccctcacccagccggtggggacccgggcacagcccatcctgtccacggacattgacacctatgtggccgggcagtatgtcaggagctgcaacatcggcggcgagaccctgatctggttctccgacctggctccttacggtgccgttgccttcgacgaggacagccgcaccgccgagctgaccctcggcgatcccatgcagatccagttggatgatctgatccagcgcatggaggatgtaaaagagtttatcaatgtggaatatcagctgtatccctcggcttccgggacgctatttgccggctcgatgggcggcgttccccacgggagcagtttccaactatattttgtgagaaacaacggaacaaaactcgatatcatcagtcttcttcccgcctatatgggtgggtctcactctttcgcccgttatcgggacatcgaactggatgatgccggaactgtattgacctttatttccccggtgaaggagacaataaactgggctaccggcgaaaccaaggactggggagataccctctgtacaatcgatctggtcagcggcaccatgcggtccatgcatcccctgtcccagacgctggcccagtggtccgcctattatgaagcagagacctggccggaaggatttctcccgcccacgcctcccctgtctgacggcagtgtatccctgaccctgagccggcccgaggggacagccgaagtggtctgtctggatggttcccttccttcctacttcatgtccatcaccgtcagccaggacggcatcgccgttgtccatgagcaggggttgttcagtcaagactttttcggcaccccctatgggctcctctatcagaagctgttggacctggaactcccctccgtctttcaagatgattctgatttggaggcatcgccggagcagatggctcaggccgctcagtggctccaggccgccaagaatggggagcccattccaggcaatctctggtggagcggcggcaatggacaccgggatctggtctttgactttgatcagcctgtcactctggagaacggagacattcttacctttcatatgggtctgccggaatgaccggcctcttctccccaccaagcaaaaacgcgctgcccgctgggcagcgcgttttgttttttatccccgggccacggcctcggccacccggatgccgtccacggcggcggagacgatcccgccggcgtagcccgccccctcgccgcaggggtacaggccccgcagggcggactggaaggtctcgtcccgcaggatgcgcaccggcgaggaggaccgggtctccactccagtgagcaccccgtccggcgcggcgaagccccggagcttccggtccatcaggggcagggctccccgcagcgtatccgccaccgccccgggcaggcaccggtccagctccgtccaggtcactcctgggcggtaggtgggccggatggcacccggtccctgggagggccgcttcttcaaaaagtcctccacccgctgggcaggagccaggaagccgccaccccccgcctggaatgccgcccgctcccactcctcctggaagcgcaccccggccagcggtccggcaccggcggggaagtcctccggccccacccccacgagaaagccgccgttgatgttcttcccatcccgggcccggaagctcatgccgttggtcaccacctgtccctgggcggaggaggcggccaccacctcccccccggggcacacgcagaaggtgaaggcggaccggcccgtgggcaggtggcaggccagcttataatcggagggcgggagctgtttccatgccggaccgtactgccgggcgctgatctcccgctgaaggtgctcgatgcgcacccccacggcaaagggcttctgctccattggcacccccgcctgatggagcatggcaaaggtgtcccgggcggagtgtcccggggccagcaccagggtgtcggctttcagaagatagcccccctggggccccgccacccgcagccccgtcagggcgtccccctgtatggtcagcccctccagccggtggccgaagcgcacatcgcagcccagggcaatgagctcctgccggatgtgcttcaccacctgccgcagcacgtcggtacccacatggggcttatgggaatacttcacgtcggcgggggctcccgcctccaccagcgtatccagcacagcggcgatgcgggggtcatgggtgccggtggtcagctttccgtcggaaaaagtgccagcccctccctctccgaactggacgttggagccctcgtccagggccccggcggtccagaagcggtccacgtcccgggtccgctggtccacgtcctggccccgctccagcacgacacagggaaagccgttccgggccaggaacagagccgcaaacaggcccgccgggcccatgcctaccaccaccgggggcagggcggagcgccgtcccgctgccggaaaggcgtatgcctgccgctccgtccgggacacgttccgccccggcgcgttttccaccagccgctcctcctggggcatggacagctccaccgtatagacatagtggacctcgctcctgttccgggcgtcgatggactgccggacgatctccagctctcccagctgccccggccggagccccagggcccgggccgcccgcttgcgcagctgctccaaatctccgtctaccggaagggacaggttactgatccggatcataaggtcccaccctttcttctcccggggcagggccccgtttcgcggtgtgattgtaccacagcttctcctcccgtgcaagggcaccgcctgcttttgccattttgcccggtctgtccggagggctttctgccctcttttttctctttcgatgctctcagtgtacagagggtatgctttcccaatacctgcaaataatgaatgtaggccttcggcctgttttgtcactgatttcccccctgctccccgcccacctatgctattcttgtaacacgttcctgcaaaaacgacatttttcgacaaaaggagaggatcatcttatggcaaggaaacgagtggaacgcaacatttcctttgatgacgtgcgaaaggtatattatgtcagcatggatctgggcaagaacagcgaggggaagcgggtcaagcagtaccgcaccttccccaacctgacctccgcccggacgggcctgcgggagttttacgccgatcgggacaagctcctccacccgcccaagcaggagcagaccctgcgccagtggctggattactggatggagaacatcatccgccccaaccgggcggagactacggtgtatgcgtatcagaagatcatcgacaaccacctggacccgctgctgggcgccgtccccctgtctaagctcagccccaagcagatccaggagtactaccagaccatgacgcggacggagggtctctcttccaacaccatccgccggcaccatgacctgctctccgccgccctgcggatggcagtgcggcaggatatgctccgggtcaatcccatggagcgggtggagccgccccgccccaagctccacgaggcctcctattatacccaggagaacctgaaggtgctctaccagctggtagagggccactggctggagatggtggtcaaggtcaccgctgggctgggtctgcggcgggaggagatctgcggcctgaaatgggagagcgtggacttccagcgccgcgtcgtccatatcaaggaggcccgcactgcctatggcgccacagtggtccagaaggagacaaaaaaccgctcctccatgcgcaccctgtttatgcctgacgagctctatgagctgctccgccgggagaaggcccggcaggagcaggagcgggccatccggggcggggattacgccgcctctggacatgtggtgctggacagagagggactgccctactcccccaacgccctgtccctggccttcacccggttcgtgcggaagaaccaccttccccggctcaccctccatggactgcgccacaccttcgccaccatcgcctctgcccagggcgtccctctgttcgacatcggcaaagccatgggacacagcacccccgccaccaccggccggatctacacccacctggtggaccgcacccatgaggagaccctgctgctggtctccgccgccctgaagtgacagcttctcgggacatacccccgcctccgcccccatatagtgggggtggaggtgatcccatgcccctgtccctgcctgagttcctgtgccagatggcggccagcccggccctgaccctcacggtgctgctcactctggccgtcctgctggtcaacggctggaccgacgcccccaatgccatcgccgccgctgtggtcaccggggccctccctttccgtccggcggttgggctggccgccctgtgcaaccttctgggcgtgctgtgcgtcacggcggtgaatacatcagtggccgagaccatctactccatcgcctctttcggcggcggtccccgggcggccctggccgccctttgcgccgccatggcttccatcgttctctgggcggcagcggcctggtggttcggcatccccaccagcgagagccacgcactggtagccggcatctccggggcggccgccgccctggagggcagcttgtcctgcatccggtgggactgctgggcccgggtggtgctggggctgctggtctcagtgggagcgggcttctgggcgggccgccgggccctgagggcgctcagccgactgtcctggagcgaccggctgttccgcagggcccagatccccggggctgccctcaccgccttcctccatggtgcccaggacgggcagaaatttctgggcatccttctactgggcattgccctgtcccagggccgtcaggacgagcagaccttcctcatccccttttggctcatggccctgtgcgccggttcaatggccctgggcactgggatgggcgggcggcgcatcatcgacaccgtgggccgcgagatggtgcgtctgggtccccgggaggggctggcctccgatctgggcggcggcggctgtctgctgctggccaccctgctgggccttccggtgagcaccacccacacccgcaccgctgccctgctgggtgcggggagcacctcaggccgccggatcgactggtcggtggcccgctccatcgccctcacttgggtgctcaccttccctggctgcttcaccctgggctggtgcatggcccggctgttcctcgcctgggtctgaatacagcgccgccccgccgctgatcgcggcggggcggcgctctttccttttattccgagagcaggatgcggtcgttgtccagctccctgccggccccagccttgaaccgcttcagcaagtcctccaccgtcaggcccttccgctcctcccccccaatgtccagcacgacccttccactgtccatcatcagagtgcggttgcccagctccagagcatttttcatgttgtgcgtcaccatcatggtggtgatatgatgctccgccacgatctcccgggtcaggctcagcaccttctctgctgtagaggggtccagggccgccgtgtgctcgtccagcagcagcagcttgggcgggaccagcgtggccatcagcagggtaagcgcctgacgctgtccgccggacagcagccccacgggctgcttcatccggtcctccagccccatatccagcagggccagccggtcccggaagaactgcttctccgctttgctggtccggctgaaaaaagcgttctgattcttggcagtgcgcagataggccaaggccaggttctcctcgatggtcatatgaggcgccgtcccccgcatggggtcctgaaacagccgccctatttcccggctgcgcttgtactccggcttgaaggtgatgtcctcccccgccaggcggatggcgccctcatccacatagaaggcccccgcgatggcgttgaagagggtggatttacccgcgccgttggagcccacgatggtgacgaagtcccccttctccagacggagggcaactccgctcagcgccttcttctcgttcaccgttccggggttgaaggtcttggagatacacgcaagttccagcatctcagcgtcccccctttctcatttccgccttccgcttctggaaggcagcccactgcttgagggtgggcgccgcgatggccagcgccaccaggatggcggtcagcagcttcatagcctcgatgatcctggagctgagggccgccgcatagatgatccggtagaggatgctgcccacaaagacggaaagcgccccccgcagcatggagccacggcccagcaccgtctcaccgatgatgaggcaggccagcccgatgaccaccattccggtgccgatgtttacgttggcgctgcgctgggactggcctaccagagcgccggaaaaggcagtgagggcgttggcgatgcacagccccacggtgatggtgaagtttgggttgatggaggaggccctgaccatgtcccgattgtcccccgtggctcggatggacaggcccagccgggtccccaggaaagccaccagcagcagggccgcccccaccgtcagcaccccgcccagcaggatctcgctccaggctccgccgataccggtagcctggaacatgcggaaaatagtgtcctggcggagcaggctggcggtggaggtccaccccatggccatcaggttgatggtgtagagccccgtgttggtgatgatgcccgccaggatggagggcacccccatcttggtctggaggaaggcggtcacaaagcctgccgccgccccggcagccatggcggcagggaccgccaagacggggtggcctgcgatgcacactgtcaccgacacggccgcccccagggtgaaagccccatcggtggtgagatcggcaatgtccaggatgcggtagctgaggaacagagccagggctaccggtgcgtacaacaggcccagttccagggctgtctggagaatatagagcatagcgggttccgtcctttcaggccaaagcccctccggcgtcctgccggagggactggcggtattgtgcggtcagggcgtgcttagtcctcggtggtggccacttccaccacctggcccatgtcgctgaacatggagtagtccgcgcccagagtctgggcggtctcggtgttgacggtgatgatgccgccctccaccagatagtagtcctccatgccgtccatgccctccgacgccacctgataggccaggtcggcggtctgagtgcccaggtcggtatagttcacgccgcaggtggtgaaagcgccgttgcggacaaaggagtcagcgcctgtgtagtgggggatgcccgcctccgccagttcgggggcaatggccagctcggcctccatgatcttgttatcggtgggggtgaagactgcgtccacgccgtcggcgatcagcgtcccggccgcggcgatgacctcatctacgctgtttgcggtgtactctttataagcgatgcccttgccgtccagatactccttcgcctctgcaatgggcttggtggagttgggctcagacagggagtagagcaggcccacagtctgcacctccgggtcctgggccagcatcatgtccaggatgaactgggtgttcagggcgtcactcataccggtgacatagtccaggtccagcagatcggcctgctccgggtcactgacggcggcgtacaccactgggatgccggtgccctcggcggccacggtcatcagctgggcggcggtggtggccaccggaatgatgacgtccacaccatcggccactacctgggcgccgatctggttcaggatggtctcgtccccctggccgctgtacacctggccgtagtcgatggtgatgccctgctcggcggcgatctcgtccagccgggcggtgatggcgttggcgatctcatccagggaggcatggtccatctgcttcactaccgccaccttgatggcggtgccgccggtctcggagccggaaacggccggggcaggggcggcgccggaggaggcggagctgctgccgccggaacaggcggccaggccggccatcatggtcagggacagggcggcagcggtaaacttcttcatcatgtcatgctttttcatcgtgttttcctccaaaaaacaaaatttgttcgggtgggcgatggaggggccggtgccggcggccttgacttgggagcgcagccaataaaaaaacagctcctcatcccacatgggacaagagctgcactcctgcgataccacccaaattgacgtaaacgtccgctcgcttcacgcgccatcacgcgtgcccgatggataacgggtgggtccccgtcggcatctactgagccaaagccgttcaagccgccctcggaagtccattcacacagttgcgccccgccctgatcccaccccccaggactctctgaaggtttgcccactggctactcatcttcctcgcaggtttctgctgattgatttgttgggcttattatagccgcccctttcccacttgtcaaccccttttttctggacctccgttttccacaggctgggagcgggccgccggagccctccctatcagccgccccggtccgaacacataaaatttccgatttcacatatgctgtccatgggtgatgaaaatgaagaagcatctatgggggacctatgggacttgggtcctcttcaccgaggcggtgggcggcctggccggctggctgaccagggacggtacacagctctattcccaggtcatcaccaagcctcctctttccccgccaagcatcgtgtttcccatcgtatgggtgatcctgttcgccctgatgggcattggcgcggcccgggtctatctggcgcccccctccggtctccggtcccgcagcctgctgctcttcctagtccagctcgctttcaacttcttttggagcatcattttctttcagttccagaatttcggctttgcccttgtctggctggcagtgctttgggccctgatcctgtggatgctgctgtccttcctgcaggtggactgcaccgccgggtggctgcaagtcccatatctcctctgggtgacctttgcggcctatctcaattggggtgtttggctgctcaatccacgttgaaaaaggctccgggctcataacccggagattgcaggttcaaatcctgcccccgcaaccacaaaaccgtctgatttcttttgaagtcagacggttttccctgtttattgctcaaaaaagtcgagactgatttttggacctttggggttgacccatattctgacccatacgagccaaaagcgaggtccgggtgcggctctgccgcgcccggacctcgctttgttttaggatatttccagagggcgttcgccagcacctttcccatggctctcgccgcctctttctgggccgctgtggtcacatgggcgtaggtgtccagggtgaagcccgccgagtagtgacccaacatcccggacaccgtcttgatgtccactccgttttgcagggccagggtggcgaatgtatgccggagatcatggaacctgactttgggcagtcccgcccgtttcagcacccggtggagcatgtgcaggacgctgtccgggagatggggccgccgctgggtgacggaaacacccatgggctgctacccgcttttttcttctgcttcaacagaacgcttaccgcatcctctgctaatggaagggtgcggtgggcatttttcgttttcagaggtgcctctaccacctcaccgtttatgcaggagatctgccgccgtacccggaggtcacctcggtccaaatcaaggtcctcccacttgaggcccagtagctctccccgccgcaggccggtggccagctccacgtagtagagctcgaatacaccgctctctttcgcctcccgcaggaaggaggccaactgctccaccggcagggttttcatctctctgtgctccaccttaggcagagcgcggccctccgccgggttggtgaggatgatccgctgctcctgggccagctttagggctgaggaaagaatctggtggatgttccgcaccgtcttggcactaaggcccttgggctgccctttagcctccagccggtctacccaatcttttgtcagcagcttcttgtagagcttctgtaagtccagagattgtgtctccttaatggcggcgttcagcttctccttggcctcctcctgagttctgcccagtacattcttgtagatggtcttgctcgtctccgggtcatgtcctgccgtgtaccgtctctcccatcgaagaatcagcttgtactgttctttgacaaaacctgtttctgctcttaccacagcccagaaccatttttttaaaagggcttgattaaacggctggcacccccctccgtcttcaagaaagtatatcgcagctaataaaagcaaatagtttggaattcaaaaatcggtgtttcatcatgttacaagacagttatctttgtttaccggagagggttgcttttatgtaaccatggacagcactgaaactaccctcttgtccgagacgctgaagatggggtcagtcctgaaaccactcgaatcgtaaccgacacaaggatcaccgctgcacccacaatggtcaatgcccccggtcgctcatccaggaacaggaatacccacactgggttcattactggatcaataattggtattaacactgtttccaatgcggacaagccagtactggccttagcatagagggtatagctgactgcaaccaacaggccggccagcagaaggaacagcaaactaatcgtgtccggcataccggcgttccacataataggcagtcctgccacagcggaaattacattgccgagatacatggatagtgcgggattcccgtccttctgcagccgcagaaagatggaaataccagcaaaggtgattccgttaaagatggagacgatatttccctttaaactcccaccgctgttgctgtccaagaagaaaaagatcatccctaaaaagacaaaccctacactgataatatccgcccatccgacccgttcccgcagaaagagccaggacagcagggccacatagatgggtgcagtatactgcatcataatagcaatggcggaggaagtgagagtagtggaggtaataaagcagtagttgaaagcggcgtaacagattgccccaccgatgacataccggtcgattttttggaagcctttccgcagaaccatgggggccagaaggataacagcgactaggctacgtcccgccgcaatggcgtacgggctccattcaatcattttaatattgaatcctgccagactccacatcagagcaacaaagcacgtgatggcgatggctttcttatggctcatggaatccattcctccctcataaatagaagagcaggaccgctaccctgctcttccttctgaatcactgtttggtacgcaacagactatagacgtcaggccgacgattttccaaggtaaagatctgtcggcgaacctgctgcaaataatccagatcgatctccgctgtaatcacctgagggtggttggacgcccgtgcgatcacattgccccaggggtctaccaccagagagttggcataggcctggaacttgggcttcacgccgtactgcgccggagccactacataacagccgttttcaatggctcgggtgcgcagtatggtctcccaatggtctttgccggtgggcatggtaaaatcagcaggcatcagaaggatctgcgccccttccagggccataatacggtacatctctgcaaagcgcatatcgtagcagatggacagacccaagtgacccacctctcctgtgtccacggtgacgatctcatcgcccgggcaaatccgctctgactcccgattcaccggaccgttggggatgaccacatcaaaagggtggatcttgtggtacttggctgccagattaccccggggatcgatgaccatggtggagttaaaaggccggggatcattggggtttttctcatagatacttccgcagtggagccagactccatatttttttgcctgctccgacatgagctggaacgtaggacctccgggaatttcctccgcatgccccgcattatccaaacccacatagttcatgctctccggcatggtgatcagcttggcgccacgagccgcagcctcttcaataaaggagactacggtatctaaattcttctgtacatcatcttgggaatcaagctgcaaaacagctacggtaaatttattcaaaggaatactcctttcttaattataatgcaatcagacagatgcttttttccggttgcgtccaaacaaaatctcgccgccaatcaggaaaaacagcagcagcgcaacagaaatcacggtggtgatcgtaggcatagtaaaaatcattagagaacccactaccatgtaggggatctgccaggcataacccaaggtactggaggtggaaatgcaggtggaagcagtcgtctcgttgtcaggatccaccaccttgacgagcatcaagccggtagccagtacgccgcaggccatgccaaacaggcctacgccagtctcaaaggggttatcctggagccaacgcttgcccagcacgaagcagacaaacaggttgaccagcaccatgcagatggagatgagcaccagcggcagcgcgtaggagacaaacacctgccgggaagtagtggcaatcgcagcggtgatcatatactccagtgcagttccggtgatgcggttcatcagcttgcggtcgatgcgctctctcagcgttgttttgttgatcacaaaacctatgatcatactggataccagcacggcgcctaccagaggaaagttggacatgatgggatgaatcttcatcagcagtgtccggaccacaatgccgatcacgactacaacgccaacgatagccagctgaaaggccaacggatccagggaggacacattggtcacaccattgccaacagacacccggttttccggacggatgtagccggtacgctctccctcatccatgtccgcaaaggacatctttacatgggtcaggcccctcttggctcccatattgataattaccatacccaggatcacgccgcacagaataccgatcgtagcgaaggtcacgcccacgcccactgcatcgttccacaagccggcatcctggatgatgttacccacggtggtggcattgccgtggcccgcatagaaaccccaaacgcccatgtaaccgaactgataaggaagcgtgctgcccagcaccccgaacagcgccgcgatgccaagaccaactaccatctgcccctggtgggccgcaccggccaaaaaggtggtggccataccgtcacggcccacttgattgagctccaggctcaagaacatcgtggcgcacacaacaataaccagtactcccgaccactgcccaatgccactggaaaacggaatgtaagcaggagacacttcgcccagccagctggggctgaaaaacataccgatggttcctgcaatcaaagaggtggggataaagtaacgttggaaaagggtaatccgcttacgaagttcaaagccgatgagaagcaaaacgctgaggtatgcaaaatctttcaatacatccgtcaatgtcatgcaggttcacacctttctctttgaataagattttcagggcaccgaatagtagggggtatatttctctaccagggaaacctgtcccatcatgcggtggatgcgggtggggggatctgtcatcttgtcccgtaccgaaagcgtagaaccctggtcggccagtgcacccagaacttcgatcatgccctgagatgcagccagcatggaagagatagggaacagtccaattgagaaattcagctccttcacctgctcaatgggtacattgccgcccacaaagcctttctcattgagattaaccatgaggggaatcgcagcctgctgagagaccttttccagctcctccatagacttgatcccatccacataggcgtaatctgcaccgcactccttggagagattgatgcggcggatggcttcatcaataccatagccgtacaaatttgcacaggtgcggaatacaatcacaaagtcaggcgaaacattgtcccggaccgcttggatcttgggactcatcaaatcccaattgatgatttcgtctcgggcggggtggctggcggggagaaccttgtcatcaatctgcaagccagctgctcccagctgctcatacatggcaccggtgttggctgcctgaatggcattgccaaatccgttgtccgcgtccgccagcagaggcgcagaacaggtagaaacgatgtgctgaatggcagtaccaaactccgccaagctcaaaaagccaaaatcgggacggcccagcacactgtaggccagtgctccgccggacagaaacagggcagggaatcccgcctcctctgcgatcttgcccgacaagcagtcatatacacccggcagggttaaaaatttgttctccgccaaaatacggcgcaggtcctgggcatgatttttgctcataacagattcctccttattttctgttctgcaccttgcattctttcccgcaatgtggtctatccttgttaagaattgtacaacatagccacttacaatgtcgaatacccattttgacatgacgatatgataaaaagcgcataggacagtggaagaaatcttttgcgcgatatacaatagtctgatatcattagataaaacaatttcacgatcaaacagatctccgcccactcatgtccggaaaggagcttactatgattgaccagcgtttttgcaaatatattaaaaccattgctcaatatcatagtttttccaaagcggctcaagttctttatgtctctcagcccgccctgagccggttcgtaaagaaagtggaagatgagcttggggtaacattgtttgaccgggataccattcccttgcgccttacgttagccggtcagcgatatctggaatatgtggaacagtttcagggtctggagcggaatatgcggcaggaattttccgccatgggcaagcagtccttcaaccgtctgaccatcgctaccctccctctcctgggcatctatgttctgccacgcatcgtaccggattttgcggagcaatttccttctgtggatcagaaaatcgtagaatgctccagtgctgaaatcttaaaacagctagaccatgacgatgtagatttggtgctgaccaatcttaggccggacaatcctcatctgcgctacgaacgcctcatgggcgatcctgtggtgctggctacacagtatgatgaacaaatgcagcagtactatcctgactgcggcaacaatttggaacacccactccaggtagacctgtcccaatttgagcagcaaaccctgattgttcttcgtgcctggcagaacatgcgcatcgttgctgagacgatctgtcggcattactcttttgcccctcagcgggtggtggaggtaccaagtctgtcctcggcgctcagtttggtaggctgtggacggggaatgaccttcatctgcccctcctatgttcactgtatccagccccaaactcccttgatctacttctcccttccggaagtcgctacccttacggatatagtggcagtatcccaccgagacaaccaaaaccctctcgtagatgcgttttgtcaatgtgcaatgcgtaagctgcacagctgcaaataaaggtcatgcagaacttctgggctacatctgtttccgctggcccaaaccgtgacccatacagggttcaggctggatggaaccaatggagccaaacccacatccagaccgcagcatatcccagagatcggaggttcaagtcctcctcccacaaccaaaaatccgctgaaatcgtatgatttcagcggatttctttattacttttctgcccggtttatttttgtgtctgctgtttgacctatacttt

SEQ ID NO: 13613 - DNA, 27017 bp, Unknown
  gut microbiota DNA sequence
gatataatataaagaacgcctttttgagaggaggagggagcgctgtgagcaagaccgtgatccgccgggtggagccccggagcccggcggccaaagccggcgtccaggcgggagagaccctggtggagatcaacgggaagcagatcctggatgtgctggactacaagttctattcctatgacgcccgtctgacgcttaccctccaggccccggatggagccagccgcaccctgcgggtccgcaaggaggagggggaggacctgggactggagttcgagacctatctcatggaccgggcccgctcctgtgccaacaactgcatcttctgctttgtggaccagatgccgccggggatgcgggagagcctctatttcaaggatgacgacgcccggctgtcctttctgatgggcaactacctgaccctgaccaacctctcccagcgggaggtgcagcgcatcatcgacctgcgcatctcccccatcaacgtgtccgtccacaccaccgaccggtcgctgcgggtggagatgctgaaaaaccgccgggccggggagagcatcgagatcatgcgccgcttcgcccggcaccagatcaccatgaactgtcagatcgtctcctgccccgggatcaatgacggacccgccctggaccggaccctgagggacctggcggagatgttccctgccgtccacagcgtgtcggtggtgccggtgggggtgaccaagtaccgggagggcctctatcccctgcggccctatacccgggaggaagcgggggcggtggtggaccaggtggaggcctttgcggcagcccaccgcgacgcccacggcacagccctggtctggtgctctgacgagttctacctgctggccgggcggcccctgccggaggaggactactacgaggagttcacccagctggacaacggggtggggatgctccgcctgctgcgccaggaattccgccggggcctggacctgatggaggcggaggagatggagaggaccgtccccttctccatcgccacaggcgtgtccgccgccccgtttttaacggaattggtagagctggcgcggaaaaaatgtggtaaaatagaggggacggtgtaccccatccgcaacgacttcttcggggagaccatcgtggtggccggactggtcacggggggcgacctgatcgcccagctgcgggggaagaagctgggggagcgtctgctcatccccgccaatatgctccgccacggggagcgggtctttttggatgatgtatccctggacgatgtggagcgggcactgggtgtccccgtgatccccgtggagcaggacggctatgagctgctggacgccatgtgcggcatctcgtccggcctcccccgacaggagctcccccgggaggagacggaatattatcaatacaacccctgagagggaattaggaatgaggaattaggaggtaggaattatggcgcgcctggggcgcgcggactccccggcgcaggccgcccctatctcctatcctctaactcctaattcctcattcctaattcctaactcatcaagaggtgatatgtatgaagcccttagtcgccatcgtggggcggcccaatgtgggcaagtccatgctgttcaataagctgtgcggccagcgcctctccatcgtggaggacacccccggcgtcacccgggaccggctgtacgcccagtgcgagtggaggaaccgggtgttcgacatcgtggacaccggcgggatcgagccggggacggacgaccagatcctctccttcatgcgggagcaggccgagatcgcgattcagaccgctacggtggtggtctttgtctgtgacgtcaagaccggcatgaccgcagccgaccaggaggtggccaacatgctcctccgggcccggaagccggtggtgctggcggtgaacaaggcggaccaggtgggccgggagaacccggacatctacgagttctataacctgggcctgggcgaccccatcgccgtctccgccgtccacggccacggcaccggcgacctgctggacgcctgcttccagtacttcccccccgaggaggaggaggacgaggaggacgatgtcatcaaggtggccatcatcggcaagcccaatgtgggcaagtcctccctggtcaaccgcatcctggggcaggagcgggtcatcgtcagcgatgtggcgggcaccacccgggacgcggtggacagtcccttcgagaacgggcggggcaaatacctgttcatcgacacggcagggatgcggaagaagtccagggtggatgaccgcatcgagaagttctccgtcctgcgggccaccatggccatcgagcgcagcgacgtgtgcctcatcatgatcgacgcccgggagggggtcaccgagcaggacaccaaggtggccggtctggcccacgaggcgggcaaggcctgcatcatcgtggtcaacaagtgggatgccatcgagaaggacggcaagaccatggacaagatgcgccaggacgtgatgcgggacctgagctatatgacctacgcccccatcgtgttcatctccgctctcaccggccagcgggtggaccggctcttcgagctgatcaactatgtgaatgaccaggcagccacccgcatctccaccgggatgctcaactcggtgctggccgatgccaccgcccgggtgcagccccccacggacaagggccgccgcctgaagatctactacatgacccaggtgggcatccgcccccctcattttgtgtgcttctgcaacgacgcccggctgttccacttctcctatcagcggtatctggagaaccagatccgagccaccttcggcctggagggcacgccggtgcggctgaccatccggcagaagggcgagaaggaggagtgagcaatgctgggcatgacttggggggacatctccccctggatcttttatgacatgggtctgcccttgcttctggtggcggcagcggcctacctgctgggctgctccaacggggcggtcatcgtctccaagtacatcctgcgggacgatgtgcgcacccacggcagcggcaacgcggggctgaccaacttctaccgcaccttcggcgggccgctgaccctggtggttattttgtgcgatgtcctcaaggcggtggccgcagtgtgggcgggcatcctgatggcccgatattgggacggcggcttctggagccaagaggccatcgttctggtctttgccaagtactgggcgggcctgttctgcctgctgggccacatgttcccctgcatgttccacttcaaggggggcaagggcatcctgtccggcggcaccatcgccatcatgatcgactggcgcattgccctggtggtgtgggggggattcctgatccttgccattctcacccgatatgtctccctgggatcggtgtgggccggagccagctttccggtggccacctggttcgtctatcaggactggatcatcaccctgctgggcctgctcttgggcggcctggtggtctacatgcaccggggcaacatccaccgtctgctgaccgggacagagaacaagttttctctgcacaagaagcaatgaccccgtaggggcggcctgcggccgcccgaacagccaagaaaattgaacaacgggcggtcacaggccgcccctacaacatatcttgggaggtattaccatgaaaatcacagtccttggcagcggaggctgggggacggccctggcgctgctgctgctggaaaacggacatgaggtgaccctgtggtcctacaccgaggaggagtcccgggtgctgcgggagacccgggagaaccccatgctgaagggggtgccgctgcccgagacaatgggcctgaccaccgatatgggggcggtgaagggctgcggcgccgtggtgatggccaccccgtcctttgcggtccgcgccactgccgccaagctgaagcagctggccgacccggggaccatcgtgatctccgtgtccaagggcatcgagaaggacacctccctccgcctcagccaggtcattgaggaggagctccagggccactgccccgtggtggtgctctccggcccctcccacgccgaggaggtgggccgccatgtcccaaccggcgtggtggcggccagcgaggacctggagctggcgcggcaggtgcaggacctgtttatgaacccccgcttccgggtctacaccagcaccgacaaggtgggcaccgagctgtgcgccgccctgaagaacatcatcgccctctgcgccggctgctgcgacggcatgggctgcggggacaacaccaaggcactgctcatgacccgggggctggcggagatggcccggctgggggtggccctgggaggaaaacaggagacctttgccgggctggccggcgtgggggacctgatcgtcacctgctgttccatgcactcccggaaccgccggtgcggcatcctcatcggcaaaggggtggagcccaaagaggcggtgaaggagatcggcgccgtggtggagggctactacgccgctgtcaccgcccgcaccctggcccagaaggtgggcatcgagatgcccatcgcccaggccgcctacgaggtgctctacgaggggcgggatgtccacgccgtggtcacagaactgatgtcccgggccaagcggtccgagaccgaagagtcctcctggacctgagagaagaaggataagcgggccggacagccatttgttggctgcccggcccgctatttctccggccaatagactgataaccggtgccgatcgctgtttgatgctctgtacattgaggggatacggccctgtattataacgcggacggcacaataggttaaaaagcatataccatgacatgctccccgttggtatcgtactctccattgaagtgaaaaccgatctgctgatagagatggatcgcgtgggagttggtctcatacacactgagatatatggtatcacaggaatattctgttcggagcctgtcaagcagggcaagcacgacccgctttccgtaccctttgccctgatactttttatcgatcagcagccggtccagccacacctgccccggggcaggttccggaaaataaccgtacatggcaaaaccgatcagcataccgcggtcatagatgccgacgggcctccacaactccaatttgtcggcctcctgaaggcactgtgtcacgctttcgatgaagccggactgttccgcaaagacctccagatgttcgacctccgctcggttcctgctgtttaccgcttcaaaatgcaatgtgtgatcgctgtgggaattcattttgttttctcctgctttctcagaaaggggacgatctgcttgtctctatttttcaaggggaaaagcgtaaacggtctggtatggaccgcagccggtcgtcccgcgcatggctgatttgaaattattttgtctcagaactgtccctgggcgcatcctccttttcacacccgatcaaaatttgtgttccagggtggaagccctctctggatgccccggcccacagatgggggagggggaacgcccggcgggacgctccccctgattaaagggatctctattttacccgcagccgacgggccagctccccatccggggcgacataggcggtctcataggtggtgtagaccaccatgccgggccgggcgccccccggctttttcacatattttaccggggtatagtctaccgccactttgccgctctcccgtccctgggagaaccaggcggccagctgggcagcctcctggatgctggtcaggtcgggctgtcccccctcggtccacaggatgacgtgggagccgtgaatcttctgggtgtggaaccacaggtcgctcttgaaagcctgcttggtagtgagcaggtcgttctgggtgttgtttttgcccacggagatacgcaggccggaggaggagcggaactccatgggcttcgaggccacccgcttgccccggtctctggctttggaggggcggcggagatatccggtgtcggtgagctcctggcggatctcctggaggtcccgctctccctccgccagagcgatggcctccagcacgctgttcaggtagtccaggtcccgccggcctttctctagctgtaaagttaaaatactttccgctgtttttgccttgttgtactccttatagtacttggcggcgttctgctgaggggtgaggagggggtccagggggatgtggatctgagggcactccgggtcatagaagtcggctgccgtcagccgggacatccccttctccatggcatggagattggaggtgatgatgtccccgaactggcgcagccgctcccggtcccgggtggcggccagctcctgctcctgaaggccgatcttgcgggcggcgcggtcccgggcgttggtcacggagcggatcaggtcctggccccgctggcgcacccgctcctggttctcccgctgctcgtaaaagcggtccagaagggcggagaaggaggggaaggggacgcaggagacggcggggccgtactggctgatgggctgaaaggtgaagtcggagggatgcccctccttttccagcatgacaggtgtaaagctgttttcctgcacagaacgcaggagcccttccagctcatccagcagccgagaccggcccccttcccccatctgatgcagccgcgcgtcggtggctccccccgcccggaaagccagctcacggcagatgaggggggagaggccgccgaaggtgtccagcagccacttgtccgcctggctctcctccggtgcggcggccagggcggactccagggcggcgcggtccagggaggaggggtccagcttctcctgggcgggggggagacggtagaacaggccgggcagcacctgccgccgggcggacatgtcgctgtccacccgccgcaggcagtccatgatccggccctccccgtccagcaggatcaggttggagtggcggcccatggcctccagcaccaggcggcgctccacccggtcccccagctcgtccagggcctccagccgcaggtccaccacccgctccatgggtggttggagcagctccagcagccgggcgccggacaggtgcttgcgcagcagcatgcagaacatggggggcttgtccgggttctcccgggagatctgggtgagatgggcccgggggtggctggggttggcggagaggagcagcttcacattgcctgcgggggcccgcagggccaggaccacctcgtcccggcctggctgatagatcttgtcgatttttgccccggagagggcgttctgcagttcatggaccactccgctcaggcacagcgcgtccaaaggcatgggatcacctcatttatgtcacaggttgggcgggtcacagctccccctccatcatggtggagaagagctggttgagccggtcggtccggccctggagatagagccagccgaacagggcctccagggcggtggcagtctgatactccccacggctggcccccttggggacagagtggggggcggtgtttcggccccggcggaagacatccgcctcctcctgggtgagcagggggaggatgcgctctgcccgccgggcctgggccggcgcggccacatagcccactgtggcccggtgcaggttgcgggcggtggccttgccgtggagacagagccaggagcgcaccatcagctcatacaccccgtcccccaggtgggccagccccaggctggacagattcagcagctgttcagcgtccatattcaggtggaagtagtcgatcatagggtcccctccgtctcaggctttcaatctatcatcataccacactcccccctataagacaatgcctatatgctgtaaagatcacatgcgcacacacacgagagcaaagagagctggtgcaggccgttgccaaccgggccggggtctggtacaatagggccaaaagaaaagggccccgggacggggcggagaggagaagcgccatgcacaacgaactgacgcagaaggacctccagctgatgcgggaggagctggactaccgcagggtccagctgcggcccaaactgctggaggcggtgaaggaggccagggctttcggcgatctgagcgagaattttgagtacaaggcggccaagcaggagaagaaccggaacgagagccgcatccgatttctggaaaacatgatcaagaccgccgtggtcatcgcggaccattccggggcggacacggtgggattgtacgaccgggtgacggtctacctggaggaggacgacgagacagaggtgtaccagatcgtcaccaccatgcgccaggatgccctccacggcctggtgagcaaggagtcccccatgggaaaggccctgctgggccgcagggtgggggaccggccctatgtccaggtcaatgagcagtacggctactatgtggaggtcagattcatcgaaaaggggacggacgacggctccgtccccctcaaccgattctgagcggcgggagagcagggaaaggggggcacggcgcaagccgtgccccccagcttttccggcggtgtatcctcacaggtggagaagccggctggcaatggtgaagtagaggaccagggaaagggcgtccacgatggtggtgatcagaggggcggccatgatggcggggtcggcccgcaccagcttggccagcatgggtagagctccgccgatggtcttggccaggaccaccgtagcgaacagggacagggtgactgtgacgcacaccagctcgtttcccgggtaggagaggagcaggcggaccaggttgaccagggagaggaccgcgcccaccagcaggctgaccctcagctccttccagagcaccttggggaagtcggacagggcgatgtcccccaccgccatgccgcggatgaccagggtgctgctctggctgccggcgttcccgccggtgtcggtgagcatggggataaaggtgaccagcaggggcatcaccgagaaggcggcctcatagcgacccaggatgccgccggtgatcatgccggagatcatcagcaccagcagccacaggatgcggtttttggccagggcgaacacgccggtcttgagataggacttttccgagggggccatagcagccatgcgctgaaagtcctcagtggcctcctcctccatcacatccatcacgtcgtccaccgtgaccaccccgaccagccggtcctcctggtccaccaccggcagggagagaaagtcgtaccgcatcagggcccggacggccagttcctggtcgtcggtggtgcggacggtgatcacgttgggctccatcagcgtccggacgggggcgttgtcgggggccagcagcagctcccgcagggtgactacaccgtccagcacccggtggccgtcggtgacatagcaggtgtagatggattcgcagtctccccccaggcggcggatccggcggatggcctcggccgcggtcatggtccctttcaggtcgatgaattccgcggtcatgatgctgcccaccgactgctccggatatttgaggaactggttgatgagcctgcgggtctcgggccgggcgtttttcagcacccgcttgaccacgccggcgggcagctcctccagcagatccaccgtgtcgtccatagccagctcctccaggatgccggccagctcccggtcggggagggagacgacgatcatctgctgggtgtcaggggggagattggaaaagacctccgccgcctgctccttgggcagcgtgcggaaggccagcgcgccctgttcctggggcaggccctccagaagatcggccagatccaccgggttctgctccgccagaatggcagagagctcacggtagcgcttgtcccggatcagctccaggcagcgctccaaacatttcttgttctgcattggcaacctcctttttgtcaggaagcctccaatgggacagacaaagccgcaccggccccccggagacgggaaagacctgtgcggcgacattctcagcgggcgcatagcacagcggaagggccccggcggggcgcataacagacctccgcctgtgcggaagccaggcggcagggggcgctgtgcagagctccctatgccggagaaaaggcaagggggcccgggagagaactgtcgctgtccgatttgagacttcggccgtaagcgtccacttacctttcctcctttttagatcagatgggagatgaaaatcatactccacccgtaggataacacagcagacagaggattgcaagagaaaacgggaaaaaaacggaagggcggtcccatacacctgtgctgatggccgatgtgtgcggcctgatggggacatcgggccctgcatgggggcgtggaagctgcggcacaccccgtgcagaggcgggtcagggtccccgttcagccctgcggatctcccgctggcgcttctgaccaaaagaacagatgttttggggtattctattttccggagagatttgctataataataaaataagtctccgcgcgacctcattctgattggacgggaggaccctatggatcgttttgaactgctgcgcacagagctgacccgacgctgtcccgggctggagctgcgggaagaggagcctatggcccgacacacctccttccgcatcggcggcccggcccgactgatggccctgcccaggacggaggaggaggcccgggagacccttcaggcggcctggacgctggagatcccgccatttttcctggggaacggctccaatctgctggtggcggaccggggatatgagggctttgtggtcaagccggccggggcgctggaggaaatacgggccctccccccggaacggccgggggagaaggggcggctggaggcgggaggggccgcgctgctgtcccggctctccaaggccgcgctggatcagggcctcaccggcctggagttcgcccagggcatcccggggagcgtgggcggcggggtgacgatgaacgcaggggcctacggcggggagaccgcccaggtgctcctccaggtcaccgcgctggaacgggacgggacccagcggctgctctccggggccgactgcggcctgagctaccggcacagccggttttcagagggggacctgctgatctgccgggcggtattcgccctgccggagggaaaccgggaggagatcgccgggcggatggcagactttgcccagcggcggagagagaagcagcctctggaatatcccagcgccggctccaccttcaagcgcccccaggggcacttcgccgccgccctcatcgaccagtgcggcctgaagggcagggcggtggggggcgcccaggtgtcggagaagcacgcgggcttcctcatcaaccgggggggcgccacctgcgccgatgtcctggagctggcggaccaggtgcggcaggaggtgctgcgccagaccggcgtggagctggagctggagatccgggtgctggggtaagatggacggatatacgagagaggagctggacgaggcgctgacggccgtccagtccatcatccataagtgtgaggcggcccagaagaaatttccgcggggcaccgcccaccacaccctgctggagcggcggctgagggccatgtacctgtcccgggcgctgatctgccgggagctgtccggggcggacggcagagagagataagaggtgtacagccatggaatttatcatcatttccggcctgtccggggcggggaagagcaaggcggcctccttcatggaggacatgggctttttctgtgtggacaatctgcccgcccccctcatccccaaatttgctgagctgggtatggccgggacgggggagtacgaccgggtggtactggtcacagacgtgcgctccggcaccaatttcagcgccctgttccagtccctggaggcgctgaaggggatgaagtgcccctaccgcatcctgtatatggacgcctcggacgacgtgatcatcaagcggtataaggagacccgccgcagccaccccctggcggaggaatgcgactccctggagggggccatcgccctggagcggcggatgctggcccccctgcgggagcgggcggagttcgtggtggacacctccgacctgtccaccgccaagctgcggggcgagctgctccgactcttcggacgggggagccaggagggggctatgacggtgagcgtcacctccttcggcttcaagcacggactgccccgagaggcggatctggtctttgacgtgcgcttcctgcccaacccctactatgttcaggagctgcgcccccgcaccggcctggacgacggggtaagggactacgtgttttccggcggagcggccggggagttcctggaaaagcttcaggacctggtgggctttctcctccccaaatatgtggaggaggggaagacggcgctggtggtggcggtgggctgcaccggcggacaccaccgctcggtggccattgcccatgcgctggcggcctatatccggggcaggggttacccggtgacggagagccaccgggacctgggcaggacgtaaggagcggacagagcaaacttgaagggaggtcccgctatgccggacaccattccaaatctgcaccagtgggagcgcggccccaagatcaccgccatcggcggggggacagggctgtccaccatgctgcggggactgaaaaaatacaccaaaaacctgacggcggtggtcactgtggccgacgacgggggcggctccggcgtgctgcgccgggacatcggcatgccgccccccggggatatccgccactgcatggagtccctggccaacgtggagccgatcatggagcggctgctcacctaccgctttcaggagggctccctggctggacagtccttcgggaacctgatcctggccgccctcaacggggtgaccggctcctttgaggaggcggtggctcagatgagccaggtgctggccatcaccgggcgcatccttcccgtgaccagcgccgatgtgcagctggaggccgtctttgagaacggggcccgggtggtgggggagtccaagatcagttcctttaagaaagagcaggactgccgcatcgcccatgtggcactgctcccggagcggcccgccgccctcccggccgccctccaggccattcgggaggcggacctgatcctgatgggaccgggcagcctgtacaccagcgtcatccccaacctgctggtggagggggtggtggaggccatctgccgctccgaggcgctgaagatctatgtgtgcaacatcatgacccaggagggggagacagaggggtacaccgccgccgaccatgtggacgccctgctgtcccacggggcgccggggctggtggacctgtgcctggccaactcggcgccggtgcgtcccggcctggtggagaagtaccgggaagaagacgccgcccccatcctggtggaccgggagcgcatccgggccatggggctggagctggaggagtatccggtggcctcggaggggggcgactatgcccgccacgacccggaccggctggcggcggcggtgctggacgtgtaccgccggcgggcggtgcgcatcttccggggcgaacagcggtacatcattgaggagtgagaccatgtcctttgcaggagagaccaagggggagctgtgccggacggcgctgaaccggaaatgctgcacccaggcggaggcatacggcgttctgctttactgcaacaccttttccgggcgggagatccgcatcatcacggagaacgaggcatttgcccagcggctccctatcctgttccgcaaggcgttccgcctctcctttgaccgtctgcctgatggggaggggaagtacagcttcggcatcacggaccctgccaagctggcagcagtgagcgggaccttcgggatggatgcgggcagtctggcaaaccacgtgaacttcgccgtgctggaggagccctgctgccgggctgccttcctccggggggcgttcctggcgggagggtcggtcaccgacccccggaaggcctatcacctggagctgtccacctcccactacaacgtgagccgggaggtgcccgccctgatgcgggaggcgggcttccagcccaaggaggccacccggaaggccaactatatcgcctatttcaagcagagtgagcgcatcgaggacttccttaccgccatcggcgcgcccctggccgccatggagatcatgaacgccaagctggagaagaacctgcggggcagcgtgaaccggcgggtgaactgtgacgcggccaacctggacaaggcggtggaggcggcccaggtccagctggaggcgatccggagcctggagcagtccgggcagctggagggcctgccggacaagctgcgggagacggcccgactgcggctggagcacccggaggacactctggcggagctggcggccctgtgtgacccgccggcgaccaagtcggccctgaaccaccggctgcgtaaactggtggagctggggcaggcccggggcgagggggcggggcacacatgaattcggagcgaagcggagaattcccgcagggcgaattcagttcgcccgaggattttaagccccaagggctcccacagggtctgtgaccctgtgggaaggacccgccggcgaccaagtcggccctgaaccatcggctgcgtaagctggtggagctggggcaggcccggggcgagggggcggggcccggcaaaactatctgataccacgggagagatctatgaccttgatttgttatctgaccgccggagccgtcaacctgttctggctgatcctgggggacaggctctcgctcccggtgcagatggcgatccccatcctgaccgtgctgctggcagggaccggggtgctgctgcgtctgaggaagctgcggggagagcagcggcggcgttaccgcacgggggccctgtgggtcctgctgctctactacctgtgcatcctgtcggtgctgctgtttttcggcgggctgttccacctggaccggggctatggcggggctgtgaatctggagcccttccacaccatccgaaactatatcatctactaccggcggacgggcagctttgtcagcgtgaccaatctgctgggcaatgtggtgattttggtgccgctgggggtgctgatgccggtgatgttccggcctatgcgccacttctggacctttctgcccctggccgcgctggtgtcctgcggcgtggagtacatccagtgggtgaccgccaccggcgcggcagatgtggacgactccatcctgaactttatcggcgcggccctgggatacctgtttacccggctgtgtcagatcacagcgggcatgatagcaaagcggaggagccgcggggaataaatggaggcctttggacgatatgccatctggcaggggagacccttgaaaaaggcggcggagggatgatatggaacaggaaaaagtattcgccatgaagctgtcgaagatatatccactgctgacggccaaagcggagcggaagggccgcacccggcaggaggtggatgaggtcatctgctggctgaccggatacgaccgggcgggcctggagcggcagctcagcctggacatagactatgggacctttttccgggaagcgccccggatgaaccccagctgcgggaagatcacagggaccgtctgcggcgtccgggtggaggagatcgaggacccactgatgcggaagatccggtatttggacaagctgatcgacgagctggcaaagggaaagcagctggagaaggtccttcggaaatagagactctttgtgatgtgtgccgcggggcggccccgaccggcgtctccgtggggccgccctgctgtataggatttgagaagaacagacctgaccgacagagaaaagaggcagcaagaggtcctgctccaaatttgtttgcgtcttttccggagaagaaggaggggcttatggcctttgtccacttacatctgcatacggaattctcccttctggatggcgcctgccgcatcaagaagctggtggagcgggtccgggagatcggacaggacgcggtggctatcacagaccacggggtcatgtacggggtggtggatttctacaaggcctgcaaggaggcgggcatcaagcccatcatcggctgtgaggtctatgtggccccaaggggccggacccggttccagaaggtccacgagttcgactcctccttccaccacctggtcctgctgtgccggaatgaggagggctaccgcaatctctcctacatggtctctcaggcgttcctggagggcttttacatcaagccccgcatcgacctggacctgctgcgggagcactgcggcggcctgatcgcctgctccgcctgcctggggggcgaggtgcccaagctgctggctgcaggggactatgacaaggccaaagaggttgccctggagatgcgggaactgttcggcgcggatggctactatctggagctccaggaccacggcatcccggtccagcgccaggtgaacggggggctgattcggctgcacgaggagacgggcatccccctggtggccaccaacgacgcccactatctgcggaaagaggacgcggagatgcaggacatcctcatgtgcatccagatgggcaagacggtggatgacccaaaccggatgaagttcgagaccgaggagttctacgtgaagaccgaggcggagatggccgccctctttcccaattacccggaggccctggagaacaccgtgaagattgcccagctgtgcaacgtggagttcgagttcggcaagtaccacctgccccacttccagctgcccgaggggtggaccgatggggacgcctacttcgagaagctgtgcatggacggcttccgctggcgctatccctcccagccccaggagtatctggacaagctgcgctatgagatggacatgatccgcaagatgggctttgtggactacttcctcatcgtctccgacttcatcgcctacgccaagggccacggcatccccgtggggccggggcggggctcggcggcggggtccatggtgtcgtactgcctgaacatcaccgacctggaccccgtgaagtacagcctgtacttcgagcgcttcctgaacccggagcgggtcaccatgcccgatatcgatatcgacttctgcatccgccgccggcaggaggtcatcgactacgtggcccaaaagtacggggcggaccacgtggcccagatcgtcactttcggcaccatggccgcccgggcggcggtgcgggacgtgggccgggtgctgaacatgccctacgccgacgtggatgtgatcgccaagcagatccccagcgggccgggggccctgcatatcaccctggaggacgccctgaagctgtccaagcagctcaaggagtcctacgacggcagccctcaggtgaaaaagctcatcgacaccgccagggccatcgagggcatgccccggaacacctccacacacgccgccggggtggtcatcaccagccggccggtgagcgattatgtccccctggccaaaaacgacgacctggtagtcacgcagtacatcatgaccaccctggaggagctgggcctgctgaagatggacttcctgggcctgcggaacctgacggtgctggacgacgcggcccggctggtccggcgcagccacccggacttccacaccagccagatcccggaggatgacccggccaccttccagatgctctctgaggggcgtacttccggcgtgttccagatggagtccgccggcatgaccggggtgtgcatcggcctgaagccccagagcatcgaggatatcaccgccatcatcgcgctctaccgtccgggccccatggagtccatcccccggttcatcgcctgcaagcacaacccggagaaggtcacctacaagcaccccgctctggtgcccatcctgtccaacacctacggctgcatcgtgtatcaggagcaggtgatccagatcttccagcagctgggcggctactccctgggccaggcggacatggtgcgccgggccatgtccaagaaaaaggtgaaggacattgagcgggagcgggagaccttcctccacggggacccggcgcggagcatcgccggctgcgccgccaacggcatccccgaggcggtggcccagagcatctacgacgagatctatgactttgccaactatgccttcaacaaggcccacgcggtgtgctacgccgtggtggcctatcagacggcctggttcaagtgccaccaccccaaggagtacatggccgccctgctcacctcggtgctggactccagcgacaaggtggcggagtatatcgccgagtgcaaggagtggcacatcagcctgctgcccccggacatcaacgagtcggaggcggacttcaccgtctccgaggggggcatccgcttcggcctggtggccctgaagggtgtgggccggagcgtcatcaacagcctgctggaagaacggagcaagggtggaccctttacagactttatggacttctgcgaccgcatgttcgaccatgacctgaaccggcgggtgctggagagccttatcaagtccggcgcctttgaccgcatgggctgtaagcgctcccagctgatggaggtcttcggccaggtgctggacggcatcgccgccagccgcaagcggaacgtggagggccagctggacctgttcggaatggggggcggggaggcggagcaggcggccctgccggctctccacctggccaatatccctgagtacaccccccagcagctgatgaccatggagaaggaggtcaccggcctctacctcaccggccaccccatggacgcctatcgggaggcggcccgccgcaggggggcggtgaccatcggctccattctgagcgacttcgcccgggaggacggtcccaccgtctaccgggacggccagatggtgaaggtggctggcgtgatctccacatataaaaccaggaccacccggaacaataccttgatggcctatgtcagcctggaggacgacaccggggggatggagctgctggtctttgcccgcgccctggaccagagcggcggatacatccgggagaaccaggccatcctggccagcggcaggatctccgtccgggacgagaaggagccccagctgatggcggacgagatccgccccctggacacacccgaggcggaggagcggcgggaggcgggggagcggaagctcttcatccgcctgcccggcctggacgatcccaggacccgaaaggtgaagctggccctctcctttttcccgggggagcagccggtggtgctgtattaccaggatatccggaagcggtccaagggatactgtatgatacacccctccctgctggccgacctgagagagcggctgggggaggagaatgtggtggtccagtgacccacctcccggagagaaagagagacggggcaggaggcgcttccaacatgaaatggagaaaaatcaaatatatcctcttccaccgctccgtgctggcggggctggccctggtggcccaggtcgcggtgctgttcgtgatggtcaacgaatttaccgcccattttgactacttctattggttctgcatcttcgtcagcttcctggctacggtgtggatcgtcagtgaccgcagcgagccgggctataagatcgcctggctggtggtgatcctgccgttcccggtgttcgggggcatcctctacctattgctgggcggcaaccggatctctgagcggacccgccggaagatgaagggcattgcggagcgcagcaacgaggtgctgcggggggatttcaaggcggacaggctgacccatttggatgaggacgcggtgggccagatccgctatctggagcggtacgcctcctgccccgcctacaccaacacccggaccgagtatttcccggtgggcgacctggctttcgtgcggatgctggaggagctggagaaggcggagcgttacatcttcctggagtatttcatcctccaggagggggagtgctggaacgccatcctggacatcctggagcggaaggccgccgccggggtggaggtgcggctgatctatgacgacttcggctgcatgttcaccctgccccgcacttataatgaccagatggcggcccggggcatccagtgccgggtgttcaaccggctggtcccggtgctgaccctgcggatgaacaaccgggaccaccggaagctgtgcatcatcgatgggaaggtgggcttcaccggggggatgaacctggcggacgagtatatcaaccgccgggtgcggttcggccactggaaggacagcgccatcctcctgcggggggaggcggtgtggtccatgaccgtcatgttcctgtccatgtgggactactgctccggctgggaggaggacttcgacctgttccggcccgagtccatgccccggctccccggctccggctgggtccagccctacacggatacgcccctggaccacgagaaagtggggcaggcggtgtacctgaacatgatctcccgggcccgggactatatctatatcaccacgccctatctgatcgtggacgtggccaccaacacggccctgtgcaacgccgccaaagcgggggtggatgtgcgcatcatcaccccccacatcccggacaagcgctccgtgttcgaggtgaccaaggcccactatccgcctctgctggaggcgggggtgaagatctacgagtacacgccgggcttcatccacgccaaaaactttgtggtggacgggcggtatgccacggtgggcaccgtgaacctggactaccgcagcctcttcctccactttgaggacggtgtctggctgtgtgatgccccctgcatcgcggacatcaaggcggactttgagaagaccctggagcagtgcgaggccatcagcctgcgtcgggccaggcacctgaacatcctggtccagctctatcgcagcgtcctgcgcatcttcgccccactgatgtgagaaaagcctcggcgctccgaatcatcggggcgccgaggcttttgaggcttccgggatctttaccgcttccgcgccttctccttgcctgtgacctcctccatatggatgccccagacggcggtggacggcaggctgcggcggacggcctcctcaaagccctccatatgtccgggggtcatcttttcacacagggcccgcagggcagcggtcttctggccggggtctgtgacctcaaaggcggtgccggtgaccacggcgctctggaagaaggtggtgtacatgttgctctccgggaggtaggcgggctggtcggcggccacaaaggtgacgcacaccctggggtcccggcgaagcaggtccagcttgcggccctccagggcgcagtggaaaaacaggtcgtcccccacccgcaccagagagagggggatgcagtaggggccctctccgccggtggagagggcggcgacgccgtgcccgcagcggtcgatcacgtcaaaggcaaagctccggtcccgggctctgtctgatcttctcatcaggatctcctctttcctgcatcaaatagactggagctaccatagcacaatttgggagggactgcaagaaaaacctcccctccggcaggaggggaggttttggggggtcagcagctgcgggagcagttgcggctgcagctgctgttgggcgggaagaattcgtccacggggaacttgacctgccggaagacctcgcaggggtcctcctggctgcagtcgctgccgcagtcgcactccttctccggcatgcagtagtcgtagaccggcatgagcagctgggtatcccgctccaggcggatgatggagaactggcccagggtgacgtacaggcggtgtacgtcgccgccctgggtgagggagtccccgaagcagtccaggatggcctgggggatctcggtgagggaacagtcgcaggggcggcactggcatacgtctaccagcttcatgttcagaatgatggggtccacggcctcagccattgcctacaaaagcacctggggcggcgggaggctcctccgccggccgggcggggtagatggacacatcccccttttcgctcaccgtgatgcggtcgatcagctgccgcagctccccgttggtgatgtcctccagggagaggacgcggcggacctgctccgtgatctccgcctccagatcccggggcgggtcccgcgtcagccggtccagatcctcccggaggcgggcgccccgctccgccaggagccgcagccgccggcgcagttcctccatggagagcagatcgccggcgtagagctccagatagcgggcacgctggccctccagctggtccagacggcgccggagagcggcggcagggtcctccgcaggccgggaggagcgggcgtccagccggaggcgtaccgcctccgccagcgcggcgggggaggagatctgggcggccagccaggcccggagctggtccagcagcccctcctccgggaggatggtgccgttgccgcagcggctgccagcgtactcgctgtggatggggcagtgccagtagacatactgccgcccggaggggtaggccacccggcggcgggtgaaggcgcggccgcagctctggcagcggatgagggtggagagggggtagcggccgctgtatcgggtgggaggggcggagccggactgccgccgacgctgctccatcagccgggccgcctcctgaaaggtgtcaggggagacgatggcccactccggcctgtcgtggtggtagtgcatgtccggagggagacgctggatctggccggagaggaagtcgctcacggtgtatttgtggttgacataatgaccgcagtagatgggattttccaggacgcggcgcaccccgcggctgttccagctggcccccagtttggtggacgccccccgctcctccagagcctgggcgatcttccggcagcccaggccctggaggtagaggcggaagatctcccgcaccacctccgcctccgccgggacgatccggagggtgaagttgtccagccggtcgtagccgtagatgcgggggggcaccctccccttccgggaggtgatgtccttcccgaacttcacccgcttggacaggttggcgctctcctcctgggcgatggccgccatgatggtgacgatgaattccgattcccccagcaccttgagggagttgttgacaaagatgcactcgatgcccagggccttcagcctgcggatgctctccagggagtccacggtgttccgggcgaagcgggagatgtccttgaccaccaccagctcgaactccccccgctcagcgtcccggagcatttggaggaagccgtcccgctttttcagccacttgcctgagatcccctggtcggaatagacccggaccagggtgtggcccctggcccgggcgaagtcctggaaaaaggcctgctggtgctccaggctgtcccgctgttcctcgtggtcggtgctgacccggccgtaccccaccatcctcatctcctgtcctccttccggggcggggcgaggagtctggcggcgatcagctgggacagcagccgctccagcgtcttttggtcctgtggaaaaaaggtatagtgcagcatatcgatcaccccagtcatgtgtatggaggcggcggaggagatatccctggcggggcaaaaaaagcccctccgggccgtcagggcggaggggcggagggatcagcggaggaagcggcggatcagcttctcgtggaggggcagatagggctggtagcgcatgggcaggtccatccaggtctttttctccacgatgctcttgcggtgggagaaggtctcgaagcccaccctgccgtggtaggcccccatcccgctctcgcccaccccgccgaagcccatggcgctggtggccaggtggatgaccacgtcgttgacgcagcccccgccgaaggagcagcgctctgtcacggcgcgaatgtgccctttgttcctggagaacaggtagagggccaggggcttgggccggtccttcagcagctccagcacctccgggatgtgggagaaggtgaggacggggaggatggggccgaagatctcctcccccatgaccgggtcctgccaggtgacggcgtccatcaccgtgggagcgatgcgcagggcctcctcctgccaggtgccgccgcacaccaccttctccggctggatcagccccagcagtcgctggaagtgcttctggttgacgatcttcccgtagctggggctgtccaggggggcggggccgaactggacagtgatctgccggacgatctcctccagcagggcgtccttgacgctctcctggcagaggagatagtcgggggccacgcaggtctggccgcagttgaggtattttccaaagacgatgcgccgggctgtcagcttcagatccgcagtctcgtccacgatgcaggggctctttcctcccagctccagggtgaccggcgtgagatactgggcggcgtggagcaggacctcccggcccaccgcctggctgcctgtgaagaagatatagtcgaacttctgctccagcaggcaggcgttctcctgcctgcctccggtgaccaccgagacatgctccgggggaaagcactccgccaggagccgggcgatgacccggctggtggcgggggagtatgcgctgggcttgaccaccgcagtgtttccggcggccagggcatcgatcagggggtccagggtgaggagcagggggtagttccacgggctcatgatgaggacggtgccatagggggagggcttgacatagctccgggcggcgaactgggccaggggggtcctgacccggcggtcagcggcgaaggcgggggtgcggcggatcatataggtcagctcactgaggaccatgcccacctcgcacatatagctctcaaaggcgctcttgcccaggtcggcccggagggcgtcgttcagctcctcctcccgggcagccactgcggacctcagggcgcggagggcctcaacgcgcgccctggccggcagggtcgcaccgctctgaaaataggccctctgccgggcgacgagctgccggatctccatctgatccatgggtgagtcctccttttattatcgtgtgataaaaacgctccggttctcccgcggcccaggggacgggaacgggatacaggggatgtcaggggtgtatctgggagtatagaggagagagcgggatctgtcaaccggcttttgacgccggtggcccggacacggcctcttgtaggcaatggcctccacgtgtgcggtggggagactgctgcccatcagatcctggcagctgcacacgctgggggagtcggagctgaaggacttggcgcccccctcgctgccgaacaggatggcccgcttgtcaaatacggccagaccgcatacctcgatggggcgggcggccccgatgaacgcatcagcggtgatccgataaaaataccgcacatccacggtatagaacccgcggttgaaccctacgggctccacatcgatgtaggcgtacagcagctcggctgtcccggccttgaccgacagggcccggtcaaggacctcctgcgacccgcaggtgggatagacccgcagatcctcaatgcagtctttgtcggaagatatagcgctttatatattatgaaaatcccagggatcaagcgactttgcggggatcagaagggctttagatccagctggatgtcaaaatcattgggctttgtctttttggctttggagtaccacacctggtcgatcacggatttgaggagtgcgttgcgctgggcattgtcgctgctcccgtaggcatccaggacggctctgatccgctgagccagggcctgggggtcagccgttttggcgtggtcgatggtgcggcgggtctccgcctccttgcgctccagagcggcgatcttccccttgaccgcctccatccgctcccggaaggtggggatgtcatactcccccagctccagcagctcatagagacggtttttctggcggttggcgccggccagctccttctggacggccagcagggagagctccaggggggaggtatcctgcacaccggaggcgggcttgcgcacggaaagctgatccagcgaatcctggagggagtccaggacccgcttttccaccagctcgaattttgtgctggcacagcagccggggcgggtgcagagcagataggggtaccgcttcatgaccatgcgctgcatgttcatgccgcagttggcgcacttgaccagtccggccagcgggctctttactgtgccatcccgcttggaggggatgtagcggcccgccatgatcgcctggacccggtcgaacagctcccggtccacgatggcgggatgcaggccgtcggtgatggtccacttctccgggggctggtagatggtgatatgcttgggatttccgcgggctccctttcggatgtgcttcttctggtcccacacgatcttgccgatgtaggtggggtttcggaggatcatattgacgctgctgcggttaaattcggcggagcggtggggtttggcgcccagcgcgttgacctggcgggccacggaggtgcagccgaacccctgggcgtagaggctgaacatcatctggacgaatctcgcctccggctcgtagatctccagggtgggcttgcggtcgatgaccgttttccggtagccatagggggcgttggccacgtagcaccccgcctggatggactggcgcaggccgcgctggagccgcttgttgatgatcttgtactcccggcggctcataaaggtcttcagctcggcgtattcctcgtcgatgtcgtctgacaggtcatagactttttcaggtgtgatgatcagcgtgtctgattcccggaaggtgtccaggatgatgccctggtccttcatccggccgcgggagagccggtccagatccatgcacagcacggcgtcatagc

SEQ ID NO: 13614 - DNA, 21035 bp, Unknown
  gut microbiota DNA sequence
cctccgggtagatctcaatgaggtggatctggtgggcggcggcatactccacgagggccttctggtgcttggacaggacttcctgggtgtccatgccctcctccaggcggcttttgcggatataggcggccgcatctgtgccggccagatccatgacagtacggtgatccatagcgcctcctgtgtcgaaagaaaacgaatgttcgagtgtggcggttttgagatgccgccccggggtggggcggcagaaagaggatctaaatttgagaagtataaattgggtagttgagttctgacaacagtgtcagcgtaaagtcgagaaaggtaacagaaaatcccaagatagtagcgcagtttcctaaaattgatatgaacgcttcagcatctgttggaaaggccatacatttgagacaagcgagaaagaagagtgcaatgtaggaaaaaacatataatatgatctcaggaaagaagcgcctgggatgtaaaagatgatttacaatgagaataataatagaaaagaacagggcaagacaggatatcaatgcatagacaatggctccaacatcaggtgcgaaaatagaggcgatccctgaaaaagagtaaaggaagatggcggataaagctaaaaagagtacgatacgtaaaaacttagggttcaacgttgaaaattgagtgattttcatcagtctgcctcccttcctggcgaatagccaacgaggctgtttatcctgaagaaggagcgaattgtacatctgaattctaactgaatatgaaaaggggtcaatcagcctgatagaactgtgccagttcagtgagcggggagatataccggtcccgtatggcactgacgacctgggcggcctgtgtatcgtcatagacgtgggaggtgacattccgggaggctagcatatccagccagacctgctcgtcgtggatcaggccggcggcataggcggctttgaaaacctgcttggagaacacagcgtccatggcggcgccctggtcctccatgtactcccgcagggacttccaggccagctcgaaggtaaactcaaagcgctggatcacgccgtcccggatcacagtggagcccggggtccccgcatactccgccagggcctcggagagccggacaacggcgcggcagaagttttcacatttctgaagcatacagggtcactccttcccgttcaatgttgtccaacagtttgggggaggtattcgcgtcaacacagaccaggtcaaattccagaagggtgggcagatcctccagtgccaggcgcagccggccggcctgggcagcatccagcccaaagacggccaaatcgatgtcactgcgttcccggtcgtctccccgggcccgggagccgaagaggacgagcctggaagcgtccgcgtcccgcgccagagcggccagctgggggagcagcgcgtcaggaagatggatgggcatggaaaagtctccttatttcaacgtgagaaaggattttagctttataggcaaatccgcaagcgattgcggatttggtcatgcgcgccggtacaggtcccggagctctgccagggtgtaggtccgtccggtcatccggctgaggatctggcaggcggtgggccaggagcagccgcagtcatcaatgcagtggcggagcgcggcggccaggtctgtttcggtcatggtgaggacttctttcatagataacgattcagaacttccgacaagttatctttgtattgacttaaatcgtatatatcggataggctgtatttagtctcttttttattttcgtctggaataattaacgttttctgattgtcggtaagacgaagtctacaaatccattttctagagtttcctttatagaggatgttgatataagattcagtatccttataggtgatatcatggatatctacgatatcagagagcatatttttgataatgaagaagctttccagttcttcctctgtagtaacaatcgagctggtttttttctcgggttcaaccggatcttgtggagcaggattatcgtctggtgccttttggtccgtaactgaaacactgccaccagttccacccaaagcaactttgatcttatcattcatcatttcactgataagatcattgagagcctttttcaaaataggacgaaacttttcaatgacattttgtgtctttgcaccagagtagcatccttgcaggaaaaagcgaataaagtcgtctgaaggagtgtctaattggtttgtaaagatgctcttaaattcatgtacatattttagttcagaagcagtgctgaaaatagaatcaatatcaaatactcccttactgaacttttttagctcggggacttgattttcacggatatctaaaatgttgatgctcaaaaagggatcatcatccattttgttggggctgtccaaatcggtataaaagcgatagataaggccatttgtaagaattgcaaattttgccgttgtagtaccaaagtaacgaaatagctgagagtcgtgacgatccagattctcctgaatagatttgcactcaatcaggataacgggctccccttctttgataatggcataatcaactttttccccttttttgattcccacatctgctgtaaactctggaacaaactcttgtggattgaatacgtcgtagccgagcatggcaaagaaaggcatgatgatagcagtttttgtggcttcttctgtttggatagaatctttcatactttctactcgcttagaaaattgtttcagttgatcgataaagtccataatatgccctcttttctctatttttttctgctacctagcagttgcaaggctaaactaaaatggaagaattgcgataaaattccagagcattgtgtaaaaaaaactctgtcacaccaaaatattcggccagttcccagggctcacgatatccctggagacaggcttctgccagctcgtcctgcgggacgagctttttgtatgcccatttgttggcccggttctcatatttctggcggatatcccgggcagcatagcggttataaaaggagccggtctcgcagtggcccagctcgtgggccagcttgaccttctcatcggccagagtgggcatccgccaggggtccatggcgatggcacaggagccgtcctccagcggaagcgagagggattctgcggtccccaggtcaaaccaatagatctctgtcccgtgttcctcggccagaccgtagagatccagcagatcagtcatgtttctctttctcctcccggcgcttctgggcgacaaaggcggcaaatcgctccacatcatcccacatggcgtccaggtcctcctgggtcagatccttctcgccaccccagaaggcggcctgaaggttttccctgaaattctgcttggcattgccttctccacctaaaaccagttctttaccaagcaattcatcggtagtgaccccaaaaatttttgccagttttaccactgtctcggggtttggagttgctttgtcagtctcccatctggcaacggcctgctgacttacaaataatttgcctgcgagttctttttgacttaaaccagcagccaaccgatacttgcgcagctgagtactaaacactgattccaccccctgttgctactagagtacaacataaaattgtaaatcgcaatagagaaaataaaatttgctattgacaacaacaaaaaatagtactatattaaacgcacaacaaaaagtagttaaaacaaaaggggaagtaactaatgcacaacattagggtgttgcgtgagaaaataggtttctcacaacagcaggttgctgagtccgtcaatgtaagccagcaggctgtagcaagatgggaaaacggtttggcaaagccaagagcggatttactgcccgaattagcggtgttattccactgtactattgatgaactctttaaggagcctgacaacaaaacacccccggccgagccgggggcgtgagaggggggtgaggagatggagagaagagatgtgtctttggagcaagctgtgagaaatttctgtattcgggtattggagggcaatggtcacccccaagaagtagcgatcctgccacagatgttgcaatacgtgatggggcatgatccagaagtagaaagccgccagaacgagctggcggcaaaggtcaactaggatttgtaagtatatcagacagagctttttttactgctttgcgaatagcagaattttgtaaatcgaatacattttttactctcaaccaactatattcgtttgcaaatgccgcaggatataactcttgactgaccaaagggtagatttccgaaaggcaggaatcaaatgccgagtcaacggctttttcgattgttgctttatccaccttgtttcacctccttcctaccgcccatattttaccacgggcgggggaggggaacaagacaaatgttcgagtgacagcagcacgaaaacggacaagcgccgatgaataccatgacgagggaggtgaccggcgtggaagtgacagagaccatggactattggtatgacatcgtgacccggaaggagtaccgggtcaaagtgattcgccgggtgggccctcatcaggtggaggaccaggatggaaatctggtccaggtgacggagtcggtcacctttgaggccagcccgcccatggggaccccggtgatctacatagacggggagaaggctgtgaaggccgatctggtcgtggaggtgacgcagactacggagtcaaacggagacaaggaatatcccttgacaattacgaaatggagcggcctgcatgagatccaggaccggcaggggaggaccgtccgggtggaccggaccgtattctcggacgccgggccgaagatgggcatctccaggagcatgattcggcaccgggagatcccttacaccgcagaagagagggaggagggccgccggaacatccagcgcgtggtcacccagtgcctccaggcgcaggggatctggtagggaggcggaaacatgtggtccagactgaagaaaaaacacccctggctctatgaggcagcggagtggggcatgctggcgctttcggctggggcctttgtcctggcctgcgccgtgtattttgggaggtaacagtatgatggcaaccatgacaacaccggcggatgtgtcggaccagctgatggggctgtacgggccggagcagctgagggaggtggagcgtctgtccacctacaactaccgggcccggctggccggcggcgagatcgtgctggccgtggtccggggagacggctccctggtgctgatcgagccggagatggacggatgaagggatataaaaagtcccggacggctcactcaaaccgtccgggacagttgacaaaggggtttgtcaaccatgagaacatctgtattataccacgagaacatgtgtttgacaaggggggattacagcagtatgggtgagatctatcggagcttgtactccgtcattccggccagggtgcgggacgaccacactctgcgccccaacgccaagctgctgtatggggagctgtccgccttagctcaggccgaggggtactgctgggcctggaatgccaggctggccgagacgctgggcatctccaagcgcacggtggaggacctgctccggcagctgcgggaccggggccatatccaaatggaggtggagcgggacccggacagtcaggaggtgctgcgccggaaaatctggatctgcggcccgcctggggtttcggtcccccctccccgtgattttacggggagggtccccgtgaaaatggagggacctccccgtgaaaatggcggagagaataatacaagtaatagtacaggagaagatcccccctatagtccccccaagggggaagcgccggcgcggaaacgcaagcggtcaaacgagcccaaggaggctccggactggaagccggaacgcttcgccgccttctgggcggcctacccctgcggcaagtccaagcaggcggccatccgggcctgggacaagctcaagccggacgacgctctaatccgggagatggccctgggactcaagcgggccatggagtcggaggagtggcagcggggcattggaatcccttacgcctccacctggctcaacaatcgccgctgggaggacgaggatacgcacctgccctccgcagtgcctgcccctacacccccgcccgcccctcggccctatcacctggagatgatcgacggggaggaggtggtggtctatgacggctgatctccgcccgctggacgcggaggcggcggtggtagggtccatccttatcgaccccagatgcctcccggcggtggagcagctgctccggccggaggatctggccttggagatcaaccgggttatctaccgggcggccctgtccctacggcggggggagcggcccatcgacccggtgctgatccaggaggaggtggagcgccagggggccaaactggaaacggcctatctcctggggctgatggacaacacgcccaccgcccagaacgtggaggcctacgccaaaatcacccggcggcactccctccggcgggcgctggacaagctgtgcgacggagctaagcaggcggccgcctcgggagagccaggggaggtgctggccgggctggcccgggacgctgtggagctccagcgggagggcgtgacagacgacctcatccggccggacgaggccctgatggccttctacaaccaccgggacgcagtggaccagggaaaatccaagggctgcgtctccacgggataccgagacatcgacctgatcctggggggcgggatgctctccagcggcatgtacattttggccgcccggcctggcatgggcaaaaccaccctggccctgaacatcgcggaccgggtagcggagcggacgggcccggtgttgttcatctccctggagatggacgtggagcagctggtggccaagcgggtggcgaggctgtccggaataccagccaaccggctgctgatgggcaagctctcggaacaggaatatgccaaaatggcccaggcggccggaaagctggagcaggtccccctgtacatcaaccggaagcccggggccaccgtggagcagatcgaggcattggcccggcgggtgccggggctggctctggtggtggtggactatgtgggcaaggtctcgcccaacgagagcagctaccgcaacagtgaccggtacaactacatgacggaggtgtccggtgacctgaagaccatggcgcggtcccttcgtctcccggtgctggtgctgtgccagctgaaccgggccagcgaggggcagaaggacaagcggccacagttgtccaatttacgggacaccggggccctggaacaagacgccgacggggtgatcttcctgtaccgggaggcctactataacccggaagggaggccgctgtacgagccggagcccatggaggtcattctggagaagaaccgccacggcccaaccggctcctgcgagctggccttctccatggcagtgtccaaggtcacggccataagcaacgatccaagagaggcggcgcggaaatattttcaaacggagccgcttcctgaacaaacaaaactggaggtttaatgccatgagaacctttgcaatcgtcaaccgaaagggcggagtgggcaagaccaccaccgccgtgaatctggcctatgtgctggctaccagctgccacctgcgggtgctgctggtggatgcggacgggcaggccaacgccacccagatcctgctcccacggggggagtacgacgggctgggggccctgatgcggggcatggctatctgctatgacgagctggtggtacataccgacgtggaggggctggatgtcctcccggcgtcggaggacctgtgggccctggacctggaggccgccggcggcgagggtggccggagctaccggaccctgcgggacatgcgggaggcggtggaagaggacggagcctatgacgtgatggtcatcgactgcccgcccaacctgtccgccgcctgcgtgtctgccatcctggccagcgacgccgtcatcatccccgtgctgtccgacgcctgctctgccaccggcgtggccgacctgatggagcagatcgacagcctgcggtatatccggccggagatccgagtggccggggtgctggtcaaccagtggcaccgctccccggtggtggaggatgcggcggcctatctccgggaggacgggcgggtgccggtatatgacaccgtcatccgcaggacggacaaggtgccggagagctcctgggcccggatggctgtccagcagtggagcccctggtgctccgccgccagggactaccgggcgtgggcggctgagctgctggcaaaggaggggctggaccatgagtaaaccggatctagggcggatcatcgcccagacgatggcgccgccggcagacgggcggaccattgagaccatcaccggggacattctggaggcccagcgtcggggtggggaggctgtcctgaccatcgggcggtgcctcatcgaggccaaggacatgttaccacacggagagtggctgccctggctggccgaaaaggtgggatactctgaaaagactgctcagaatttcatgcgcctggcacgggcgttctcaaatccgcaagcgattgcggatttgggggccacaaaggcactgaagctcctggccctgccgccggatgagcgggagcgatttgtagccgaccacaatgtcatcgacatgaccacccgccagctggagcaggccatccgggaccgggacgaggcccggcaggccgccgaggcggccaaggcggacgcggctgcggcggagcaggcccgggccaagatggaggaggacatgaagctgctcaatgtccgcttgtctggggcgcaggaggaccgggagcaggctgcacaggctgtggccaggctggaggcacagctggccgagctgaaggagcagccggtggaggtggctgtagagaccgtggtggaccaggcgaccatcgacaaggcccgagaggaagctcaggtggcggtgtccataatgcaggccaagctggataaggcacggtacgaaaaggagcgggcggaggccaggcagaaaaacgcagaggaggccctggaacaggtccggctccagctggaggagcaggccagagcggagaaaaaggccgccctgggggcggacaaggacgtggcccagtttgaagtcctctttgaccagggcaaggatctggccaacaagatgcgggggatgctcctgaaggcccggggccgggaggaccaggccgcagcccaggggatggccaaggccctgcgggccctggcggaagccattgggcggtgtgcggaatgagcagctggtttgagcaggcccgggaggattggatgaaggaggaccctgatgctcaataggatcgtgatcatgggacggctggggcatgagccggaggtgcggtacacccagagcggcaagccggtggcctccttctccctggcggtggatcgggatttcaaggataaggccagcggagagcgggccacggactggatcgacgtggtggcctgggacgccaaggccaaatttgtgcagcagtatttccataaaggccagcaggctgtggtagaggggcggctccagatccgggactacaccggccgggatgggacccgccggcgggcagcggaggtggtggcggacaatatctattttgccggcgccaaagccgccgcccccagcgagggtaacgcaccggaggagagcctgccgccagagcccggagagtcgttctcggagctggaggatgagggcgaactgccattttgaggaggagtcaatatgagccggaagacgaacctgcggaggctgtctgtgctggtgacggcgcagacgctgcataacctggagcggctggccgccatggacggcagccggaacctgggccgggtggtggacaagctcacccgggacaagatggtgtcgatgtggtggaagggggaattgactgatgacgcgggaagacgcggttgagatcctggagacagccaggaagacgtatcctgggaaatcggtaatcagggacgcatttacgctggccctcgccgccctccagcccagcaacgagccgctgacgctggaggaactgcggaagatggatggggagccagtttacatgactttcccctcagacactgggaatcaatgcggtcattgggcattagttgggacgcaaagatggggtgctgtatcgctgatttatggttgcggatggtcaagttatgaatccgccgtagaaactttaggggcaaaattttaccgccgcccgccggagggagagggcgatggagcaaaataagccgtggtgggtatcaacaaaagaattcctgccagatgaaggggaaaaagttttgattatcacaagatttggaactgtgacggacgcggcgcttagaacctaccttcatactgggaaacaaaaaatctgcccggtattgttttccccggacgcatataagccgaacgaggatgtgaaatggtggatgccgataccggaggacggttggcatgatgtcaaaaatgaacccccaaaagaaggggccatgtgcctgataatgggaatgtatgggaaaatttcaagcgcggcttggaaacgcccattcggagtttatgaaccggaatttatgccattttccggattcgaggttctattttggagggatatgccagagttgccgcaaggagtaaagctacatttttagccggagggagaggaggacacctgatggacattgagaagctgattgagcagttaaagagcgccgcaggaggaccagaaggcattaagatgtgccacgccgccgccaccgccctctccacgctccagattgaaaatcaggcacttagaaatgcggccagcgggttcaaggccgaaaacgagaagctgcgggaaatgtatcagaaagaaaaggcggtttgccatgctacgcaggccaagttggatcagatgaagcgggagaatgagaccctaaaacatgcattacaaaattggcacgaggaggactgacatggaacgatacacggaaaagcactacgatgggaacggctattatctcatctgtagtgggaattgcgaaacgtttaattgtggagactgcggcatcttagacaaaatcgttgaccgcctcgccgcctacgaggacacggggctagagccggaagacttcaagagaacattcaccgaggacgcactgctaaaactgacaggccagcttctgggcgttacgcctgaccgcctccgcgaactggcccaggcggaccgggaggggaggtgcgtggtgctgccgttagatgattatacctggactattcgaggggacattgttcgtggcattatcaaagcaaattgtcgggctgcgaagaaagaggccgaggccgcactacggagggagaagctgatggcaaataaacctgtgattggctatcaggtatgtccttactgcggcggaaaggtccctgtaatttgggatggaaaccgcaaggaaacctgtatgtactgcaagaagcggtttcaactgaagcggcagaaactaaaaaacaccatgcgggtcaactgcccgccggagggagaggtgggcatggttaaatacattggaaacggaggagatcaaaatggcgcgactgacatataagactaaggacgggagctgggggctccggggggtgccgtggacgcagctggcggcactgccgccgagggtgtatggggccctggccaagctgaaggacatggaggagctggtagatcagatcaatgatccagccggaggtcggaatggtcaggcagacctggcaatggaggatctgctgggccacggggaaacgcggacaaaagagggaagggagctgggaacagaatggatcatgaagcggttttgccggatcgagtgagagagccgggctccgtcctggtgatccggctgcctatccagaatgaggtgcgctcgctccagaattaccggcggtatgtgctggagtccattgcccaaggaatcctggtgctgggcaaggatgtgacctactgtgtggagcagcttgggtggattcctccggtggtgctgggggaggagccgccggtgccggaggagccggaaccgtccagtccgcaatgcacagggagaaacgctgcggagaagcggcggatctttgaacggctccagctgttccggggggccaatgggctgggctgtctgcgccggatctctgataaatgtacgtttggcatcacggacgacctgctccgggacatcctgaccggcaatgcctccccgaccatcaaggagtggcgggagatcggccgggcgctggacgagctggagggaaagggggccgccggtgagtaagaccttgaagcaggtccgggccggccgcctcgtgtgcgcggtggtctacaccacggccgccgccggagactcgcccagggccagggcccagaagcagcgggcatctaccgccgcccgggaaacgctgaacgccaggacctcattccagaagctggagcggacactggcggccaattttgacaatggggacctgtttattaccctgacctatgatgacaagcacctgccggaggaccgggaggcggccatccggcgaatacggtcgttcctctccaaactgcggaaggcccgaaagacccgagggcagctgctccactatatttatgtgacagaaggtggatgtcctggcggccggctccaccaccatctggtggtcaacagtaccggagaagacctggaggagatccgccggctctggatctatggggacaacgtagaggtccggcggctggagttcaatcagggccacacctatgaggacctggccagctacctgaccaaggagccgcgggagtgggggcacccacaggtgggagagcggacctggaccccctccctggggctggcccggacagagtcggagacggagaccgtcccggactatgtaacactggcagctccacccgaggctattatcctgcaaaatcagggacctatccgcaatggatacggcgaatttgcctggatcaaatatatgctgccctaccagccggaccggagacgggccaggagcaagcggcggcgcagacggaaaaaagaataggcttttctattcttttcggtctcgggggtaagtatattctctttgatttctcagaaaaagggggcaaaaagatttgcaatcgaacatgcgttgtggtaaaatcatcgtgagggatggatgggtgatctgcccggtgtgccaacgggggaaactcctgaaggtccgcgcagacacgaccgcccgaaacctgccacgcaagtgcaaacgctgcggacaggagaccctcgtgaatatcgaagcgcctgagcccgcgtccaaagtgaccagcgcctgagccgatgacaacccgagcagtcgggtgtcgtggcttgggcgctttttgttttgcctggaggtgatagcccatggccctgaagccgctcaggccgtgccgacacccggggtgtgccgccctgacccgggaggggtactgtcccaagcacaagccccagaaagcccctcgccgggtctcggcggaatatcacagctggtacagcctgcctatctggacggacgacctgcgcccggcgcagctcctgcgggagccgttctgccgcgagtgcgccgcgcagtatccgcccggagaccccaggcaccgcacccgggcaacggtggtggaccacatcaagccccaccgggggagctggccgctgttcatcgacccggccaaccaccagagcctgtgcaaacgatgccatgaccagaaaacggcacgggagcaggcagaagaacgacggaaacgaaacagaatttgaggcttcggttggactggaagctacgtccgcgcctggatgcgcaggcgggcacagaggctcgtgcgcgggggaaagcctgtggctttccagacctacccccaccccaagaaagttttgcgggtgggggcgcaagaccgcaggccccctcgtttgtgagaaaatgtccccgatcagggatctggggggatggaggtgaatgggatatgccgacgccggtcaaggcgctggagaacatgagcaagaatctgactgacgaggagcggcagctccgggagcaggcggaggagggggtgatcccagaccggggacgggagtccaggatggaggagccggccatcatgaccaaaaacccggctgccaggcgctactggcggaaggtgctggagcggatggaggggctggtgatcctggacgacctggacagcgacgccctgggcgtgtactgcgtgatgatggcccggtatgagacccagtgccggctcctggcccaggcggccaaggagctgaagacggccagggacgccccggaggccgtggaggcggccgcagccaagctggatgccgtaagcggcaagatgcagagcctggagagaaacatcctccagtatgcggagaagctgggccttaccccatccggacgggtgcggctggcccagaagcgggcccaggcggccgcaggggccagggcggacccggacagtgatctgtatggggactgagcgcgcaggccgtgagcagcgaggatggaccggagcgagcgtgccggagcgtgacaagggtcggaggtggctgacatggctgtacggtggcagagcggcttgcaccaccctgtgagcgtctatgccaagcaggtgacccagggacggctgcgggggcagtgctgcaagtatgagatcctggcctgccagcggcacctggacgacctgaagcgccaggggacggaggactttccttatgtgttcgacacgacccgggcggaccggatcgttcggtggttcgggcagtgcatccaggtccggggggtggacgcggggaagcccatcaccctggagccctggcaggtattcgacctgggctgcacctacggctgggtacacaaggacaccggggcccgccgctttacccatacctacaataagcgagcccggggcaactataagagctcggaaaagtcatgccagggcatttatcacatgtgcggggatgcctgttatccgccctaccggccggagctggcccggttcgaggaggagccggaggtggagtgcgccgccgtggaccggacccaggccatgcgggtgctgggcgatgccaagaagatcgcccggaagagccccaatatcgccaagcggctcctggttccccggtccaaccccatcgttcaccgcacccggggcggctatatgcgggccctgtccaaggagaccaagaataaggactcgggcgcgccctgctactttgtggtggatgagtaccacgcacaccccacctcggagatctacgacctggggaccaactccttcggaaagcgggtccagtccctgctggatgtcatcaccaccgccggcgacgatgccggcagcaagccctgctacatcgaggagacctacgccaaacgggtgctggaggacccatcggtcaccgatgagagctattttgtgatgatacgggagctggacgagggggacaacccccacgacgagtcggcctggcgcaagcccaacccctgtctgcggtaccccagccggtacagcgagatcttacgcaagcagatccaggacgagcacaacgccgcctacacctccaacgactccagcaagatccggaaatttctcacccggcggatgtgtctgtggcaggtgggcagcgtaaaccactatctggacgagcggtgcatggcaaaggccaaggcggccatggtcccgccggaggagtttgcggcgctgactgacgggctccacaaccactgcggctttgacctgggcaagcggatcgacctgtcaggagcggcggcggtgtttgacctgccggacggccggatcggggtgaagctgcacggcttcatgccggagaacggggcggaccgccacgaaaagaccgaccgggtgccttacacggcctgggcacagggcgggtactgcaccctcactcccggagatgtcaccgacaacagctatgtgtacaactggatctgtgagggggagcgggagcacggctgggaggtggaggaggtggactacgacggacgcaacgccaccgacctggccatccgcatgaacgaggaccggaaccgggaggacttctgcgtggaggtgtcccagacctgtgcggggcagaacctggcagtcaagaccttccgggagctgctgctccaggaccgggtggtcatcgaggagagcccgctggtcctgtggtgccttcagaacgccattgagatccaggacaactatggaaacatcaagctcagcaagcggcacaaggacgacacagagcgtatcgacccggtggccgccatgatgaacgccctggcccgggtgctggtgaagcggacggcagggagcgatatcaacgagcacattttatccgaggattggggaatttgaaatgaaaatgctgagacggttgggccatgggctggccctgtatctggacgatctgctgctcctggcgggctgcgggtgcttcgtccgggcggcctgggaggcatgggggcggccggcggccctggcggtggccgggacgtgcctggtggcctatgccctggtgatcgcccgggcccggggaggtggcggaagatgatgctggccagatccgtggggcggcccagggcatccctggaggagcgcaccctgtcctgggacgaggtgcagcaggccctccgcagcgccttcttctccggcgaggagccggacaccggccagagcggcgcggagcggctgtccccggtggcggcggcccaccgcatcctgaccaactccttcgggctgatccccttcgggctctaccgcaaggagggggaggagcgggtggcagtggatactccagagctgaaccgggtgctgaaaattcgtcccaacgattacatgtcccccttcatgctgcggaaggtcgtcatgtccaacgccttctggcacggcttcggggcggtgtggaaccggcaggggcccggtggccgggtggtccaacgcatccccctgcccagcgactgctgcgccatccgaaaggaccaggagacggggcgatactggtatgactacaacgtggacggagtgcggcggacctttgccaactatgagctgtccttcctctactttgagacctatgacggcatccggggccgggggctgctggacctggcccgggaggccatcgccgtggacgccatgacccagcggtacgggaaaaagttctaccagaacggggcgaggctgtccggcatcgtggagatcaactctgatgccagcccggagacccgccagaaggtgaaatcgcagttccaggcctacgcgacggacgatgcctttgccgtggcggtgctggaccacgacatgaagttcaccccgctgggggtcaagcagagcgatgcccagttcatcgagacccgggagttcagcgtggaggagatcagccgcttcaccggcatcccaaagcacatgctccagacgggcaaggagagctatgacagcaacgcccagcagcggctcaactatgtgacggacaccctgctgccctatgtggtgcagtgggagagcgaggacagctacaagctgcccctgccccaggagcgggatgcgggggtctatgtccacgggaacgtggaggcgctgctgcgggccgacccaaccacccgggcaaacttctacgagaagatgatccaaaattctgtattcaacccggacgagtgccgggccaaggaggagaagaaccccatcccgggcgggtggggcaagcgattcctggtgaccaaaaatctgggctccctggagtccgtgctgaaaggagaggaaagcaatgcctgatatcgcactgcggggggagctgtgggacaacgacagcgccgacgtgctccgcttctggggctggcgggacatcacggcccccatggacatccaggccgccctggaggcggcggggggcgaggacgtgaccctgctggtcaactcccccggcggggacatgacggtggggctggagatccggtccatgctccggcgctaccagggcaggaccacggccctgtttcagggctacggagcctcggcggccactctggcggccacagggtgccagaccatccagagcgagccgggggccctgctgtgctaccacaaccccagcggcggggccgagggggactaccgggccatgcgccggtccgcggagtccctgcgcaacgcccgggactgcatcctggaggtgtacaccgcccggagcggggcccgggaggggatcaggagccgggaggaactgatctccctgatggaccgggatattttcatcacaccgacccaggcacgggagtacggcctgatcgacgagatcgtgggggcgggggcggaggtggcggacccggcggcctttgtggcagcagccggcagccgcatccggctgacccaggccatgcgggagggatatcagtcccacgtggcgggacagcgggccgaggcggcccggaaggaacaggcggagcgcatcctggcacggctcagggtgctggagcgattttaagcccgcccacccacccattttgaggaatagggggcggagccccctatgacccccgagccctgcgggcggctttgccgccctggggcatagaagcggaatagggggcctgagcccctatatcccctgggccctgcgggcggctgtgccgtctcagggctggcatacaagaaaacatgcacgatgagaaaggagaaaaacatggactacatggagaagatcaccgacctccgggcccggaaaaaggacctgaaggaccaggccgccaagctggtggaggaggacaagctggacgatgccaccgccctggccgaccagatggaggccatcaacaagcagatcgccgggctggaggccctggccaaggccagccgtgagggcgccgactccgtctatgacggcgtgctgcacgacggcgagggcaagcccagggacggcgggaaggacgcccccaagcccttcgctaccctgggggagcagctgaaggccatctctgacttccggaggagccacgtggaggacaagcggctccagcaggtgaacaacgcggccctgggggccaacgagggcaccggcgcggacggcggcttcctgatccagacagactttgccgggcagatcctggagagcgcggtgcagcagagccccctgctcaaccggctggaccgacagacctgctccagcgcggccaatgccatgcggtggctgagcgtggacgagaccgatgtgagcaagtcggtgttcggcggggtgcagatgtactgggccagcgaggcgggcaccgtggcggccagccggccccagttccgggagatgaagatggacctggagaagatgatgggctttgcctacgccaccgacgagatgctcaccgacgcggcctttatgaccggcttcttcggcagcgccttcaccctggcggcggaccggctgctgacggagagcgtcatctccggggacggggcgggcaagcccctgggcctgctccactccaaggcgctgctggcggtggacaaggagagcagccaggcggcgggcaccttcaccggggccaacgccatcaagatgcaggcccgggccatgccccggcaccgggaccgactggcgtggctgatgcaccccgacgtggaggagcagctgccctatctggccatccagagcggcgaggcggccaagttcctgtggaaccccgagggaggcctgggcaacttcgatacccagcgggtgctcaacaagccggtgctgtttgaggacagctgctccgccctgggcagcaagggcgacatcctgctggtggacccctatatgtacatcctgctgaccaagggtacggcgaaacaggactggtccatccacgtggagttcttgacggaccagaactgcttccgcatggtgttccggtgcaacggcgcgcccaaggtgagcaagcccctgaccatcaagaacagcaccaagacccgcagcccctttgtggcgctggcggaccggaagtaaggaggagcgtcaatgaagcgcatttttgagaagctggcctttgcaaacgtgtttgccccccagtctgtggaggcatccacggagaagaccacgggatatgtggacgcctccgggacggaggaagtggcctttctgatctctgccgccgccctgggaaagggaaagagcctgacggtgacgctgatggcggctgatgacgcctccgggagcggcgccaaggcagtgggggaggccgcggtatttacggacccggtggggacggagccccaggtggtggcggtgagctatcaggtgtctccgctcaacggccggtatgtggcggtcaagctccagcacgacgccgcggcggcggtggtgtgcggggtgctggccgcagcggatgggatgtatctgcccccggccaatggcatgaccctggtggtatgagatggccatcccggaggagctgaagaccgcggtgttcgcctactgccgggaggtggaggacgaggagaccctgccggccatgacggtggcctgggatgcggcggtggggtatctggagggggcgggggtgacccgccccgccccggagagcacccgccacggcctctggctgggggtggtgctgccccttaccctggatgcctatgaccagagggaggcccagaccgaggggcagaacaagctccaggacaacccggtgctgcggcggaaactgacccagctgaaattgacagaagggatttaaacccgcccacccgccctttttgaaggtgtgggggctttgcccccacgcccccggcagccctgcgggcggctttgccgccctggggcaggacgggggagagataagccccagggcggcggagccgcccaccagaccatgacccaggcgggcggaatggcc

SEQ ID NO: 13615 - DNA, 3558 bp, Unknown
  gut microbiota DNA sequence
tgtaaaacttatattggaataatggagaccaatacagtatgataatcgtataagatgctaatgaatgttccggcatccggcaggcgtttcgcacattttccacaaaacctcgccgccgtgccggcattatcaaggaggtttccccagctatgatgaatctaccctctgaaatcaccatctgtgaggtgggcctgcgcgacggcctccagaacgaaaagaccatcgtctccaccgaggataagctctcccttctgcgggacttggtggacgccggcttccccgtgatcgaggtcggctccttcatgcaccccaaaaaggtgccccagatggcagatacggatgacctgttcaaggctctggtcaatgaattccccggcgtggagttccgcgctctgatccccaatctgcggggcgtccagcgcgccgcggactgcggctgcaaaaaggtgaagctgaatgtctccgccagccgtgagcacaacctgaagaatctgaatatgactcctgaggagagtgtagccggttttgccgactgtgtcaaggccgccgcggagcacgggatcgaggtctccggctccatttccatgcccttcggctccccctgggacggccgcatccctcagtccgagatcgactccatcatcgatgcatatctggacgtgggcatcaccgagatctccctgtccgatacctctggcatgggcgtccccaaccaggtctatgagatgtgttcccatgtccacaccaaattccccactgtctcttggtggctccacttccacaacacccgcggcgttgccatggccaatatcatggccgccatggaggccggcatgacccgttttgacacctcctttggcggtcttggcggctgtccctttgtccccggtgctgccggcaacatctcctctgaagatgtgatccacatgtgcgacgagtccggtatcaccaccggcatcgacgtgcgcaaggtgatggccatctccagaaaggtgcagaccattctgggccacaccactgacagctacctcctgcgggcaggctgctccagcgacctgctccagacggtcaagtaaggggacccctgttactttcgcttcctgtcttcttattctcttctccacaacgcccggcctgtgtaaacaggccgggcgctgtggttccagcccatttccggaacaaaacagcgcgccccggggaaactcccccccggcgcgcgctgttttttgtgtcaggccaacggatttccaggtgcctcctgaatgttgtgcttcttggcatatccagtgagcatcagggtcagcgccccgtctccggtgatgttgcaggcggtgccaaagctgtcctgaagcgcaaagatggtcatcatcaggccggtgccgtcattgtcgaagcccactacgctgatgatcaggcccagggaggccatcaccgtgccgccgggcacgccgggcgcccccaccgcaaagacacccagcaggaagcagaagaggatcattgtgggcagggagggcagctcaccgtagagcaccttggacaccgtcatcacgaagaacacctcggtgagcactgagccgcacaggtggatgttggcaaacagggggatgccgaagtccaccatgtcccggcgcagcaccttggacttccgtgctccctccagggccacggccagggtggccgcggaggacatagtgcccaccgcggtgaggtaggcgggcccgtagtggcgcaggacctcccagggcttctccccggagtagagccccgccagcagatacagaactgccagccagaggtagtgtcccaccatcacgatcaggatcacgatgaggaagacgggcagctggcgggtgatgctgccctcataggccagcccgcagaaggtgcccgcgataaagaagggcaggatggggatcaccacccgagagaccaccgccagcaccacccgctggaactcctccagcacctgggtgatgaccttggcccgggtccaggtggccgccaggcccaccagcacagaaaagaccagcgcggacatcaccgacatgacgggcgcgatgtccaggttgaacagcagctccggcgcctccctcagcccctccgccgccgactggatggacaggccggggatgatggcgtagccggcccccattgacatcagtgcggcgcatactgaggaggtataggccagtgccagcgccaggaccagcatccgggaggcattgctccgcagacgggtgatagacggggcaataaagccgatgatgatcagcgggacacagaaattgatcagtgagcccagcaggtttttcagcgtcagtaccacctgcatgatcgtgccgcccacgtcggtgcctccgatccacaggtccgcagagcccagaccgatgatgatgccgatcaccacgccgatgatcagacggacgggaagactgctcagtatttttttcatactctccacactccatttcccagttcagaagccgccccgccttcacacagcacgcggagcgccgctgtcaggaccactataccacattatgcttccctgtacaagaatggagcctgtctttctctcccctcagccaaggaaccccagatgctccagcaggatcttgctccccatcaggaccaggatcaccccgccggcaagctccgctttgccctggaagcggtccccaaaagctccgccgatatacacgcccgccgccgacagcaggaaggtgatgacaccgatgcaggaaacggccggcccgatctccacccgcagaaaggcgaaggtcactcccaccgccagtgcgtcgatgctggtggccaccgccaggggcagcatggaccgggggcggaaggagctgtccacgtgctcttccccgccccgggactcccggatcatgttcgctccgatcagccccagcaggaggaaggcgatccagtggtccactcctgcgatgatctcttgaaagcgcacccccagcagatagcccagaagaggcatcagcatctgaaagccgccgaaatagattcctgccgtcacggcgtggcttcccctgacccgccccaccgaaagtcccttgcatatggccactgcaaaggcgtccatagacagtcctaccgcaataacaaacaattcccacaggctcatattgtggttcctcctcacacgcagccggtcctccccgaccctggaacgggcaaaagaaaagacctatctgtccccacgacagataagtctcatcgtttcatgcagagccaggaggactttcctccagtttgttgactctgccgcgcggcgcgccgactactcccttatatgtttatctagcttaccacgcgggaccacgctctgtcaatcatttttattgtactgctcctctctttatgcacccatcttttttcatttcggctgacgtttttccgcaaaaagtgttgacagcaggaccaagttatgctaatatatcacctgcactaagcgttttctgtgtgccgccaatatgcgcgagtggtggaattggcagactcgctagattcaggttctagtgtgcattacgcacgtgcggg

SEQ ID NO: 13616 - DNA, 7337 bp, Unknown
  gut microbiota DNA sequence
ggttgaaaaagggaggcgcttccgccggaagcgcctcccttttttcattatgccggtattccccggcgccgcagtcatttcccgcgccgggaccagacttctatggtatccaagggatggatcgaatgctctgaaagccgcttatttgatggccttggtccgcacgtcctcggccagaagggcctggaactggacgcaggacatggcgcccaggtcctcaccggagcgcatgcggacagagacggtctgaccctccatgtcccggtcgcccaccaccagcatataggggaccttctccatggtggcctcccggatcttcttgccgatcttctcgttgcggtggtccacctctacccggaaaccggccccatccaggtccttggagatctggtcggcgtactgggcggcccggtcggtgacaggcaggaccttcacctggacgggggcgagccatgcggggaaagcgccggcaaagtgttcggtgatgacgccgatgaaccgctcgatggagcccagcaccacccggtggatcatcacggggcggtgcttctggccgtcctcgccggtgtactccagctcgaagcgctcaggcagctggctgtccagctggatggtgccgcactgccaggtgcggcccagggagtcggccagatggaagtccagcttggggccgtagaaggcgccgtccccctcgttgatgacgaaatccttgcccatggcggtgatggcgtttttcaggatgtcctggttgcgctcccactcctccacggtgccgatgtggtcctctggcatggtggacagctcaatggtgtagctcaggccgaagacggagtagacctcgtcgaacaggcggacggtctcctggatcacgtcctgcatctggtcccgggtcataaagacatgggcgtcgtcctggttgaagcagcgcacccggaacaggccgtggagggcgccggacagctcgtggcggtggaccaggccgatctcgcccacccgcaggggcagctccttataggagtggggctggctggcatagaccagcatcccgccggggcagttcatgggcttgacggcgaagtccacatcgtcaatgacggtggtgtacatattgttcttatagtggtcccagtggccggagcgctcccacagctgacggttgagcatgatgggggtggagatctccacatagccgtacttcttgtggacctgacgccagtagtccagcagggtgttcttcagggtcatgcccttgggcaggaagaaggggaagccggggccctcgtcccggagcatgaacaggcccagctccttgcccagcttccggtggtcccgcttcttggcctcttcgatcttggccagataggcgtccagctcgtccttcttggggaaggcgatgccgtagatgcgctggagggtctcccggttggagtcaccgcgccagtaggcggcattgcaggcagtgagcttcagggcgttgcccttgatgcggccggtggagtccaggtggggaccggcgcacaggtcggtgaactcgccctgcttatagaaggagatgtgggcgtcttcgggcagatcctggatcagctccaccttgaagggctctcccttctcctccataaatttgacagcctcctcccggggcagctcgaaccgctccagcttcagcttctccttgcagatcttccgcatctcggcctcgatctgctccaggtgctcgggcgtgaaggcgaagggggcgtccatgtcgtagtaccagccctcgtcgatagaggggccgatggccagcttcacctcgggccacaggcgcttgaccgcctgggccatcacatgggagcaggtgtgccagtaggtctggcggtactcagggttttcaaaggtaaattcatttttgacttcttcggacatcaaaatacctccttgcgtccgcgggggtgcgcagggcgcacccccaaaaggctctgaggggcaaaacaaaagcgcctcgcccctgaatctccatcaggggtgaggcgcagtaaggcgctccacggttccaccctgcttgcggttttacagaaaaccgccgcttgtgaccgctgtaacgggcgggcccgtcccggtcatcccgggcggctcaggagtggtaccagccgcggcaatgtcgcaggacgcttccagcctttgcgtccctctctgggcgagtcccgcggcctcttctccatcagtgctcatttgacaaacgcactatatcaccaaacgcccgacctgtcaagtggggaatggaagaaggaaaggagccgatctcagcccagcacctcgaagagcgcgccccacacgtagtccaggtcctcaaaccggacagagggggcaaggcggaacacggcgtcctccccatcctgaaggacggtgacaccccagtcccgctccagccggtccagcaccccgccggtgtcctggccggggaagcgggcggtaacggtgccggacgcctcatccacccccgtcacttggggcccgccggggccgaagtcctccagccgggccttcaagtgccgggtcaggcgggccacccgggcccggtcaccagagggggctccgggccgggccagatccacccgcctcacagcttggtctccatcggggtactgaccacgtactcccgatagttcagctgacgaagcagggcggggagaacatccgcggtctgccggctgtcatccagggtaacataggcgctgttcagggcagcccggcccagctggcgcagaacgccgtaggagtaggaggcggcgctctgctccccgtccagaggaacggcgtccaggctctcctgccagcagacccagccctccgcctccagcccctcccacagggcctctccgcagtagacatagcgggtgcagctgcgggtctgctccgccagggcgcggttccctgcctccagctccgctcgggccccctccggggtgccggcctggacaaggatgccaacgctgtgcccggtgcccagcaggcggcggaccatgtccccatggacagagagctcctccggggcgaagaagaagacgccggattttccggatttctccaaagtggtgaggatgctgtccaacgcctcccccgtctggcagcggaaggccagataggtggggatggaggtggggtccagctcctggcccgggggatcggcggggaccgctggggtgacgtcaggggtctcgggttcctccacagggagcaggctcttttggtactccttcagctggaggttcatctggttgccggccgagtcgatgaagacatcgtcggtgaggatggagcgccgcccgttggaggcggtgtcgtcccggttcttgatgcggaccagatagccgtaatcggtgtggagataggagctccgcagcccgaaaaagtccaccacgatgttcagggggaggtagatgcggccgttgcgggtgatggcccggccgctgagcagctcgccggtctgctggtctacgcagatgccggagttcaggtcaaagaccaggatgccgctgaggctgtaaagggtgatggtgccgctgctctggctctgagtgaggctgacccccagggtcacgccgtagctggcgttggtggcgctgccgtcgaacagggaggcgggcacgtagaggacgcctccggaccagaggggcatggtgtcggaggccaggggcagcagcttgttgttcagggaggtaaagcacacctcctccaaagccgaggcgggggacagcagggccagacacatgaccagggcgcacagcagggcgccgagacgctttttcaaggggcacacctccgtttccagttgataaggggattatagcatagtataatgagaatcacaagcagccgcgggaaaggcgttttcatccatttttaagaaaggctaaaggacacttcaagcccgggcggttatactgacgtcagaacaggcagactgcccggaaaggagcgattcaggatggagatcacagtggagatggtagagcgcctgcgggagaaggcccccgtgtcctacgcccaggccaaggaggccctggagtacagcgaggggaatctgctggacgccctgatctatctggaggagaagggggccatcccccaggcggaggggacccggtggtcgggccgggaggagaaggagtcccagcccacggcggccgaactggtggtccaggagacaccggagccgggaaagaaaaagaagcacaggagcccgctgggcgtggtggtggtgtggcccaagggggagaagcggcggggccgctccctgcgggagctgctgtcccggctctaccgggtgctggtagataacgagctggaggtgtggcgccgggacgagccggtgacctccctgcccctgctgatcctgttgatcctgtttgtgttcgccttctatgtgaccattcccctgctgctgatcgggctgttcttcggattccgctaccgcttttccggccccgagctggagcgggacagcatcaacgacgtgatggagaacgtggccagcaccgccgccgacatgggacgccaggtaatggatgagctgcacctccagtatgagaagcggacccgggaccgggacggcaaggaatagatctccgggggagtgcccggatgttgaggtgagagaggatatggaagaaaagatccttctggtggaggacgaggaaaagctggctcggatggtggagctggagctgcggtatgagggctatcaggtggacaagagcttcgacggccgctccggcctggagcgggccctgtcgggggagtacgacctggtgctgctggacatcatgctgccccagctgtccggcatggaggtgctgcgccgcctgcggaaggagggggtacagctccccgtcatcatgctcaccgcccgggacagcgtggtggacaaggtatccggcctggactccggggcggacgactatatcaccaagcccttcgccatcgaggagctgctggcccgcatccgggcggccctgcggaagcgggggagcggagagcggccggaggagccgctgctgtccgccggtcccctgaccatggacgtggagcgccacaccgtggcagtgtccgggacgccggtggagctgacccgccgggagttcgacctgctccaccacctgctggagaacaagggcagggtgctcagccgggaggccctgctggacagcgtgtggggcttcgacttcgtgggggagaccaactcggtggacgtatatatccgtttcctccgcagcaagatcgacgaggcctttgacatcaagctgatccacactgtacggggcgtgggctacgtcatccgggaggagtaaggccgggaagaaggggagctgattcatatgacgatcgtttatacctccaagaccggttttacccgggagtacgcccagatgctgggccgggccgccgggctgccggtctgtgccctggacgaggctacgggaaaggtggggcccgggagcgacatcctgtacctgggatggctgatggccgggcatatcagcggcatcgaccacgcagttaagcgctttcatgtccgggccgcctgcggcgtgggcatgacgccgccgggggacaaggtgctgcaggacctggcccggtccaactatgtgccaaacgcccccatcttctaccttcagggcggctgggcaccgaaaaaggtggggtggctccagcgccggatggtagggatggccaccagggggctgcggcagtccctccagcagaagcgggagcggacccctcaggaacagcggcagctggatctgctgctccgcgggggcagctgcgtggccttccggaatctgacgcccctgctggagtggctgaaaaagcaggagggctgaccggctgcggcatggaaggagaggagggggcccggtgggaaaacgggacatgaagaacaagactccccccagcggggccaagtcccagtcgctggtcctgcggctgaatacccggctgtttttccggcagctggggatctttctgtgtatggacctgctgctggtggtgctggccctgatggggcagctgatgtgggcggaaaagcgctgcgcggacgtggcccagctggtccaggagcggggggtgcccaccgcggaggccgtcccctggatggctgccagcgactacaccatcatcccactggaccgggagcccaagggagtggacgtaggggagctggggtggttctctggcggggaggcaacagcggacggcctgcgcacctatgtgctgttctcctactacaccgtggaactgcccaacggcggggagccctacgccattacggtggatctgtccgggatcgggcggatgttgaagtgggcgggctttatcctcctcacggtgcagatcatctccctgattgccaacctgttctgcaatgccgggactatccgccgcaccctgaggcccatccaggagctggcggccactgccgcccggctcaactccatgacccacatgtccaggcgggagctggaggccctggccggcgagctgagcaagatcaacgccacccacctggacagccgcatcgacctgcccggcacccagaaggagctgaagaccctggccaaggccatcaacgacatgctggaccgggtgaacgcggcctactccgcgcagatgcagttcgtctctgacgccagccacgagctgcgtacccccatcgcggtcattcagggttacgccgctctgctggaccggtggggcaaggacgacccggaggcccggcaggaggccatcgacgccatccgctccgagtcggacgccatggagcgtctggtggagcagctgctgttcctggcccggggagacaacgacacccagcccatccggccgcagctgatggacctgaccgcggtggcggaggacgtgctgcgggaggagcagatgatccacccggagcgggccttcctggcccggtggcaggggccggtggtggtccgggccgacccggggctggtgaagcaggtgatgcgcatcctgatggacaacagcgtcaagtacagcggcccggaggggcgggtctatctccgggtgtcggcccagaaggactatgccagggtcacggtccaggacgaggggatgggcatcgtgccccaggccatccctcatatctttgaccgcttttaccgcaccgacagctcccgggcccgccagaccggggggaccgggctggggctgtccatcgcccggtggatcgtggaccgccacggcggctggttcgaggtggtctcccgggaggacgtgggcacccgcatcacctttgtgctccccctggaggggacggcatgagctggtgggtctat

SEQ ID NO: 13617 - DNA, 4257 bp, Unknown
  gut microbiota DNA sequence
cacaacgcgggccggggagcgaaatatacccggagccgccgcccggtgacgctggtgtggcgggaggagcagcccgacaagtccgcagccctgcggcgggaatacgccgtcaaacagctgaccagggccaagaagctggctctgatcgaaggcgggccgcttgtgtagatggtgttttaagaccttcactgcttatggcgctgaaaccaaggatgtccgttcagcttccgatgaacctcttgatttaccaaaattctaaagtgaaggtgagcttatggaaaaacacaatcattttagtgaacggcgctgctttgacacgaaacatactgttctccaggcttgatttatcaaaagaccccggccccttccgaatggaaggggccggggttctcatttctatttagctcttcagcctctgcgtgagagcagggatgcggccggcggcggcgatcatgccgatgctggtaccgtccgtttgggacgaccaattttgccttcttctttatatttgggaatagccctcataattggttatttgtgatatatcagatatatcatattctgccctggatcacaaacgcattttctcccagagtgtgttgagctttcatcaaaaagcgtctgtttcaccccaaaaggtgcgattttccggagcaggatgacagatacagctggatatggtaaaataggggagccgatcttaggagggcgccatgctgatctatttgaccatgatcgaggcggaggaggaccgacaccggttcctgtccctctaccgccgatacaaaaagctgatgctgtatatcgcccacgacatcctgcacgacccccacgacgcggaggacgcggtgcacgaggcttttttgcgccttgcggaaatgatcgagaaaattcatgaaattgactgtcctgaaaccaggtctctgatcgttatgattacaaagagcaaagccatcgacctgtaccggaagaaaaagcggcgggcggggacggtccccctggaggactgggccgccgccgcaccaccccaggccgagggtgtggagcggggggacggggtggcccgggccattgcggccctgccccggcgtgaacgggatgtgctgctgctgaaatacgaccagggatatggcaattccgagatcgggaaacttctgggcctgcggccggatcacatatcccagatcgcccaccgggccaaagagcacctgcgcaaaaatttggaggaaatgggggtggaggtatgaccgatcaggagctggaccgccttttgtacgcccacgccggggcggcccgggaccttgtgctggcccagctgcccccggagggcgagctgcccgacatccccacctccccccggttccagcggcgcatgaaggccctcatccgccgggccgaccgcccgggctgggccaaggccgccctgcgctgtgcccgccaggcggcggtcatccttctggtgtgcgggaccctcaccttctccggcctgatggtcacctcccaggccttccggacccaggtcctggctgtggtcacccaggtgttccaggagttcaccgagttccgcttctccgcccgggaggaaacggcgcgcagggccggggacgtcgccctgacctatctgcccgagggcatggaggaaatcgagcgggaaaccgatgcaaatcaatgctatatttattttgaagatgatctgggcaattttatggatataactcatatcatgatcggtccaaataccgccagtacccttggccttgatacagaaaatgcggaggtagaacagttctatatccggggtgaacaggctaccgcaatctacaaaaaaggtaccgcttccatcctctggaccagcggcaacagcgtctatctgctcaccgggaccatctcaatggacgaattgaagctggtggccgcgggggtccaatgacccagtaaaaaacttttttaaaaatttttggactaactgtcaaaaacagcctccctccgtcgttatggtatatgaacgcacggagggaggtgatttttatgcgtatcaaagcaagcaagctgctggcggcggggctggccctgtgcctgactctggggaccgcccccgccgccagcgccgccgcgctgccccagtccacacccggcgtccaggacattaccccgtacttcctgtacatcggcgattccaactgttctctggacatctcgggccggacggcgcacctcagcgccagggtaaaaggctattccggcgaggccaccaagtgcaaggtccgggcagagttgcaggaaaagtcaggcactttcagctggaccacggtggaaacctggaccgaccagcgggatggttttcgggcctcggtctccgagaccgcagctgtgacctctggtaagacctaccgggtcaaggccaccgtcaccgtctgggccgggagccagtcggagagccagaccttctattccgacgaggtggaagcatgagataaaacggcataaggcgtgtgcggttactgaaagactaggaaagagacagatggttctatctacccaaaaatgaactggaggttgctatgaaaaaaattctttcactgttattagtgcttacgatggttttttcgctttcttccacatcttttgctgctgcgggcgattctgttccagcttccggtgaggaagaaatcgataacttttatgagaaatataccattgatttttcttctaatattgaaacttataccgctgagtatagtcccgaaaatgcaaacgagcagaatattgaaaaggccaaagactatgtcatgtcgctcaatctaagtacatctggtcttcaggccatcgaagatgcgtgtttgtctcatttaaatgttctggaagatgaattaaataaggttagcggaaccttgtgttcctatagtgttttagttcccaggaatagggccttaagttatacatactatggaagctatagcggaaaagatttctactacgcttattacgacgaatatacgtatagccttgaaaaaagcaacgattataatactgacatgatgaaacactggatttctggtgtagtaaatgcagtactcttgcttccacatattccaacgctggccactatctcctggaatgtgttctctgcaatggggatcccgcagaagtacgagattaataatagcgcttatacaaaacgctatgctatcgtggatatatcgtctcgcgggatttattgggcccaaggaagttccacttcgacctataaattagtatatgaagatgaaaaaggccttgtaaccccttcgttcctcttttatcctgtagatagtagcttgccaaagtccgtgtatgaagcacgctgcaaggaggttgccattcgttcagataacttcaatgacaaggaatatattttagactcggcaaattatgccgcagttcacgaaatgcaattccgtgaaccaatttatattggtagtaaaaatgtagagcttcggtgggaagaaccgtgagcaactcaagaacttcaaaaacaaagctctattccacaataataggtttcatatccgttctcctgattgttgtggtgttatttgcagtatttggaagaaagagtttacagtctttcctgccctataaactatctaaagttaccgaataccaaattgtagaaatgacagaagtaaaatcatcagacatatatcttgttgatcaaagtgagttattaagtgcattaactcatttgactgtagcttaccgcggaccatacaatactattccatttgatagagaaactcagcatatttatcatttggttttagtgcgtagatatcaaaatgaatttgatcaacttggtacgattacattagacgaaaacggatatatctacattgaaggtagcaagttcaaggtaatcaacgaagatccatacgaaaagattatagaagtgtgtgataatagcttccacttctaaggtaggcatccgcttttagcaaacccctgccccttccatttggaaggggcagggaaggggcatttttatttggtttttcaggctctgtatcggcgataaaactgctcatgttctggggtggacaggtgaagcagttctttacccgcggcgagcaggccgccgctgtctccaagggactggaccgtaccatcctctgaaccaccggaaactccgtctatctgctcaccgggaccatttcaatggatgaattgaagcaggcagctgaagcgatccaatgagccaaaaaaacgtttcacaaaaat

SEQ ID NO: 13618 - DNA, 32955 bp, Unknown
  gut microbiota DNA sequence
ctccggaccggggtcacccggttccgcgccctgttccagggtaaccgcagccgctccgaggtggtggccaccttcctggcggtgctggagctgtgcaaggcccaccgcctgcggctggccgggacggaggaggactgtaccatcacctccacccagggggagcagggggaccatttagaggtcacagcggattcctttgaattttaacaggatgggagaagaggcatggaactgaaggagctggaggccgcgctggagggggtcctgttcgccgccggggagccggtgggggtggagcgcctgtgtctggggctggaggtggatcgggccaccatggacgcagtggcccagcggctgatggaccggtacagctatgagcggcggggtatccgcctggtgcggctggataccagctaccagctgtgctctgctccggaattcgctccctatatccgcaagactttggagaatcggaagccggcgcggctgtcccagcctgcgctggaggtgctggcggtgatcgcctactaccagccggtgacccgggcctatgtggaccagatccggggggtggacagcgcctatacggtgggactgctgctggagcgggagctcattgaggagtgcggtcggctggccgttcccgggcggcccatcctgtaccgcacaacgaaaaatttcctgcgctcctttgggctgtccagcctggaagagctgcctgagctgccggatgcctcccaggagagcggacagctgaccctggagctggaggcggcggtagcccgtttgagggcggaggagagtgggcagactgtccaagaggatggggcagctcacccggcccaggaggagacggaatgagggggtggatcgttctggcggcggtcctgctgctgttgttcctgctggggcagctgcggctgggcgcggtgggggagtatggtcccggaggcgccggagcctggttccgggcggggcctgtccgcatccgcctctacccaaggaggcgctcagggccttcgaaaaaggagaaggcgcccaagcccgggaaggagcaccctgcgggggaggcacgcggcggcggacttttggagctgatgaaggagctgctgcccctggccttggaggcggcgggctgtttccgccgcaggctgcgggtggatcagctggagctgaagctcaccatcggcgcggcggacccaggagacgcagctatccgatatggacaggccaacgccctgctgggaagcatctggcagcccctgacagaggcgttccatgtggaggagggccgggctcgggtggaggtggacttcaccgcggcggccccggtgcttcaggggcaggtgtccctgtccctgaagctgtatcagctcctatggctggggctgcacttcggcctgcgggccctgagtacctatgtgaaccatcgaaatcggcataaacagcagagagaggcggtttgaatatggaaaaacagcatcccatcaatgaaatgatgagcactacaatggagaagatccgcagcatgatggacgccaacaccatcattggtgaccccatccagaccggggaggtcaccctgatcccggtctccaggctgtcctttggatttgccagcggcgggagcgactttgtgaccaaaaatcagaaacccggggctgagaacacctttggcgggggcagcggcgccagcgcgaagatggagccggtggccttcctcatcatcaagggggacagcgtcaagctgctcccggtcgatccacctcccgccaccacggtggaccgggtcatcgaggtggtgcctgaggtggtggaaaaggtcaccgatttcctggaaaagcagaaaaaagcagacgagcccccggagggaacggaccactttgtggtgtgaccgcactgatctgacagaatttgccggatccggcagggagagaaaaccgacggcccggaaaatactaaggtcactttgtttgatggaaggtgaccatattgaaacgactgctggcggcggcgctggccgctggatctatgctctgccaggtgcccactgcccaggcggtgggcacctccgcgtcctctgccatcctgatggaggcagagagcggccgggtgctctatgaacaaaacgcccacgaggaacggctcatcgccagtatcaccaagctgatgaccgccctggtggcgctggagtccggccacgacctggaggagaccgtcacagtgggggaggcctgcacccgggcagagggttcctccctctatctgcgcccaggggaggagatctcgctgaaggggctgctctacggggtgatgctgcgctccgggaacgacgcagcgctggcagtggcggagcactgcgggggcagcgtggaggagttcgttgggcggatgaatgaaaaggcggcccagttggggatggtgaacagccatttcgccaaccccaacgggttgaacgcggaggggcattactcctctgcctacgacatggccctgctggcccgggcctgcctggagaacgaggcactggcggagatcgccgccaccaagagcgccactgtggacggccgggtgctgactaaccacaacaagctgctgtggcagtacgagggctgcatcggcctgaaaacgggctatacagaaaaggcggggcggaccctggtttccgcggcccggaggggcgggatgacgctgatcgcggtgaccctcaacgacccggatgactggcgggaccataccgccctgctggactacggattttccacctatgccccggtgacgctgacagaggagggaaaggccgtggctcggcggcccgtgtccggcagcctggtcccctttgtggaaatccaggcggcagagacggtgcggatcccggtgtgtgaagaggacaaaatcgactgggaactccagtgggaccaggaggcgctggaggctcctctccgggccggcggcagtgcgggccggatgatctgccgggtgaacggcgaggaggcggcctgcgtgcctctggtgttcgcccaggatgtggaacgtacgctccagcctcctggtgggatctggactcggcttatggagctttggaacagataaagaaagagaggggggagtcagcatggaggagcgcctgcaaaagctgctgtcagcctgcgggctggcctcccgccgaacggtggagcagtggatcgaggcggggcgggtcaccgtcaatgggacgaaggcacggctgggggacaaggcggacctggaccgggaccgcatcgaggtggatggccggccggtccggcccggcggagaccggctgtatctgatgctgaacaagcctcgagggtatgtgaccaccctgtctgacgagaaggggagaaagacggtggcggagctggtctccggatgcggacggagagtgtggccggtggggcggctggacttggactccgaggggctgctcctgctgacggacgacggggaactgacccagaagctgctccaccccagtcatcaggtggaaaaagaatatctggtgtgggtcactggggacgtgagccgggggctgccggtgctgtccggccccatggatctggacggcgtgccgctgtccccggccaaggtgcggcgggggaggaccagcggaggagtgacccagctatccatcaccatctgtcaggggaaaaaccggcaggtccggcgcatgtgcggtcaggcgggtctgaaggtgctgcgcctgaaacgggtccgggagggagggctctgcctggaccggaccctggggcccggaaagtggcggagactggagcagagcgaggtggcctccctgctgcaaaagccctgattttttgccccgtaccggatagaacataaattttttgcaagataaagtttttatcctgcaaaaatggcttgcttttttccgggaaacaaggtatcataaggagctgaaacagctggtttcctcaaagagaaaagcaggagttgaccgagatgaatcgagacattttgactgtgatccaggaaaatatgagcaccttctccaaagggcagaagcggatcgccaactatatcctggaatcttatgacaaggcggcctttatgaccgccagccgcctgggcaagaccgtcagcgtcagcgagtccaccgtggtccgttttgcggcggagctgggctatgatggctatcccagcatgcagcgttccctgcaaaaaatgatccggaaccgcctgacctccgtccagcgcatcgaggtttccaatgaccggatcggagatcaggatctgctctccagcgtcctccagtcggacatcgaaaagatccgcctcaccctggaggaggtggatcgccagagctttgaccgcgcggtggacgccatcgtctccgcacggaagatttacatcatgggtgtgcggtcctccgcctccctggccaccttcctcagcttctatttcaatctgattttcgacaatgtgatctctgtggcggcaaacaccgccagcgaggtctttgagaccatgctccgggtgggggcggaggacgtggtcatcggcgtgagctttccgcggtactccagccgcaccgtccaggccatgaacttcgcccgggaccggggcgccaccaccattgccatcacggacagcgaggcctcgcccctggcccccatctccaactacacactgaaggcccgcagcgatatggcctccttcgtggactccctggtggccccactcagcctggtcaacgccctgctggtggcggtgagccggaagaaaaatgacgacctggcccataccttccagaccctggaggacatctgggatgagtacggggtctatgagaaggtgcaggactgaacgatggccgatgaactgatcgtggtcggcggcggggccgccggcatgatggccgccatttccgctgcggagacgggagcggccgtccggctgctggagcgcaaccccaaggtagggcgcaagctgtacatcaccggcaagggccggtgcaacgtgaccaaccactgtccgccggaggaggtgctggccagcacgccccggaacggccggttcctctacggggccgtgacccgtacgccgccggcgtgggtggaggactttttcactggcctgggggtcccgctgaaggtagagcggggcaaccgggtctttccggtgtcggaccgggcggcggatgtcatcgacgccctgttttttcatatgaaaaagctgaatatcccggtgacgcaggcccgggcctcccagatctgtctggaggagggacgggtgtccggggtggagaccgattgcggcttctttccctgccgggctgcggtcctggccactggcggctactcatatccggccaccggctctaccggcgacggatatgagatggcccgggccttgggccatactgtggtctcgcccgttccatccctggtccccttggaggcagaggaggacttctgcggaaaaatgcagggcctggcgctgaaaaatgtgtccctccgggtcaagaaccagaaggggaaggtggtctatcaggagcaaggggagctgctgttcacccattttggcctctccggtcccctggtgctcagcgccagcgcccatatgcgggactttgccagggagcagtacacctgtgtcatcgacctgaagccggctctggaggaacagaagttggacgcccggctggtccgggagctctcggagcaggccaaccgggactttcagaacgtcctgggcagtttagtgcccaggctgatggtgcccaccgtcatcgccctcgccggcatccccggggaccgaaaggcccacgacatgaccaagggggagcgccgccgcctgctggaggtcctgaagggccttgtgatccatatccggggtccccggcccattgcggaggccatcatcacctccggcggggtgaaggtgggggagatcgaccccaagaccatggggtcgaaaaaggtgcccggcctgttcttcgccggggagctgatcgacgtggatgcctatacagggggcttcaacctccagatcgcctgggccaccggtcgggcggcaggggaaagcgccgcccggatctgcctggggcaggacctggggggagcaggggcctgagtaccgtcggaccggagcggagaatcaatcaaattttggagcgaaataagaaatgcaggaaaaaagcgttgctatcgacggccccgccggggccggaaagagcaccctggcccgggccctggcccgggagctggggtatttgtatgtagacacgggggccatctaccgcacggtggccctgcgggcctgggaggcaggggcggacccatccgacccggagcagatcgcccctctgctgaaggggctggacctgcgcatggattatggggcagatggtgtacagcggatgtacttgtctggacgtgacgtgacagaggctatccgggtccaccagatctccggactggcctcccaggtggctgccctgcccccggtgcgggacttcctgctggactttcagcgccgtcaggccatggagcacgacgtggtcatggacggccgggacatcgggacggtggtgctccctcacgccggggcaaaggtcttccttaccgccgcaccggaggcccgggcccgccgccgcctgctggaactgaagcagcggggacaggagacggagctggagaccgttctccgggacatcgtccagcgggatgaacaggaccggaaccgggcggtggcccctctccgtcaggcggaggacgctgtgctgttggataccacggagctgggactggaggagagcctgaaggccctgatctccctggtgaaagggaggctggctcaatgagtacagaacagttctaccgattcctctatctcgtcgtctggccctttttcaatctgttccatccggtacgcaccgtggggcgggagcacatcccagagggggcggcggtgatctgccccaaccataccgccctcagcgacccgttttttgtggctttcgcctttcagaaaaagaaccctctgcgggtgatggccaagatccagctgatgcgggtgcccgtgatcggctggctgctgggcaaggcgggcatcttcggagtggaccggggccatgcggacatgcacgcggccaagacggctctgcgctgcctgaaagaggggcacaagctgctcatcttccccgaggggacccgcgtggaggagggggagaacgtggacgccaaggcgggagcggccatgtttgccacccggacgggggtgcccatcgtccccatgtacatcccggcgcagaagcactggttccgccctaccactgtggtgatcggcgagccttactatccccagatccaggggcggcgggccacggcggaggaaaatcaggagatcgcccgtgagatcatgcggcgcatccacgcactggggggacttccccagtgaagataaggatcgcaaattcggccggcttctgctacggcgtgcgccgggcggtggagctggcggagggggccgcccggtccggcgagccctgtgtgatgctgggtcccatcatccacaaccaggacatgatggaccatctggcccgccatggcctgcgggcggtggtcaggccggaggaggtcccggaggggagcgaggtcatcatccgctcccatggggagagccgcgctgtccacgagggcctgcatgcccggggcgtccgcatcctggacgccacctgtcccaatgttacccgtatccatcagatcgtggcccgggctgaggagcaggggaggcagcccatcatcatcggaacccgggaccacccggaggtgctggccattgcgggctggtgctgccgcccggtggtcctgtctggagcggaggagctggaaaactggctggcggaggacccgtcccgacgccaaatgccactcacttttgtgtcccagaccacggccatccgcagggtttgggattcctgcgtgaaaaaagcaaaaaaagagtgtacaaacgcagaattttttgatacaatatgtggagcgacatcaaaacgccaggaagaggccgtccagctggccgcccagtgcggcgcgatggtggtcatcggcgaccgccagagctccaataccaggaagctggcggagctctgccgggaagtctgtccatctgtccagctgatcgagcgggtagatgacctggagttgtctcctctgcgggggacagagactgtcggtatcactgcgggcgcatccacgcctgcgtggataataaaggaggtctgtgacaaaatgagcgacgaaatcatggagatcgaggaatccttcgctgacatgctggagagatcgatcaaaactttgaatacgggggataaggtaactggcgttatcactgggatcacgccgactgagatctatgtggatctgggcaccaagcacgccggctacattcccgtatccgagctgactgatgaccccaccgccaaggtggaagatctggtcaaggtaggggacgagatcgagacctttgtggtccgcgtcaatgaccaggagggtgttgtcaccctgtccaagaagcgccttgacgtggtcaagggctgggaggacgtggaggccgcccaggaagagcagactgtcatggagggcgtcgtcaccgaggacaacaagggcggcgttgtggtgtccgtaaagggcgtgcgggtcttcgttcccgcctcccagaccggtctgccccgggagactcccatgtccgagctgctgaagaagaaggtccgcctggtcatcaccgaggtgaaccgtgcccgtcaccgcgtggtgggctccatcgccaaggtgcagcgcgccgagcgcgccgccgccgcagagaaggtctgggccgagatcgaggacggcaagcactacaccggcgtggtgaagtccctgacttcctacggcgctttcgtggacatcggcggcgtggacggcatggtccacatctccgagctgtcttggagccgcatcaagcacccctccgaggtggtctcggtgggcgacaccgtggatgtgtatgtgatctccgccgacaaggagaagaagaagatctccctgggcatgaaggaccacagccaggacccctggaccgtgttcacttctcagtaccaggtgggcgacgtagccaatgtccgcgtcgttaagctgatgaccttcggtgcctttgccgagatcgtccccggtgtggacggcctgatccacatttctcagatcgctgaccaccgcatcgagaagcccggcgacgtgctggctgagggagaaaaggtggacgtgaagatcaccgacatcgacatggagaacaagaaggtctccctgtccattcgtgcactgctggaagagcccgaggctgaggaggacgctcctgccgaggagtgatcccgccctaatcctattttaccatgaaaaacagctccctctgccacggcagagggagctgtttttctgatccggtcctgtagggcactgctccaggtccctgactggtgggaggccatatggaccagaaagccgctcatccgggggataaaaagtagccgaatggaggcgttatggtggatttttcataaaatttacttgcaagagagggaatagattggtataataagactggaaaatcagaaattctggtctattttggaggtgagactgttgtttcaggtaggggataagatcgtccatcccatgcacggagcaggtatcgtagagagtatcgtccaaaagaaggtaaacggtgtgatgcgggattactatgtgttgaagctcccggtgcgtgcgatggtggtcatgatccccacagacaacagtgaagagattggggtgcgccccatcgtggaccgggagcaggccgaccaggtgctggcggccatccccggcatagaggtggacatgacccagaactggaaccgacgataccgggaaaatctggagcgcctgaagagcgggaacctgctggaggtggcccgggtggtgaaggggctgatgctccgggagctggaacgggggctttccactggggagcggaagatgctccactcggctaaggagatcctgatctcagagatcgtactgtcccagagctgtacctatgaggatgtggaagcgcgcataaatacggcgctgaactaatatgctgggagagaagcgcgggcaaaaagggaccggatggtcccttttttcaggcaggaaggtgaaccgattggcaggaatttggaaacgattggcccagagaaagggcagaggggtgcccatctgctcggtggtgatcccagcggcagggtcctcctcccggatggaggggatcgacaagatcctggagcccctgggggaactcccggtgctggtgcgcacccttcaggtgttccagagctgcgatctggtccatgaggtgatcgtggtcacccgggaggatctgatcgtccccgtgagccagctgtgcagggattttatgctggataaggtgaccaaggtgatggtaggaggcgccgagcgggttctctccgtccggatcggggtgcaggaggcccgccgggacgcggcgctgatcgccatccatgacggggcgcggccgctgctgagccgggaggtgctggaagaagtgctgaaaaaggctgcggttaccggggcggcggcgccggccattcccatggtggataccatcaagcgggcagagcggggcgttgtggtggagacgatggaccgctccagcctgtgggcggtccagacgccccaggtctttgaggcgtccctgatccgggcggcccttgaaaaggcggtggcggacggggagactctcacagatgactgcgccgctgtggagcggatcgggatgaaggtctccctcactcggggagacagggagaacatcaagctgaccaccccctacgacctgatggtgggggaggcgatcatccggcagagggagggatattgagtgacacggatcggacagggatacgatgtgcaccgcctggcagagggccggaagctgatcctggggggagtggagatcccctatgagcgggggctcctgggccattcggacgcggacgtcctcacccacgcagtgatggacgccctgttgggcgcggcggcactgggagacatcggttgccactttccggacagcgacccggcctacgccggagcggacagtctagccctgctggaccaggtgatgcagctgctctatgcggagggatggcaggtagaaaatgtggatgccacaatcctggcccagcggcctaaattagcgccctatctgggtggtatggcggatcatctggccgctcatatgggagtggagctgggacaggtgaatgtcaaagcgaccacagaggaggggcttggcttcactggaagtggagaggggatggctgcccatgcggtctgcctgctgacaaaagaataacggaaaatggagcgcgggcaccggaatttccggtgcccgcgctctgtgaagagaatagcaaggaggtgtaggatcagaaatcgatgcggcggccttcctcggcggactgataggcggcgtacatgatcttggtggtctcgtaagccagagcaaaatcagaggagggcgtcttatcgtaggcaatggtctccatgaagtcctggagctcacccatgtagccgcgaatgatctcatcggagacgaaagccttgttccagcccagcttggcgggcagcatctcggagatgtacacatcatccaagccttcttcatccaggaaataggtgttcaggatgtcagtgggggtgatgttgcacatcagggagctgtcgttgctgtaaacctcgatgtagttcttggtgccgcccagtacggtgtcactggcgatggtcaggcacttggtcccgtcggagaaggtaacggtgacggcggcgtagtcctccacgtcctcgggacgggcggcgatgtggcggtgctcatgctcgctgaggcaggcagtggtgacgcccacgtcggcggagacactcttgacagtaatggtctcgccccgggccagggcctcctgctgcttcagccacagcatgccagtgaggggatgggtaccggtgcggaccaggatgccgccgccagtcttgttccacttgccagccacgggggagctggagcctttcaggctctcctcacccttcatgaacagcaccttgctcttcttggcgcggatgatctcagcggccttctggaccggagtggcatagacgaagttctcggcgtacaggaacttcttgtcggtagagtccaccacttccttcagctcatccatgatggccatgacctctcgatacatcttggccttctcggtcctgcccacattctcctcgccgggcttgccgaaatagccggtgagaggcttctcacagatgacatgcttgccggccttcagggccttgatggccatggagcagtggaggaaaggaggggtgacgatgtcgatgacatcgatctccgggtctgccagcatatcgtcaaagttagtgatggcctgctcatagccatagcgctccttgacctgattggccagatctaggttcaggtcacagacggtcttgaggcggatgggcactccactgaccttttcatagccgttgccgtggagatgcgcggcatagccggctccgatggtgccgatgaccacgggttttacctgcttgttcatagaaagttcctccttcatgatttgtgaaaggctcacgggcttttcagatttgatagactcaatataggggaaatcacacaaaaagtcaaatgatgctttttcattcaaaattgaaaaaatttaatgcagggcaggcgcatccagaccgcagtatccggcagcccgctgccagcatacattgtattgagagggtatcccctcccggccgcgccgtcggctgcggccacccgtactccaggaaaggaactatgccatgctctattatctaatcgtgtgccgatccctgacttacgcacagcggaccgcctccgccctggagcgggcagggatcacggctcatatcatgcgctcccctaaaagcatcgcaggggaggggtgcagtcattccgtgaaggtctctcagcggaatctgcccgatgcgttaagaatactgcaccgaacagagctggacccccgccgggtctatatcacggcgggagacggcagctacaaggaggtgcagctgtgatctatctggacagcgcggccacctctctgcaaaagccgcctgcggtcgcccgcgcctgctcctacgccatctcacattatgccagtccgggccgaggtggtcacaagccggccatggacgcagcagcagcggcctttgcctgccgggaggcggcagcccgcctgttccaggtccccaagccggaacaggtggtctttaccaacaatgccacccacggcctgaatatcgccataaaggccctggtccgtccgggagggacagtggtcatctccggatatgagcacaacgcggtcacccggccgctccacgccatcccggatgtgacggtccgggtggcggccggacaactgttccggccggaggagaccgtggaggcattccgaaaggccctgaccccggaggtgactgcggctgtattcacccatgtatccaatgtgtttggaatgatcctccccatccaggagctggcccggctttgccgggaacggggggtccccttcatcctggacgcgtcccagtcagcgggctgcctcccggtccatctggaggaactgggggcagccttcatcgccatgccgggccacaaggggctgtacggcccccaggggaccggtcttctgctctgcggacagaccccgccgcctctgctggaggggggcacgggaagtgaatccatccggcaggagatgccggacttcctgcccgaccgtctggaggcgggaacccacaacatcgccgggatcgccgggctgctggagggactgcgcttcgtggaaaagcagggggtacagtccatcggcagccatgagcgggccctgaccgtccagatgggggaggctctcgcccaactcccgggggtggaggtgttccggagcaaagaccccagccagcaggccggagtactctccttccgggtatcggggatggactgtgaggagctgggggaggcgctgggccgccgggacatcgccctgcgttccgggctccactgcgccccgctggcccaccggacagctgggacactggagaccgggaccgtgcgggccagcgtctccgccttcaacgtcccccaggagatcccacgcttcgtccgagagctgaggcagatcctcagcgaaaagccgtaagaccttacaaggcgtcaaatgccagagatcttgaagagagatccctggcattttttctgtccggctcctgccggaacggccggagcccagggcaggtcctgccctgcagcctatccggcgtcaggggtgacgggagacatattcatgaaattttcattctttccttctcgtttcatgttgccaacttccgcggaatatcgtataattatcaaataggtaattgggcagacccatgcgggccttttgaaaagaggagattccatgagcgaactcatacagaggatgccggcagtcgttcagaccattcgcctgtccgacctggtggatatcgcgatcctgtctatcgtcatatacaaactactctggatggtgcggaagaccagctctgggcgggtgctccgggggattatgatcgtggtggtggccatctgggcctctgccgagttcaacttatacgccaccagcttcgtgctcaaccgggtagtggagtacgccattctggtgctggtcatcctgtttcagccggagatccgccgctttctggagcgggtaggcagcagcaggatgagcaaggtcttcgtccagcccccggaggccgcccacgacatcgacagcgccatctcccagactgtggaggcctatacctccctgtccaaggacaaggtgggggcgctgatggtctttgagcgggccaacctgttggacgaggtcatcaaaaccggcacggcgctggactgtgccgtctccagcgaactgctgaagaacctgttctggaacaaggcgccactccatgacggggcggtcatcgtccgtaacggccgcatcgtgggggctggctgcatgctgccactctcaggcaacaccaacctcagccgtgacctggggatgcgccaccgggcaggcatcggcatgagcgagcactctgacgcggtggtagccatcgtctcggaggagaccggttccatctcggtggcggtgggcggcatgctcaagcgccacctggcccctgagaccctggaccgcctgctgcgcaatgaactgaagacggacgaggatgacggggagaagaagagcgacctcttccccctggtcgccgccctgttcaaccgagggaaaaaggaggggacagaatgatccagcgtatccagaacagcaagtgggtctttgtcctgatctccgtctttttggccgtgatcttctggatgtacgtccgcaacgacctggaccccccggggagccggacgatctacaacgtaccggtgaccctgacgggagagactatcctggagagtcaggggctcactatcactgcggtctctgacacggcggtggacctgaagatcaccgcccctatcagtatcctgaacaagctgagcaaccgcaatctcagcgtgaccgtgaacgtgtcccagtgtaccgagggggagcagatcctccagtatgacgtgaactggccccgggacgtgagcacagcggagatcaccaaggagtctcaggagcctgccgctatcaccgttatggtggcacggctgtactccaagacctttgagatccagcccgtgctgaaggccagtatcgccccgggctaccaggcgggccagatcaccatcagtccagagaccgtgaccatcagtggctcggaggaggcggtctccagggtggcgaaggtggaggcggtgctggagggcgaagagctcaacacccgcttctccggcaatgttcctctcgtcctgctggacgcagaagggaacgagctgacggatctggagatcaacatggacacagataccacctatgtgaccatgccggtctatgtggtgaaggaagttaagctgaccgtagactacacgccgggcggcggtgccaccggcgaggatgtgacctcggccatcatcttcccggactctatcaccatcgccggctcagaggaggacgtgtccaaggtagaggagatctcgctgggcagtatcgacctgtccaaagtggtggggaccaacagcttcaccctacccatcgagctggactccagcctggagaacgtcagcggcatcacagaagccgtcgtcacggtgaccatatccggcctgtccacccgtaccttcaacgtgaccaacatcgattatgacaatgcaccggagggctatcatgtggaggtggctaccgagtcctgctctgtagtggtgcggggcagcgaggagcgcctggaggacatctccgccagccagctgcgcatcgtggcagacctgtccaatgtgatgacggtgggctccgtctccgtcccagccagagtgtatctggactataacagtgaggtaggcgtcattggagagtactctgttgtggtcaacatcagcagatagtaaaaacggtttttgaggcaaaactttggaggcagcagcatcatgagtcaaaatgccattgtaaaaaaagtggtccatcccggtgtggtggaggtgtcccttatgcgccaaatggagtgcggcctgagctgttccagctgcgagggctgcccccagcgccccaaggaggagatcctggccctggcctctgatccgcaggggggggccaagccgggggactgggtggaggtggagcccgcctccggcagcgccatcggcttcgcccttctggtctttttcctcccctgcgtctttcttctggggggatacctcatcggcagacttctgggtctgggagacgggggttccatcggaatggcagccgcggggctggtcctgggcttcgttccggcggtcctgatcaaccggaccatcacccggcggaagaccccggaattcaccgtgctggggtatcttcacagcgtgtgaggagagccctgtgtttggatatgtccggcctgtccgggaggaactgaagtgtaaagattttgacctttatcgtgccacatactgtgggctctgccgggaactgcggcggaaatacggcctgctggcacccatgttcctcaattttgatttcacctttctggccctgctgctctggccggcagaacagcggttcgtcccctgccgcggcaggtgccacgccaatccgctggccagaaaggagatgtgtcccgctgatccggccctggaggcggcggcggacgagagcatcatcctaacctactggaagctgcgggattctgctcgggacgacggccccttcagcggcctgccagccagagggctggccctgctcctagctcccgcctaccgaaaggcggcggtctgccggccggaatttgaccggacagtccgttcctgcctggaggagctgacagggctggaggcagaaaactgcccctcaatcgaccggacggccgacaccttcgcccgcatcctccaggcagccgcgcccccctctgaggaccggagccgggatcgggcgctggagcagctcctctaccacttggggcggtggatctatctcatcgacgcccgggacgatctggaggaggaccgcgcctccggctgctataaccctgtccgcgcccgatatggggagggaggggacgaccaggcgctggccctgactctggagcactccctaaatttggcccgctccgcgttctgcgtaccggactttggctgccgaacccctgtgctggagaatatcctctatttggggctccccatgatccagcaggccgtctttgatggcagctggtcccgtctgaaaaaagaaaagatttggagaaaacctacatgaacgatccgtacagtgttttgggggtcagccccaatgccagcgatgaagagatcaaaaaggcctatcgtgagctcgcccggaagtaccatccggacaattatcagaacaatcccctggccgatctggctgaggagaagatgaaagagatcaacgaggcctatgagaccatcaccaagcagcgcagcggaggtgggggctcttatcaacgtccgtccggcggatacggcgggcagagctatggcggcggataccaatacagtcatcaacagagcggctccgccaaccctacctacgcccgcatccggaacctgatcaacagcggagatctggggacggcggagcgcctgctcaacgaggtgccccagaaaaacggggagtggtatttcctttccggcagcatcgcctaccggaagggctggctggatgaggcgatgcagaactactccctggcctgccagatggacccagggaacatggagtaccgccaggccctggccatgatgcagcaggggggacaggcataccgcccctacggatacagcggagggatggacggtctggactgctgcaccagcctgctgtgcctgaactgcctgtgcggaggggggcactgctgagatggcctcttttcacaccaccagccgccgcaccgcggttgccggggtcctggcagctgggagcctggccgtgctctggctggcctgtatggttccgtcagggcgcatcggcctgaccggcgcggccggtctgtttccggtggccgcggtgctggccgccggacgggcggcgggctatctgtgctgggccgcatccgccctgctggggctgttcctgctgccggacaagggggtcgctctgctctacctgatcttcttggggctctacccggtagtcaaaaacaacatcgagggcctgcggcgcctgcccctggagtggctgtgcaagctggcctgcttcaacgcggccctgtctctcttctggttcgcgctgcgggcgctgttcctgcccgatccccctgtgtggctgggggagaggacctggctgctctatctggcagggaatctgatcttcgtcctctatgacgtgggcctgtcccgcctgatcgcgctggtgatggcccggatgccggggcgccgccgctgaaatcaaaataaggaagtgaaccgcaccaatggtgaaaagcatgaccggctacggccgggcggagcagagcctgaacgggcgtaccatcacggtggagctccgttccgtcaataaccgatatctggattgctctatccgcattcccaggctctatctgtttgcggaggatgggctgaagtctcaggtccagagttccatttccaggggaaaggtggatgtcttcgtcacaatagacagcgcaggcgccgccggcgtgaaggtctccatcaatcggccggtggcggacggatactgcgctgccctgcgggagttggcccagagctatgggctgtccgatgacatctccgtctccctgctctcccgatttcccgatgtgctgctggtggagaaggaagaggaggatgcggagcaggtcgcccaggacatcagtgccgtcatggaacaggcgctgtccgactttgaccggatgcgcagccgggagggccagaagctatctgatgacatcctgacccgggcggacaccattgaacgcctggtcaccctggtggaggagagatccccccagaccgtggaggaataccgggctcgtctggaggctaaaatgaatgaggtgctggccaacacccagctggacccggcccgcatcctcacagaagcggccatctttgctgacaaggtggcggtggacgaggagacggtgcgcctgcgcagccacctggggcagctgcggcacatgctggctcagggcggagccaccgggcgcaagctggactttctgatccaggagttcaaccgggaggccaacaccatcggctcgaagtgcagcgacatcgagatcgcccgatatgtggtggatatcaaggctgaaatcgagaagatccgggagcaggtccagaacatcgaatgagggggcgggacatttgaagctcatcaacatcggatttggcaatatgatctccgccggccggctggtggctatcgtgtcgccggattcggcccccatcaagcgcatggtgcaggaggcccgggaccggggcacgctcatcgatgccacctatggccgccggacccggtcggtgctcatcatggacaacgaccatctggttctctcagcgcttcagccggacactgtggccagccgtctggagagccgggaggcccctgaagcagaggaggatgaggaatgaccaaaaagaaagagaagggacagctcatcgttttgtccggtccatccggtgtgggtaagagcaccgtgatcgcagagcttttgggccagcggaaggggatctatttctctgtgtcctacaccacccgccagccccgggtgggagaggcagacgggatcaactacaacttcgtctcccggacggagttcgagaggatgatcgcggaccaggagctgctggaatacgcggaatatgtgaacaactactacggcacctccctgaagatgatccaggaaaaactgaacgccggcatcgacgttctgctggacatcgaggtgcagggggcggcaaaggttcgggcccgatgccctgaagccatctttatctttatcatcccgccctcctttgaggaactctcccgccgtctccacaaccggaacacggacaacgaggacgtgattgccggccggctggagaaggcgaagatagagttccgggagatcccgacctacgactatctggtgatcaacgacaaggtctccaacgcagtggaggaaatcgaggccatcctggtggccaatgagtgccgggtggacaaccgcagaaacattttgaaaggggaattttcgttatgatgctttatcctgctatgagagatctgctggctaaggtgcccagccgctatcagctggtcaatgtggtggcctgccgcgcccggcagattgccagcgaggcggagaccgccggcgtccctctggacgacaaaccggtgagcattgccatccgcgaagtagcggagggtcagctggacgtgtctgaatcgtaagcaggcggcgaggagcaagcggagggaggcttcccacgcttgctttgccttgtacggaagaggaggggatcggtatcgggagagtggtggccaaggtggcggtatccaaagcgatctacgccatcgacaagccctatgactatctggtccctccggagctggagggacaggtactgcccgggatgcgggtggccgtccctttcgggagcggaaaccgtgggtcggatggcatcgtgctctccctggaacggcaggaggagaacacacccacactgaagccggtgctgtcctgtctggacgacgctcccgtcctggatgaaaaggggatccagctggccctgtggatgcgggagcggtacttctgcactgtcagcgacgcggtgaaggccatgctcccggcggggatgtactttgccctgcgggacagcgtgaccttagtccccgggctggagccggaacagatctgggatctgctctcggacgctccagctgccgccaggctggcggagatgctctgctgctggggggggagcggggacatgacccagatccacaccgcctttggcgccaaggaccccacccccgccatccgggtccttctggaccggaagatcgcggtactggagaccagcgcccagcgggcggtgggggacaagacagagcggctggccgtgctgaatatgccggcagaggaggccatggagctggtcgcctccagacggaagcgagctcccctgcgctacgcggtgacggagctcctctgcactctgggggcggcctccaccaaggagctttgctattttaccggcgcctctcccgccacgctgcgatctctggaaaagagcggcatcctcaccctggagaagcatgaggtgctccggagggtccgggtagaggacgtggagcccgccggaccggtggaattaaatcaggagcaggaggcggccttccgcggcctggaccggttctgcctccggggggaggcgggcgccgccctgctgtacggcgtcaccggcagcggaaagacccaaatctatatccgcctgatccaggaggtgctggccagggggcagaccgccatggtactggtcccggagatctccctgacgccccagttgctgcgggtgttcgcctcccactttggggagctggtggcggtgctccacagctccctgcgcagcggagagcggtacgacgagtggaagcgggtccgttccggcgcggcccgggtggtgctgggcacccgttccgctgtttttgcccctctggaccacatcgggctgatcgtgctggacgaggagcaggagagcagctataaatcagagaacgccccccgctaccatgccagggacgtggcaaaataccgctgtgtccagcatagagcggtgctccttctgggctcagccaccccggcggtggagtccatgtaccaggccagggaggggcgctaccgtctgtttaccctgagccaacgcttcaaccaacaagccatgccgcaggtccgcattgtggatatgaagcgggagctgcgggcggggaactgcaccgccatcagtgcggagctgcgccgggagctggcctgcaacctggaacgcggggagcagagcatcctgttcctgaaccgccggggcagcagccgcatggtctcctgcggggaatgcggacaggtcccggagtgcccacgatgctcggtgcggctgacctaccactccgccaacggaaggctgatgtgccattactgcggctattctgagccccttcctcctgcgtgtccttcctgcggcggcaggctgaacttcatcggtgtggggacccagcgggtccaggaggaactggaggcactgtttcccgggatcgagatcctccgcatggatgcggataccatctccgccgcccacccccacgaggagcttctatcccgatttcagaaacagcgcgtccccatcctggttgggacccagatggtggccaaagggctggactttgacaatgtgaccctggtgggggtggtggacgcagatctgtccctctatgccgccgacttccgcgccggggagcgcaccttctctctgatcacccaagtggtgggtcgggccggccgcggggagaagcgggggagagcggtgatccagacctacaccccggacaacgacgtcatccgtttcgccgccggccaggactatgacagcttctatgagcaggagatccagctgcgccgcctgcgggacgagccgccctttcgggacatcttggtgctgaccgcctccggccccgacgaggcgggagtgctccgggtgtgcacccggctgaggcagtttttggagagagagctccccaaactgcccgatcagtccttccgcctgctgggtcccgcgccggcagtcatcgccagagtcaacaaccggtatcgataccgccttacactggtcggacaggacagccgccctctccgttccctgatcgccgccctcctccgggcggtgcggcaggaccgggagagccgggggacttctgtatttgccgacctgaatcccatggattgattatgcaaaggagaaatgtttcatggcgcttcgagagatcatcaaaaagggggaccctgtcctcgagaaacactgccatccggtcacacgcttcgatcaaaagctgtgggatctgctggacgacatgcgggagaccctggcccaggccaacgggctgggcctggccgcgccccaggtgggcatcctgcgcagagcggtcctggtggtcaacgaccaggaggagatgctggagctgatcaaccctgagatcattgccagcgagggggaggaggacggcctggagggctgcctctccgtgcccggttactggggctatgtgaagcgtcccgcatgggtgaaggtccgggcccacgaccggaacggaaatgagtttgagactgaggggacaggcatgaccgcccggtgcttctgccacgagctggcccacctggacggacagctctacacggatctggccgaccggatctacaccaccgaggagctggacgccatgctggaggagcaggggaaatgacgattctctttatgggtaccccggatttcgctgtcccgtccctagaggcgctgattgccgcaggacacaccatctgcggcgtattcacccagccggaccggccgaaaaacaggggaatgaagctccaggcaccacctgtaaagcggatagcccttgcacatgatattcctgttttccagcccgttactctcaaggacggcactgccctggaggagatccgccagctgtcccctgagctgatcgtagtggcggcctacggccgtctcctgccccgggaaattttggagctgccggccaaggggtgcatcaatgtgcactcctccctgctccccaagtaccggggggctgcccccatcaattgggcggtgctcaacggggaggaggagaccggtgtcaccatcatgtatatggcccaggagctggatgcgggggacatcatcgcccaggcgtccaccccgatcgatcccgaagagacggtggagtcggttcatgatcggctggccgggctgggcgcccggctgctggtccagacagtgtcccggctggaggccggaacggcggagcgtaccccccaggacggggaacgggccacctatgcgcccatgctttcccgggagctctctcccattgactggacccgcccggcccgtgagatccacgaccagatccgggggctgatcccctggcctgcctccagcaccgacctgctgggtgctggtgtggtgaaggtgtttggcggtcgagagaccggggagtccaccagccggcggcccggcaccatcctctctgccgacaaacggggcatccgggtcgcctgtggagatggaaaggtgctctgcttgacagaacttcaggcgcctggcagtcgacggatgtctgcggcagactatttgagaggacaccctgtttcggcggaagaggattgagacccattcagaagcgggaggtgaagccctgtggatgcccgagaaacggcgctcctcaccctgaacgcctgtgagaggcaggggggatggtcggacggcgccctgaaaaagcagatatcggcggccggattggacagccgggacgcggcgctggccacccagctgtgtgccggtgttttgcagaaccagatgctcttggacttctatctggcccatttctccaatatccccctcaagcggatggaggggcgggtggtccaggccctgcgcctgggggcctaccagatgctctttctggacaggatcccccacagcgcagcggtcaaccggtccgtagagctgacccgagcctactgcaagaacccccgggcggcggggatggtcaacggcatcctccgcagtctggagaggagcctggagcgtctgcccaccatcccacagcgggacccggtggagtacctgtccatcctgtacagccatccggcgtggatggtgcgggaattcctgctgactttggggaacgacggcgctgcggccctgctgcgggccaacaacgcgcagcctgccacggcggcccaggtgaacaccctgaagatcaacgcccgggagctgcgcctgcgcctggaggagcgaggggtccgggcagagaaacacccctggctgacagactgtatcctcctgtctgggaccgggaatctggaggagctgccggagtttcaggcgggtctcttctacatccaggacccagcttcccggctggcggtggcggcagcaggccctgccgcggggatgcgggtgctggatgcctgcgcggcgcccggcggcaagtcctttgccgcagctatcgccatggggggcaggggaacggtgtgctcctgcgacctgcacccccacaagaaaaagctgatcgccaacggcgcggcccgtctgggcctggactgcgtcacgcctatgacggcggatgcctgcgtccaccgcccggagtgggagggtgcctttgatctggtgcttgtggacgccccctgttccggtctgggcgtcattcggaagaagccggacatccgctacaaggacccggagcccctggcagcccttcccagcgtacagcgccgaatcctggagaacgtctcctcctatgtgcggcccggtgggacactgctctactccacctgcacgctgctacggcgggaaaatgagaatgtggtgtccgccttcctggaggcgcacccccagtttggacccgagcccttccagctgcctggcgtccccggagcggaggggagcagctggatgctgacgctgtggccccacatacaggggacggacggcttctttatcagccgcatgaaaaagagggaggaagccctttgatcgatctcaaatccatgacgccggaggagctggccgcctggttccgggagcagggggaacccgccttccgggccaagcaggtgtttcagtggctctatcgaggtgccgtctcctttgacgaaatgaccgacctccccaaggtcctgcggcagaagctggaggagcactgttttcttacagctccccaggtggccagaaagcaggtctctgcccaggatggcaccatcaaatacctgtggaggctgtcagacggaaactgtatcgagacagttttgatgcggtataagcatgggaatactgtgtgtatctcctgtcaggtgggctgccggatgggctgtgctttctgcgcttccaccctgggaggcaaggtacgggaccttacgccggcagagatggtggaccaggtcctcttcacccagttggacagcggggagccggtctccaacatcgtgctgatggggatcggggagcccctggacaatatggatacggtgctgaagttcctgacactggtcaaccagcccaatggtttgaacatcggcatgcgtcacatctccctgtctacctgcgggctggcggatcaaattgacaaactggcccaacataggttacaattaacactatcggtctccctccacgcgccggacgatgagacccgctcccgtctgatgccggtgaaccggagcgtgggcgtggaaaagctgatggcagcctgccggcggtatttccagaccactggacggcgcatctcctacgaatatgcaatgatcgacggggtcaacgactctgactggcaggctgatctcctggctcggctgctgaaggggacacccggccatgtcaacctgatcccgctcaatgatgtggaggagagtccactgaagcccagccgcagggtggccgcttttcagcggcgcctggaggggcacggcgtgaccgttacggtgcgccgcaagctgggaggcgatatcgacgcctcctgcggccagctgcgccgaaaggccatggctcagacactcggccggaatgacggcaggaaagaggcagatattccatgaatgtatgggggatcacccaccggggaatggtacgagagcagaaccaggatgcgtttgcctgccggaccctgccggacggccggatcattgcgctggtctgcgacggcatgggcggcgcccgggcgggcaacatcgccagcaccatggcggtggagctctttatggaggaattcctttcacgaaaggaggacgagtctgaccgggtccggatggagcgggcggcatcccgcgccaatgacgaggtcttccaccgctctaatgtggacatggagtgctccgggatgggcaccaccctggtggcagccctggcggggccccacgagacagttatcctcaacgaaggggacagccgagcctatcacgtcaccccagaaggcatcacccgggtcaccagggaccactcgctggtggaagatctggtggaacgaggggatctgacccgagatcaggccagagtccatcctcataagaatctcatcacccgcgccttgggggcggagtcccatcttcgggcggactgtttctatcttcaggccctgcccggccactacctgctgctgtgcagcgacggcttgagcaatgtagtgaccgaccaggagttgctctatgaggtgatccacggcggggaggcggtcacctgctgtgagaggctgctggatatcgccctgaaacggggcgcgccggacaacgtgacggcggtcctgattcagtacgaataacagcgacaaaggaggcgatttaccatggatcaatacataggtaaattactcgataatcgatatgagatcctggagatcatcggcaccgggggcatggcccgggtgtacaaggcacgctgtcaccggctcaaccggctggtggccatcaagatccttcgggaagatctggcccaggacgcggagttccgccgccgcttccacgacgagtcccaggccgtagccatgctttcccacccaaacatcgtggccgtttatgacgtcagccgctcctccgacctggaatacatcgtgatggaactgatcgacggtatcaccctgaagcagtatatgcagaaaaaggggaacaagctgaactggcgggaggcactccactttatcacccagatcgtcaaggcattggggcacgcccacagccggggcatcatccaccgggacatcaagccccacaacatcatggtgctgcgggacggcagcgtgaaggtggccgacttcgggatcgcacgggtggcttcaggcgggcacagcaccctgactcaggaggcgctgggctccgtccattatatctcccccgagcaggccagagggagccatattgacgcccgctccgacctgtactctgcgggggtggtgctctatgagatgataactggccgcctgccctttgagggggacactccggtctccgtggccatccagcacatcaattccatcccactctccccccgtgagctggaccctaccatcccagaggcgctggaggccatcaccatgaaggccatggctcccaacccagacaaccgatatccctccgcagacgcgatgctggccgacttggaagagttccgtaagaaccccagcatcaactttgactacgacgtgagcgagttcgtgcccgaggagccggaagagggcgccatgactcagatccgcacgccccatacgccggtgcgcagccgtgtgccggagcctgaaccccgcaggcgccgctacgaggagccggaggaggaagaggaggagctggagaaccgtcccaggcgccgggaccgccggcggggagggacaaactggcccatcatcgcggccatcgttgtcatcctggcctttgtggcgggactgttctacttcatgtatcagttcttcatctcctccatcctgatgccctcgccggactataccatccccaagctgacgggctacacctatgaggaggtccttcaggacccggagctgagacaggagttcaacatcgtcgttggccagacggtggaaagcgaggaggctgcggggacgatcctcaggcaggaccctgctgccgggagcaccgtgaagtccaacaacgcagagatcacggtgacggtgagcggtggacccgaggtgatccagatgatcgatgtcaccaaccaggaatatctgaaggccctggccaccctgcgggacatggggctgagcgtggaggcccccgaatatcagttcgatgatgaggtgcccgccaactatatcatctcctatacccctgcggaggggaccgaactcaaggcgggggacagcgtccatctggtggtcagtaaggggcctgaggcgtccaaggtcacgctgatctctttcgcggacatggcccagagcgacgcggagagccggatccgtctgatgaacctggaggtgggtgagatagagcatgtctccagtgaaacagtaccggagggaaaggtagtggaacagtggccggaggctggtacagaggtggaagaggggagcaaggtcaaccttaccgtcagtacagggcctgagaacccggacattcctcagacatcaaccaagacactcaccatcaacctgccggtggtggatgagacggaccctgtccagtccatcaatgtgatggtcaccagcgacgacggaaaggaagtttataaccgggatgtgaaccctcttatggaagtggctgtgtcagtaccggtcagtgggacagggaaagtgacatacaacgtctatttcaatgggagattggaccacggcgtcacggtcaactttgacgagtgatatggcagaaggaatgattttaaaagccctcagcggcttctactatgtggacgacgggactcagctgttcgcctgccgggggcgggggaagttccgccatgagaaggtgacccctctggtgggtgaccgggtgctgtttaccccgctggaacacgggagcggctcgctggacgggattctccccagaaagaatgagttccagcgcccggcggtggccaacgtggaccaactggtcatcatcgtgtcccaggcggtccctgccaccgatcccttcctcattgaccgcgtgatctccatcgcggagcgccggggatgtgacagcgtcatctgcgtcaacaagtgggacttggtgccgggggaggacctgtaccagatctatacctccgccggcttcaccaccctgaaggtgagcgcggagaccggcgaggggatcgaagagctgcggcaggtcatttctggaaaggtgtctgccttcacaggaaattccggcgtcggtaagtccagcatcctaaatgcactggagcctgggatcgccctgcagacaggggagatcagcgaaaagctggggcggggtcggcacaccacccgccatgtggagctctaccggctgagcggcggggctctggtggccgacaccccggggttctcctcctttgatacggaccgcatggagctttgccgcaaggaggagctggagggctgcttccgggagtttgccccttacctgggaaaatgccagtttaccggttgctcccatgtgaaggagaagggctgcgcggtgctgaaggcggtggaggccggagcgatccagcccagccgccacgccagctatatacgcctgtacgaccaggccaagcagatcccggactgggcgcgataaaattttatcagtggaacagtgacacatcgcctccccgtgcatagactggattagccggaaaacggccagtctatgcggaggggaggctttcttatgggcatcgtcgtggtacgttctcccagatgtctgcggggtctgctgcggaagctgtttggcctgaagtgatcctggggcccagggggcactgagtccttttctgagggtggcatatttgtccctgcctgtacatatagtggtcccaaagcggaatggctgacccggcgcggcggcccaggccgcgccgactcgatttgtaagggagaggacgattatggagcttgagctcaaacgagatgcgatccactgctttgagaccgtagcagatgtcaccatctgtcaggaggagacccaggaggctatcgttccggatgcctgtccggacattctgcgcatcgttgaggtatgcggtcaggcgtgcctcacaggaaaacaggcccgggagggaatggccaccgtctccggcatggtgcgcgcctcggtgctgtatctgccggagacggggggatgtctgcgccatatggagctcagcgtccccttcacctgccaggtcgaggcccccggcctgacctcccaggggaccattttggccgatccccgcctgcggtgggcggaggcccgggtgctgaatcccagaaagatcctgctccgggtggacctggctgtggagatcagggcctgccagccctgtgagcgcaccatatgccaaggggtagaggcggcggaggaacatggtatccgccagctccaggaggagcagaccaccgatcagatcgtagccgtgcaggaaaaaccctttacatttacagatggtgtggacttggggctatcagagggtggtgagctgctcagcctccggggagagccatcctgtgaggagagccgtctcattggcagcaagctgatcttcaagggcagtgtggagctccacgccctcctgcgggacgcggacgggacccttcggacagccagggagtccatgcccttttctcagatcatcgaagttcctggtgccggagaggacgcggaatgtgaggtgcgggtcgtccttaccgatctgaatgcccccgccattgggacaacggtgggctccgccgaggtgacgctggagctcctggcccaggcggtggtgaggagccagcggccggtcaccatgctccaggatatttacagcaccggatggatgctggaggtccagaccgaggaacacaccatgcgccaggtggtggatcagtccattcggccccagagcgtccgtgagatcctggagaccaccaccctggtacgaaacgccatagacgggtggctgtccctgggggagatccggcagagccgggagggcgaccagatgatcctttcggcagaggtactcatcacggccctgtatctggatgacggggaggagcttcagtctatccagcgcaccgtccagacggactgcaggctggactgcccggtccaggcggtgtgtcagtgctggtgtaccgccccaggcgaactggccgtggtgccggcggccggcggactggaggtgcgcttcactctggaattccactgcctctgtctggcggagcgcaggcaggccgctatctcctccgcgcgtctgggggaggaacgggccaagccggacgggacacagccctctgtggtgctacgtatggccgctccgggagagcggctgtgggacatcgcgaaagcgtacggtactaccacggaggagatc

SEQ ID NO: 13619 - DNA, 43258 bp, Unknown
  gut microbiota DNA sequence
agggctgcctgcccacgggcaggatgctcctgatcccccgggtacgctgatctcatcggcaaggagccggaccgggcctgtcggcctgcggtccggctcctttttcaaacaaaggctggaaaagctatgcggcaaggtcatattccacagcttatccccatacactgtaaggaaatcaccggcttgctcggccgaaggaggaatttcagtggaagatcgcaaaatctacgaggatatcgcgcttcggaccgagggcgatatctatatcggcgtcgtggggccggtccggaccggaaaatccacatttatcaagcggttcatggagacgctggtcatccccaacattgaaaatgtgtaccgccgggagcgggccagggatgaactgccccagagcggctccgggcgtaccatcatgacggcggagcccaaatttgtcccggaggaagcggtagctgtcacaatggaggggggcgccgccttccaggtccggctcatcgactgcgtgggctacatggtggagggagcggtgggacatctggaaggagagacccagcggatggtgaccaccccgtggttcgatcacgagatccccatgtcggaggcggcggagatcggcacccggaaggtcattgcggaacattccaccatcggcatcgtcatcaccacggacgggaccatcaccgagatcccccgggaggactatctggaggcggaggaccgggtcatcacggaactgaaggagctggggaagccctttctggtcctcctcaactccgcctatcccaactcagagcgggcccaggccatccaggcggacatcagccagcggtacggggtggcctgccgggcactcaactgcctggagctgagcgagggggacatcaacaccgtcctgaaggatgtgctctacgagttcccggtgaaggagctggacctgttcctgcccccctgggtggacgccctggctcaggaccaccccatcaagtccgccctgtacaccgccatccgggagggggcctccgacctgtaccgcatccgggacgtggagcagacggtccgctccatcaaggagtgcgaggaggtgagcgacgcccgggtgacctccatcgacctaggaaccgggctggccgctgcggtactggacctgcccagggccctgttctaccacactctgtcccagcagtccggcttccagatccaggacgacggggatctggtctctctgctgacccagctggctggagtcaaggcagcatatgacaaggtggcagacgctctgaaggaggtggaggagaccggctacggcatcgtggtgccctccatcgattccctggtgctggaggagccggagatcgtccggcaggggggacgctacggcgtccgactcaaggccagcgccccctccatccatatgatccgcgcggatattgagaccgaagttgcccctatcgtgggtacggagaagcagagcgaggagatggtccactatctgctccaggaatttgagggggacacctccaagatctggcagtccaacatttttgggaaatccttctacgagctggtgggggaggacctgaacaccaaggtcaagcggatgccggaggacgcccgggaaaagctccgggagaccctccagcgcatcatcaacgagggctccggcggactgatctgcatcatcctgtaacaaataagagggcagggcgctccaatcgcgccccgccctctaatattatgtcaactgggagaaaactgcttcatagtcctttccaaaatactgcagctaatgtgagcatgagcctttgccttttggacctatctgcggtataataacatgaaagcggcctcccggccataggatggacgggaggtgtatgccaatatgaaacatgtcatttcggtcctgtgcgtcctggcagtactgctgtgtatggcccccttcgtgtctccgaacggagagggagaggctgtctccgccgctgcccgcacggagacaggccccttcatcgtggatgccggccacggaggagaggacggcggtgcggtctcggcagacggcacccaggagagcggcatcaacctggccatagcccttcggctggaggacatcctggctttctgcggtgccgcccccgtcatgctgcgccgggaggatatctccctgcacgacccggaggccggttccctgaaggagaagaagtcctcggacctgcgcaaccggacccgggccgtccaggatctgtccggcgccaccctgatcagtgtccaccaaaacagctacccggagagccgctacgacggtgcacaggtgttctacgcacccacagagggctcccaggcactggccgaatacacccaggagatcctgcgccaaacgctggacccggacaacggcaggcaggccaagcagatcccagacacagtatatctgatgaatcacattgacaaccgggcgattttggtggagtgcggcttcctcagcaatccacaggaggccgccaggctccgagacccggtctatcagaccaagatcgccgcagccctggccagcgcctgcctgacctttcagggggagcggatcacggcccataccacagagatttgaggatgagatatgaaggccaagacggtattttattgtacggaatgtggaaatgagacgcccaagtggcaggggagatgtccggcctgcggggcctggaatacggtggtggagcggcccgcagaacagatccccaggaagggagggcccgcccgggggacatccggtatcggcgtccctctcagccgtcctaagtccatggaagaggtggaggtcaccgatgagctgcgcttccgcaccgggatgggagagctggaccgggtgctgggcggcggagcggtgcgcggttcattggtgctggtgggcggcgcaccaggcattggaaaatccaccctgatgctccagatctgcgacaacctgtgccggttcgccaaggtcctgtatgtatccggtgaggagtcagagcggcagatcaagctgcgggcccagcggctgaacgtggccggcgaggagctctatctcctgtcggaaacaaacctggaacacgtactggacgcagtccacagcctccagcccgatgtgctcatcgtggactccattcagaccctctatcacggggatatcagctcggggccgggaagcatctcccaggtgaaggagtgtaccatgtccctgatgcagctggcgaaaggggaggggatcaccgtctttgtcatcggccacgtgaacaaggagggatctatcgccggccctaaggtgctggagcatatggtggactgcgttctctattttgagggagagcggcagatggcctaccgcatcctccgggcggcgaaaaatcgctttggcgccaccaatgagattggcgtctttgagatggcagacgcgggactgacggaagtgcccaacccgtcggaggccctgctggccgggcggcccaccgacgcccccgggacctgcgtcacctgcgtgatggagggggtgcggccagtgctggcggaggtacaggcgctggtggtgccctccagcctgggcaatccccgccgggtgagcaacggggtggactacaaccgggccatgctgctgctggcggtgctggaaaagcgcggcggactgatgctcagcggctgcgatgcctatgtgaacgtgatcggcggcctctcactggaggagcccgccgctgatctggccgctatgatcgcttttgcctccagcttccgggacaggcctgttcccagcgacctggctgccatcggagagatcggcctgaccggcgagctgcgggcggtgagtgccctgggacagcggctcagtgaggtgcggcgcctgggatttaccaaatgcctgattccgaaacgggtccagggaaagctgtctgttccggagggcctggacgtgattcgggtggccaacatccgggaagcactggccgccattttgtaagcggggaacaaagttgacacagccgctcccgccggtactcccgcaggatgccgcccgggccagagagcagtagccgtcctgttggtagacgcaggggtcggtgcagacgatcaggctcaaaagatcacacctttttctttttgtttggctgaaatgcgggccatgatatcatggtcatcagtgtgcccagatgagagatatctatgcgaaaagaccgcatcaggaagctagagtctttctgatgcggtcttttcgtgcgcatgatctatgtgatggccgaccggctcttgcaggcgtccctggaggccaaggcggcaaaagccggccgcagggcttgcgaccgctccgccggtgtggtatgatgcaggggaagcactgcgaagggaggtactgcgggaagactcgtaggtcaacaaaataaaaattttgttgacctgagaggaggagcaataggagaaaaccgtgttttcacccatccaaggcccgcaggctgcgatttggactaccgctcagaatcaccacccatccttcgggattttctggtctatcatgagaccatccagggccactccccaaaaaccgtggacgaatactttctggatctgcgcagctttttccgctatctcaagctggaaaaacggctcgtccccaaggatacgcccatggaatcgatccccatcgatgatgtggacatccaactcatccgctccgtcactctgaccgacgtctacgcctatatgagctatctcagccgagaccgcgcggcccatccgaacagcccagacaccagctatggattgtctgcgtcctcccgggcacgcaaggtggcgaccatccgctcattttataagtacctcaccaacaaggccaagctgctgactgagaaccctatgcaggatctggattccccccgcctcaagaagtcactgccccgttacctggatctggaagagagcgtggaattgctggagtcggtagacggagctaactctgtgcgggattactgcatcctgaccctgtttttgaactgcggcctgcggatctcagagctagtcggcctgaacgtgaccgatgtccggggcgatcagctcagagtcctgggcaagggcaacaaagagcgggtcctctttctcaacgaagcctgtcagcaggctctccaggattggctgacagagcggaacatgctggcactgattgataaggaggccctcttcatcacccatcagaaccgccggcgcatctcccgcgctgcggtgcacaagctggtgaaaaagcatctggccgcttccgggctggacagcacccagtattccgcccataagctgcgccacactgccgctactctgatgcttcaaaacggcgtagacgtgcgcactttgcaggaggtcctgggccacgaccacctgaacacgacccagatatacacccacgtggacagcgatgatctgcgcaccgcagcccgtgccaatcctctggggatggtaaagaagaaaaaaaagggaagtgaggacgagacatgaaccgatattcctggctggagggctatctgctgtccatgcccggtgccgtcaccgactacaaattggaatggcagtggcagcgttatttggtaggcgggcggatgtttgcagccgtctgcaccccaggaccggaacatgccgcccatgctgggcggactatggtgatcctgaagtgcgatcccaggctggccgaggcatttcgcgagcagtacccggaggtagtgcccggtttttacagcgataagcggaattggaactcggtctatttggacggggctctcccggacgacgtgctgcgggacttttgcggcatgtcctatgaactggtattccagaagctgaccaagcgggcccaaagagagatcatggaacaggaagaaaaaaggagttcgtgacccatgtattatgtactgttcgtctttgccatgctcacgccggtcctgatggcggtggtggggctgatttggcgcatccatccccccaagcgggacggtggctttctagcctaccgcaccgccctctccagcaaaaccgaggagacctgggccttcgcccaccggcacatctctaagctctggctgcgcatcggactccttctcagcatcctgtccgcagtgcttatggttgtgttccgggagagtgcctcctcctttgtactgtggctgatcggcggacagatggtatttctgtgtatctccgcatttctggtggatgccctgctgaaaaacacctttgatgaaaatggcctccccatagagcgttagtcaggaccacccgtaaaacgggtggcctgcactgaccctataagggtctagtattggccgcgcctcaaggcgcggtgaaacggtctgccgaccgcattctcttacgagcggccccaccaagtggggctgctcttacttgctcttattaaccggctcacccgtaaacgggtcatagtattctttgattgtgagctggtcgcttattttgtcttcctggagctgatttcggatatactccgcaatggcttttttgtttcttcccaccgtatccacgtaatatcccttacaccagaactgtcgatttccatacttatacttcaaattcgcatgtcgatcgaatatcatcagtgaactttttcctttgagatatcccataaactgtgatacactatacttcggtggtatacttacgagcatatggatatgatccggacaagcctctgcctctatgatttccacacctttatactcgcacagtttccgaataatcaccccgatatccgatcgaatctgcccatatatcacttgtcttcgatattttggggcgaagactatatgatacttacagttccattttgtgtgggccaagctgtctgtttcttcttttttctttatcactgatattcctccttcgtttttgagatgcggtcggccaaccactctcattctaccgaaggaggtttatcttttctacgtataggcataccctttttggagccacgggcatagcccgtggttgccgttttacaaagcgatagacctcccaaaaccaattgggaggtctatcacttatctggggcggacccccagaatatggatgccccgcagggcttgatatgggtaggtgctcaacggccggaagtcggcgtcctggctgtgggcggccaccagaatggtgtcgggaaaggccggctgccggatctccaccacgataggatcatgggcaaagacgccgccggcaaagctgagctggataaaatcccccggctccagtttacccagtccggcttccgtgccaaagggccccggcctgctgtcctttcgggtcaaaaagttataaaagtagggcacgccgctccaggatggagatttctgatttccgctgatgtagtaccatccgaaggtaggcgtatggtccatcacgccgctcccagcataaaggcattgggatgcgaagttggtgcagtctccccccagttcagagaaatcgtagtacgccggattccgatcatacgcccaccggtgggcatagcgcaccgcagccccgcggtcatagggcaggatatcgtgcaaaggacctctcccctctcctgcccccattctatgcagaaaacggtcccgggttcatctcacccgaaagttctgtctccttcttctcaccatgggcctacggggcggctttggcgaactaggtatgaaaaaagggagcgccgaagcgctcccttttcaaaaggcagaagttcgatcaggccttgccgtcgcagcccagcacgttgatcagcttatgcttgaccagctgcttgatgttctcacgggcgggcttcagatactgccgggggtcaaagtcggcgggatgctcggcaaaatacttgcggatggtgccggtcatggccagacgcagatcggagtcgatattgatcttgcacacggcgccccgtgcggcctgacgcagctgatcctcggggatgcccacagcgtcaggcatcttgccgccattctcgttgatcatcttcacaaactcctgaggcacggaggaggagccgtggagcacgatggggaacccaggcaggcgcctgacgatctcatccaggatgtcgaagcgcagcggagggggaaccagctcccccttctcattgcgggtgcactgagcggcagtgaacttgtaagcgccgtggctggtgccgatggcgatggccagggaatcacagccggtgcgggagacgaactcctccacctcttcaggacgggtgtaatgggagtcttcggcagacacattgacctcgtcctccacgcctgccagagcgcccagctcggcctccaccactacgccgtggtcgtgggcatactccaccaccttcttggtgatctcgatgttctcctcaaagggcttggaggaggcatcgatcatcacggaggtgaaaccgccgtccacgcaggacttgcacagctcgaagctgtcgccgtggtccaggtgcaggcagataggcaggccggtctcagcgatggcggcctctaccagcttgatcagataggtatggttagcataggcccgagcgcccttggagacctggaggatcaggggggcgttgacctctttggccgcctcggtgatcccctggacgatctccatgttgttgacattgaacgcgccgatagcgtatccgccgtcataggcctttttgaacatttcagtggtcgttaccagtggcataatgaccatctccttcttcaaatttacatgttatattgtaccatttccaattgcgaaatacaataggacatggtatgatttactttggaattttcaataaagaaatgtgcagttttccaatcccgctgcaagatttttgaaggaggcaaccaacatgaatcaactgactggagcctgtatcatcggccagtccggcggccccaccgccgtcatcaacgccagtgcccagggcgtcatccagaccgccctgaagactccctgcatcactcaggtgctgggcgccgcccacggcatcaagggtgtgctggaggacaagctgtacgacatggctcaggaggaccccgctgagctggacctgatgaaatacaccccctcctctgccttgggctcctgccgctacaagctggcggatcccgacgtagatgataccgattaccagcgtatcctggagatcttcaagaagtacaatgtccgctatttcttctacaacggcggcaacgactccatggacacctgcaacaagatctccaagtatatgcagaaagtgggctacgagtgccgcatcatgggtgttccaaagaccatcgacaatgacctgaacggcaccgaccactgccccggctttgcctccgcggccaagtatatcgccacctcctgcgccgaggtgtggcaggacgcccacgtgtatgacaccggcatggtcaccatcatcgagatcatgggccgccacgccggctggctggccggctccgccgccctggcctccctcaccggctgcggtcccgacctggtctatctgcccgagaccgattttgacatggaccggttcctctccgatgtgaaggccgtctacgataagaccggcaagtgcatggtagccgtgtccgagggcatccactacgccgacggcaccttcgtctccgaggctaagacctccgctactgacggcttcggacacgcccagctgggcggtctggcctccatgctggccgagaccgtgaagcagaagctgggggccaaggtccgcggcatcgagctctccctgctccagcgctgcgggtcccatctggcctccaagaccgatgtggaggaggcatatctggccggccaggctgctgtggaggccgccgctgagggctttactgacaagatggtggctttccagtgcactcgggatggcagctatgcatgcaagaccgtcctggagcccctggatatcgtggccaactttgagaagaaggtcccccgcgcgtggatcaacgaggcagggaacggtgtgactcaagagttcatcgactatgtgctgcccctgatccagggagagaccgatgcccccaaggagaacgccctcccccgttttgcccgcctgaaaaaggtgctgaccaccagcctgtaataggtttccagtaaagaagccctgcatggcattgccatgcagggcttctttctatctcgctgaatcaggccatatgccgcgccagaaaggcgtccaccgcgggccagtacagctccggcgccacggcggcggactccgcgtgagcggcaccggggacggccagcttctccttctcgcaggaggcggcctgatacagctcctccagcatccagaaaggaacaaaggtgtcctcctctccgtggatgaagagcgtgggggtgacagagcgctccacctgtctcagggcactggcctctgtgatgctgtagccggcccggatacggcagaccagatccgcagcgttgagaacggggaagggcggcaggccgaacagctccttcagctggccagaaaattcatcccagacagaggtataaccgcagtcctcgatcacacaccggacctggacaggcagatccgcctcaccggaggccatcatcacggtggcagcgcccatagagacgccgtaaagcacgatctccgcctccgggtcctccgcgatcagctgttgacaccaccggaccacatcccggcgctccggccaccccatcccgatgtagtctccctcgctctctccgtgccctctggcgtcggggagcagcaccgtgtagcccaaatcaaacagatgtttgccataggaggccatgccggtggcgttgttttgatagccatggcagaggacagcgtagcggtgagggacgcttccgtccacccggtaggcgtggagctccaggccgtcatcactgatgagggacacgtcacggctgtccttcagcagccagcgggtgtactcgctgtccacgatcccggcggcggagccgaagccgcccttggcgttagggtccagggcaaaggtgtagaaatagtttcccacaaggatcagggcacccagtgccagcaggatcaaaaggaagacgatcaccagggccgccctgaggccgcaaatcgctgttttattcacagggggtcactccttcggcctggagagaggcccggtccgtcccagatactcctgggtctccaccgggagcttccgcttccccagcccatagcgtaccagacggttgaccacgctgtaaaacatggcaaagaccgggacacccagcaccatgccggcgaatccaaacagcccgccgaacagcaggatagagaacagtacccagaagctggccagtcccgtggagtcccccaggatcttggggcccagaatattcccgtcaaactgctggagcacaaggataaagatcacgaaataaacacactggataggactgatgatgaggatcagcagggcgcatggaatggcaccgataaaggggccaaaaaaggggatgacattggtcacaccgatgatgaccgccaaaagggcggggtatgggaagttaaagagattgcagcacaccagcgcgatgatcccaatgatgagggagtccagcagcttgccgttgataaagccgctcatgatgcgataggcattgcgcacctcctccacgatcaggtccgcccagcgggtctcacacacactgtacacgatctttttggcctgggcagagaagatatcctttctggccagcagatagacggagacgataacggcgatcagcaggtccttggccagcatcagcagggcgatgaacacagcggacacactggagaacatggaggtgagccggggaacgatctcctgctggaaccaggacaaagagctgttgacggactccagattggggagcagatcggactggagccactcctccaccgacacagctaccgagttgtagtagggcatgaccgctgtctgaatgtccgggttattggccaaaaattccatcagccgctcctggagggtcataaaatagccggggatggactggaccagccctaccacgctctcatagacctggggcaggaccatggccagcaggatataaatgactagggcggcgaacagaaggctgaggatgatggccactgcgttgagaaagctcaggttccgccggtctgacaggcggctgtccggggtgagtccggtgagaaatcttaaaatggcccggtggatgggcagcaacaggaaagccaggaccgctccgtagtagatgggacggagaatgcggttgaccgtggagagaaagctcaggatgcccttgaagtgaaagacggcaaaaaagacgaggatagcggcggcgatgaccagaaatgcagtcacgccggcaaaaaagtatggattttgcggcttcttgttcacgtgggcagctcctttttctcagactttcagctctgtgtcctcatccttcaggcagtcctgatatttggccagagcgggggcgacctgctccttcaggaactcctccacctgctgggggcagcggccgatgtagcggctgggctccagatgggcggtgagctcctcccggctcataccaaaggccgggtcctctgcgatcagatcgatcagattgttgggcaggcccaggtcctttacattccgcccggcctcctgggagagcacgcggatacgctcgtggagctcctggcggttgccgcctcgcttcaccgcatccatcatgatgttctcgctggccatgaagggcagctcctccagaacgtggcgctcaatgaccttgggatggaccaccagaccggaggccacgttcaggtagatgttcaggatggcgtccacagccaggaaggcctctggcacagacaggcgcttgttggcggaatcatccagggtgcgctcgaaccactgggtcgcggtggtgacagcggggttgcccgcgtccaccatgacgtaacgggccagggagcagatacgctcgcagcgcatggggttgcgcttgtagggcatggcggaggagccgatctggttcttttcaaagggctcctccacctccttcaggtggcagagcagccgcatgtcggtggcaaacttgctggcggactgagcgatgccggacagggtggacaccacgttgtagtccatcttccgggaataggtctggccgctcaccgggaccacggcgtcaaagcccatctcacgggctatcttccgctccagctccttgaccttctcgtgatccccctcgaacagctccaggaaggatgcctgggtaccggtggtccccttggagcccagcagcttcagggtggagatgcggtgctccacctcctccagatccatgagcagctcgttcatccacagggtggcccgtttgcctaccgtcaccagctgggcagcctgaaaatgagtaaagcccagggtgggcagggccttatactcctctgcgaacttggccagccgggcgatgacctttaccagcttggcccggaccagctccagtccctcccgcatgaggatcacgtcggtattgtcccccacatagcagctggtggcccccagatggatgatgggcatggctttggggcacagctcaccgtaggtgtggacatgggccatcacgtcatggcgcaacttccgttcccactgggccgccttctcatagtcgatatcagtgatatgggcctccagttcatccacctgctcctgggtcaccgggagccccagctccatctcggcccgggccagcgcgacccacagacgtctccaagtggagaatttcttgtcagcggaaaagagatacagcatctcgtcgctggcatatcgggaggacagcggactttcataggcgttggtcggcatttgcatcaaacctcattttatttagaatctgggcagctctcccctgcccgcttgtatcaaatattataacgtactccccgggggattgccagtgctttcccaaattttcacgaaaacttaagagaggaaagcgggagcgcggacatgggtctgtccgtgctcccgctctgtttcgtcatgtttagatggtctcgcccttcaggaaacgctccagccggttcaggccctccttgatgttctcaatggaggtggcataggaccagcgaacaaaagtgggggcaccaaagccagtaccgggcaccacagccaccttgccgtacttcaggaagaggttgccgaaatcgtccgcgtcccggatgaccacgccgtggagctcctggccgatgagcttctcgatgttcatcatcacatagaaagcgccgtggggcttgatgcagctgacgccctcgatgctgttcatccgctccaccatgtagtcacggcggcgctcgaaagccttgcgcatgacctccacactctcctgggaggcagtgagggcggtcacagcggccttctgggagatggagctgggggagccggtgcagtggctgaggtagttggcgatcaccttggagacctggtcgttagcggccacatagccgatgcgccagccggtcatggcataggacttggaaacaccattgaccagcagggtgcgttccttgatctccgggctgatggaggcaaggctgacgaactcctctccatcatacaccagatgataatagatctcgtcgcagatcacgtaaatatcctgttctacgcagaccttggcgatctcctccagctccttgcggctgtacatcatgccggtggggttggatgggttgttcaggatcatggccttggtcttgggggtgatggcgtcccgcagctcctgagcggtgagcttgaaatggtccgcctcccgggtctccacaataacaggcacgccgccggtcatcttgatgagctcagagtagctcacccagtagggagagggcaggatgacctcgtccccagggttgatgagggccctcagggccacatagacgcagggcttggcgccgttggacacggagatctgctggggggtgtactccacgccgcagtcggccttcaggcgctggcagatggccttgcgcagctccaccgtgccgctggagggagtgtagcgggtctcgttgtgctcgatggcggcaatacccgcctctttgatatagtccggcgtattgaagtcgggttctccggctccaaacccgatcacgtcctgcccctcggctttcatctgcttgaacagagtgtcgatggccatggtgctggacggctcaacagccagtgcgatcttggaaagctctttcatatcaatgttgtcctccttctggcgaatcacgcatggcatattatatgcgccgacttgcaggattgcaagtggtttccggttattttcctgaaattctgaacaatttggcaggggacggtgcaagtcaggggtagagctccctccattctgtgctttttcaccaaattctcctctgccctgttcccactcccgttcctccagagggcaaaaggacccgggcccccctcccggatctggcttgggggtcccgggtctgtgtgttttctctgagtcagagcttttcccggatgcgccggcccatctcccgggtcccgatggggatgacgccgggctcggcgatgtcagcggtgcgccagccctcagccagcaccgcgtccacggcgttttcgatggcctgggcctccgcggccaggtggaaggagtagcggaacatcatggccacagacaggatggtggcgatggggttggccttgtcctggccggcgatgtccggagcggagccgtggatgggctcatacaggccgggggcggcgtccccgatagaggcggagggcagcaggccgatggagccggtgaccatggaggcctcgtcggagaggatgtccccgaacatgttctcggtgaccaccacgtcgaactggccggggtcccggacgagctgcatggcgcagttgtccaccagcacgtcctcataggacacgtcggagtattcctccgccagccggtgcatcaccttccgccacaggcggctggtctccagcacgttggccttgtccacgctggacaccttgttccggcgcaggcgggccagctcaaaggcccggcggccgatgcgctcgatctcctgctctgagtaggccatcaggtcggtggcctcctcccccctgtcctcagtctgatagcggtcccgcttgccgaagtagatgccgccggtgagctcccggaccatcatcaggtcgatgcctttctcggcggtctccttcttcagggggcaggcgccggccatggcgggacgcagggcggcggggcgcaggttggcgtacagccccaggtcctttcggatggccagcagggccgtctccgggcgctgttccgctggcttgtcgctgccccacttgggaccgcctacggcgcccagcagcaccgcgtcgcaggccctgcacttctccgcggtgccttcggggtaggacacccccactgcgtcagtggcgcagccgcccatcaaaatgtcctcaaaggtaaagctgtggccgaacttcttccccacggcttccatgacctggaccgcctcacccactacctctgggccgatgccgtcgccccggatcagcgcgatcttgtagttcatttcgccaccccccggtccttcagggagttgagcaggccgccgcttttgataattccgtcaataaactccgggaagggggccgcctggtaggtcttgccggtggtctcatcggtgatgacaccagtggcaaaatccacctccacctggtccccggcctggatctcctccgccgcttgggcgcactccataatggggaagccaatgttgatggcgttgcggtagaagatgcgggcaaaggagggggcgatgacgcacttcacaccgcaggacttgatggccagaggggcgtgctcacggctggagccgcagccaaagttaggaccggccacgatgatgtcgccgggctggacggtggaagcgaagtccttatcgatgtcctccatgcagtgggaggccagggccgcgggagaggggtcgttcaggtgccgggcggggatgatgacgtcagtgtccacgttggcaccgtatttgtaaaccttcattggttcgtcgatcctttctttacaaattaagaattaggaatgaggagttcgggaccttatattccccgttcgctttagatgcgggggtcggccacgcagccggccactgcagaggcggcggccacggcgggagaggccaggatgacttccgactgcacatgacccatgcggcccacaaagttgcggttggtggtggagacgcagcgctccccctccgccatgacgcccatgtgtccacccaggcaggggccgcaggtgggggcggagacagcgcagccggaggcgatgaagatctccagcagcccctctttcatggcttggagggtgatctcctgggtggcggggatgacgatacagcgcacattttccgccacctttttccccttcagaatagcagcggcctcccgcaggtcctggatgcgcccattggtgcaggagccgatcaccacctggtcgatgtgcaggccggccacctcgctgaccaccttggtgttctcggggagatggggcatggagacggtgggttccagcttgtccagatcgatgactacctcccgtgtgtagaccgcatcgggatcggcctcaaaggcctcgcaggggcggcccacccggccgttgatatactccatggtcttctcgtctacggggaagatgccgttcttgccgccggcctcgatggccatgttggagatggtgaagcggtcgtccatggacagggaggacacgccctccccggcgaactccagggactgatacagggcaccgtccaccccgatctcgccgatcaggtgcaggatcacatccttgccgctgacgcagggctggagcttccccttcagggtcaccttgatggcagaggggaccttgaaccacagcaggccggtggccatgcccgcggccatgtcggtggagccgatgccggtggagaaggcacccagcgcgccgtaggtgcaggtatgggagtcggcccccacgatgacctctcccggggcggccagccccttctcggggatcagggcgtgctctacgcccacctggcccacgtcgtagaaatgggtgatgctgtgcttatgggcaaactcccgtgcctgcttgcacagctgggcagacttgatatccttgcagggggtatagtggtccagcacaatggcgatcctgtccttgtcaaagacctgggtgaagccagccttctcaaactccgtgatggccacaggggtggtgatatcgttgcccaggaccaggttcagcctggcttcgatcagctggcccggctggactgaggacagcccggcggcctttgccagaattttttgtgtcatcgtcattcccatggaatgtgcctcctcacttttgtgggtgattttttcctgtccagtatgacggttctcttgccaaaagaatgttaactatgatacaattaagaggatttcttgggaaaagaggagagatcgatggaatacgccaacaccttttcgctggacttccctgtggagctctggcgtcccttcgcccaggaccgcccctcggtccgctgctcctccggctatctgatctacctccaggggacagaggccacctgcttttattatttgaaaaagggaaaggtaaagagcttcatccagtcggaggacggggcggagcgcaccctgaacctgtatcagcagggctccatcttcggggaggcatccttttttgacgaactgccccgggtgtcctccgccgtagccctcaccccctgcgagatcgtccccatcgaccgggagcaggtcacggcggaatttacccggaatccaggcatggccatggccatgctgaaatatctggcccggacggtgcggctgctgtccgcccatgtggacgacatggccttccgtccggcagagtggcgggtggctcagtacctgctctccgcagcatctgggcaggatcaggtgtcctgcacccaggaggagatcgcctcgtccatctctgttagccgggtgaccgtcagccgcatcctgaaccaattctcccgcagggggctggtcgctctgggataccggagcatttctcttttggaccgcaggactctggaaacgctctgcacaccctaaagctggagcggcgcatttctgatgcgccgctccagctttttaggtctctaatgtatccataagctgccgaagctgctccagctccggctgacagccatagtcctctaagtcccaggggtccagcttctcacagagcagcgcacgccccagctgccgggccatgtccggatcacgcggcgttccgatccccagagcataacatcgaatcaggcggcagcggcagttgacgtttcccttttccgcacccgcctggtagagcgcaaacgcctgcttcgggtcctgctctactccaattccgatctcataaaaacgccccagtgcccaaaaggcagcttcatccccggactgctgggcctgtcggtagcagtccagcgcctctgcgatgcggcccgcctgttctgcatgccagcccatgttatagagcgcacagacactccctgcctccgctgcacgctgataccaaaacatagcctgttcgaaatttcggggccctccccttccatttgccagcatctccgccaaattgttcatgctggaggcattccccttctctgccgcacaccggtaatattcgactgccctggcgtaatcctgttctgtcccgatgccgtattcataagaccagcccaaaagccccaaggagtcggcatcccccacttcggcggacttgtgaaaccagatcaacgcctgcttcaggtcctctgcaactccaatgccgccctgacagcaccggcccagttcatacatggatcggacggaaccccgctctgctccctgcctgtaccagcttaccgcagcttccgggtctttttccacaccttttcccttttcatagcaccagcccagatttcccatcgcaacagtatttccggcctgtgccgcccgccgataccactccacggcctgcttccagtcctggggaacaccgtgtccacgctcatagcaccaccccaggttgcacatggcgttgtcctgctcttgttccgcagcccttcgcagccagatgactgcctgcttgtcatccttcccaatgcccctgccatggaggagccggtatccaaagctgctcatagagcggggattacccgcttccgcgcctttgcgatacagctctgttgcctggacctggtcctgctctaccccgatcccttcagaatagcaccaggccagatttcccatggcgcggatgctgcccgcctccattgcacggcggtacaaagctgcggcctttttcccgtcctgatccacgccctgccctgtctcatacagccaccccaggcagcggctggcttccgcgtctccggcctcagatgcctgttcataccagtgcgcggcaagagggaggctggcctctacgccctccccatgctcatagtcccaggccaggcagtacatggaacgtacgtctccagactcggctccacgctggaaccaccgggcggcttcggcgtggtcctgctccacgccttttccgttgtcatagcaccaagccaggttgcccatggcccggccgctcccggcctcggcgctccgcagataccactccgccgccttctcccagctctgctccacgccctgacccgcctcatagagccagcccaggttgcacatagcatcgctgtcccctccgtccgcagagcggcggtaccagtaggcggcctgagcatagtcctgtccgatcccccggcccttctcacagcaccatcccagatcatactgggccgtggagtcccccttctgagcccccagggtccaccagcggaccgcctcctggtcattctgagggaccccatcccccttcaggcacatctgtcccagctcgcaggccgcggactcggcccccagctcccatgcccggaccagcaggtcccaggcccggtctgggtcccggggcatcccggtcccattgaggcagcagatccccagaagcagagcggcccggctgtgcccctgctccgccgcctgcgaatagagctggaccgcgccgtccgcgtcctgctccacccattttccgtgttccatcagccagcccagacagcactgtccgtccgcatcccctgcctgagccgcacggcggtaccactgtacggcctgcttgggggagatctccgtcccgacgccaaactcatagtgccgggccagctccgcctggctggaggcgtccccctgaagggcggaggtccgcagccattccagggcagccttttggtcctggggcagtcccagcccctgttccagacagcgggccagcagcctctgcccccgggaggagccgtgctccgccgcttgccggaacagctccaccgcctttttctggtctgaagtggtgccgatcccctgctcatagcagacgcccagattgcacaccgccgacaggctccccatctccacggcctgctgataaagccagaaagcctggcgggggtcggcctccactccgatcccctgttccatacagatgcccaggttgcaggtcccccagccacttcccatgccggcggagcggcggaagcaggccagtcccctctctttcccatcgggccggctgatccagaagacaccaagggcggaccagtcatctccggtcatctccccctccgccgcctggagcatccgcttgccgcagcggggacagaactccggcagccggggcccctctccaaaatagccgcacccctggtctgaacagcgaaaaatcatactgctctcctttctctggccagcctactccaggccctgctccaaaattcgatagatggcctccatgtccaagctccgccgcagcatgtcagccagccggtcatactgccgttccttaaaggtacgggcgtcctcggtgcaggactgttctccgttccactccacccccttctcatccaggagcagatccaccagcccgcaggtgaacgcaccgctgtcaaacagtccgtggagataggtcccaagcacccggccctccacggtgaagatgctctctcccccgctggtccccatatggatctcatagccctccagaggacaccccctgagccgtccataaaatccgtcagggagatccgcttgacaatacttctgttctctggactttttacgagaaaaggtggtggccaccggcaggagtcccatcccatgcatggagccgcctccctccacgccctgggggtcctccagagtgcggcccagcatctggaatccgccgcagatcccgataactgggacaccctttcccaccagccggaggatcgtcccctccagcccgctctgccgaagccaggacaggtcggccagggtgctcttcgtacctgggaggatgaccagatccggccttcccagtgcctggaccctgtccacatagcgcagtcctaccgccggatggcgctccagaggggcgaaatcggtgaagttggagatgcgtggcaggcggatcaccgccacgtccaggggcttcccctcccgtctagcagaaaagtgctgggagaggctgtcctcttcatccagatccagctccatccagggcaccacccctaccaccggcacatgggtcagctcctccagctgggtcagaccggggcggaggatctccacgtcgccccggaatttgttgatgatagtccccttcaccatagcccgctcatcaggctccagcagggccatggtcccgtaaagggcagcaaagacaccgccccggtcgatgtcacccgccagcagcacaggcgcccccgccatccgggccatccccatattcacgatgtcctccgccttcaggttgatctctgcggggctgccggccccctccagtacgacgatatcgtgggtctgggccagggcgtggtaggactccagaatagtggggatcagctgctttttgtaggacaagtaggcagcggcggacatgctgcccaccacctccccgttgacgatcacctggctccccacatcgctggtgggcttgagcaggacgggattcatccgcacagagggctccacgccggccgcctccgcctgcatcacctgggcccgccccatctccagtccctcccgggtgatgaaactgttcagcgccatattctggctcttgaagggagccacagagtacccgtcctgccggaagatacggcacagccccgccgccagaacgctctttcccgcattggacatggtcccttggatcataatggatctagccatggaaagcctccctctcctgctgaatggcctggatcagcctcttattttccccgcggctcctgacgcagacgcggtagaagccaggacccagcccctggaagtcggcgcagctccggatcaggatgccccggtccagcaggcgctcccgccagccctcctccccctggaacagcaggaaattggagtcgcttgggtagacgtggaaccgcagcctgctcagttcctgagagagatagcggcgctcctcctccaactgctggcggacgcgaaatggccagtccggcgcatactgtaaagcagatatccctgcctgttgtgccagctgtgacaccggccagggcgggccctcctccgccatagcggccagcagtgcccggtcatcggacaggcagtaacccagccgcagcccggccatggcatagctcttggtcagggcccgcagcagcagcaaccctccgcactccagctcccgaaccagccggtccggctcccctggagacaactccagaaagcactgatccaccaccagcagtgctccggcctcccggcagcgggccagaagggcccgcaacagctggtgagagatcagtgtgcctgtggggttgttgggatcacagaggaacacagcatcaatttcctgggaaatttttccgagcagggcgctggaaaagcggaaatcttcgtgcatatttgcgtaatggaatttaactttacaattatttttgtacagggccctgtggtactccgaaaaggtcggggccaggaccagggcgtggtccggacgcagggctcggaccagccggtcgatcaggtcagaggccccgttcccacacagcacccagtcctccggaacgccgtcccgggcggagatggcccgccttaggccacggcagagggggtcaggataggcgggagagcgctccagcgcctcccgcgccgcctggatggcgcagggcggcacccccaaggggttcaggctgatggacagatccagcacaggccgctccagtccatagatgtcgccaccgtgggtcctctcctccatttcgctccctcctatctgaatatgtgagaacacagcactgccgctgcggcgcacagggccagacacaggacctcggtcccgtacatcagtcggttggccgccgggatgtcctccggccggatgggccgctccacctccccgatggtgggctttcggaccagcgtcccaaaatagctggcatccccggccagctggacccccagcgccccggcacaggccgcctccgtctgagcggagttgggggacttgtgcttacgccggtccctgcgccagatccgcagtgcgtcccgcccccggaatccaggcagcagagcggcggccaggcacatgagcagggcggacaaccgggctggcaaataattggccgcgtcgtcggtgcgggccgcagccctgccgaaaaagaggtatcgctcgtttcggtatcccaccatggagtccatggtattgacagctttgtacaccatgcctaggggcagcccgcccagagccagccagaacaggggagcgatcacgccgtcagaggtgttttctgccaccgtctccactgcggcccgggtcacgccgtcccggtccaggcactgggtatcccgtcctacaatgcggccaaccgccctctgcgcgtccatgaggctcctgccggtcagggcccgatacaccgccatactctcatcccggaggcaccgggcggccagcagctgatagctgagccagacctccgccgcagtccccgccgccggagagagggcatatagagcggccaggagcagcaggctcccccctccgaagagcaggaccatggtcagcaccagcaccccgccagccagcagttctcctcccggcgtcctgggaaaaagccgccgcaggccggtctccaggcggctgatggtccatcccatcagccgtatggggtggggcatccacgccgggtcccccaggagccagtccagcgcggcagcggccagaaggacccacaggcggctcacagcgtctcaatcagggtgaaggccatgtcctccccctcctccacccggaccagatacccgccgcagttgctgggcagccagctgtaaaaatcctgatgtggcaccgcaaagccggacatagcggacatcagggtcccgccgtgggccagaatcccgggccgggacatgcccagggcacgggcctgctccaccacatgggccacccctcggcggcagcgggcgatgtgctcccccagcacctctcctccgggaaaggcgatgtgggggtcccccgccagccacgcctgatagatggggtcgtccttcagctctgcccaagtcttgccctcaaaggttccgaaatcgcactccttcagcgcgtccaccagccgctgctccacgccgggaaacaggatctcagccgtctgccggcaccggagcataggtgagacccacagcccatcgatgggaggcatctccccccggcggcgctccgccagcgccacgccctccggggccagggggtggtcctgggagcctacatactgccgcagcagattccctctggtggagctgtggcggatcatcagcaattccatgtctattcctctctgtctgttctattttagtcttatagccagcccgcaggagatccggtacaccgcctcggccctctccgccagctggcagcagaggcggcccaccgcctcccgccgctgccgttcctccgcctggatggggaccaggccgcagcccacctcgttgcagatcactgcccgcagtcccatcagctcctccagatccgggagggggtccagcgcatggaggtcgtagagcacctgtgtcccaggccccaggaccggggacagctcctcctcccggacccccagctcacgccgggcgaagtcccgttttcctgccccaaggccgcccacgatcaggatcatatcaacacctccgctatctctctcgccaacaccatcgccgccagacagcccaattcgcacacctgaaggaaccaccccgccaggtcacccgtcaaaccgccgaactcccgacgggccatttggatataccagagatagacgaggatggcggcggccacagcggcgcagcccacccccagcatcccgatggccagcgccagcagagcgcacagaaacagcaaaaaccgctgccgccccctcccctgctcctgctccgtaaaggcggccagcaggccgtccgccctggcccccggctgggtcagcgccccgtaccccgacatggcccgggagagcacggggaccagagccagtacccacagatcctccttctcccagcccggctggcaccacagggcgtattgcaggaggagataggacacacagcccagcaccgcgaaggcccccacgcgggagtccttcaggatctccagcttccgggcccggtcctggtgggaggccagcgcatcacaggtgtcgcagaagccgtccatatggataccacctgtgtaggccagcggcaggaggaccgcccccgctgcccggagctgcggcgtcagcgtcagcagatccgccagcgcggaccaggccagcaggagcagacctaggacagcccccacaaggggaaacgcgcacaaaacccaggcccggcagtcgtcggaccaccggacccagggcatgggaagacgggagtacatggagaaggccatagagaccgcccgcagatacctcaacagcactcctccttccagatcaccggcagtccgcagaccacctctattacccggccgcaccgccctgcagccagccggtgcaggcgggccagcccgtccagatagaccgccgtctcgggagaacaggggacctcctctccgaacacatcggcgctcaccaccaccaggttctgggcctggacgctgagccgctccaacccctccgccgtccggagcagggccccatccgggtcgaagcccgaaggggaaaacagctcattggcccacagattgcccagatcctccagcagcacgctgctccccaccgggatggtcagcccgcccaggtcccgcgggcactccagggtggagaagcccttgttccgccgcagggcccggtggcgccggacccgcgcccggctctcctcatccatcgcctccatggtggccagatagatccgaggcccctcacaggacagtgcacacagaagatcttccgcgtaccggctcttgccgctggccgcgccgccgtaaaccagtgcctccatctcagctctggcggcgatagggcgggatgcccaggccctggaaggtggccatgtcccgatagatggacatggccatatccagcatgggcatgatggtcacggcgccggtcccctctcccagcttcaggtccgccgaaacaatagggcgcagccccagggcgtccaggagcaggccgctggagggctccgctgacctgtggctggcgatgagggccttggccgcgtccgggcagagccgcacagccagcagggcggccgcggcggagatggcgccgtccagtaccacaggcacatggtggagggcggcccccagataaaagcccgccataccggcgatatccagccctcccaccttggagagcacatccagcgggtcccgggggtcaggggcgttgacttcgatggccctgcggatcacggcgatcttccgctccagcccttcatctgacaggccggcgccccggcccgtcacctcctccacctgccgccccagcagcactgctgtcacggcggcggcggtggtggtgttgccgatgcccatctcccctgccgccaacaggcgatatcccctgcccttgagctcctctgccagcgtgatgccggtgaccactgcggccaccgcctcgtcccgtgtcatggcagggcccttggcgatgctcctggtcccacgggtcacgtggcggcgcagcaggccgccctcctccaccgggtgggcgatcccgatgtccaccgggaacacctgtgctccagcggtccaggccatgcggcagacacaggcctccccccaggccatggaggccgccacagaggccgtcacctccggcccggtctgggtgaccccctcctcagtcacaccgttatctgcgcagaagacggccagcgcctttctgtccagactgacatccgcggtcccctggactccggcggcccggatcaccgcctcctccagcaggcccaggcccccgatgggcttggcgatggagtcccagcggcgggccgcctccgccatagccccctgatccgccggcgtgatgccggagatcgcgatactcaatacgctggtcgtcataatgctccctcctgaaatcgcccgcacgccgccacgaaccgggacgcaaaggccggatttgaccgaaaatacaggtgcggaaatcccgcgaacagggctccctcacaccggacacagagccacgcttcgcctgtcacaggcttttgcgcccggcaggccgttccgttgtccccactgtcccagcggtggaactcgtgggctgcgatggtctccccccgaggaagataaggggtgtcctgctccgccgtcagggagatatagccgaagcggccggttccggatgcccgtttccccctgccggacaggacccccgccatgggccagaagacaccgttttcatcctccagctcttcctggagatagagaaaaccgccgcactccgccagcactggcatcccggcgcgggctgccgcacagatctccgcccgcagagacttgttccagctcagctgccgggcatacagctccggatagcctccgcccagatacaggccctttgtcccggaaggcaggtgccggctggtcagggggctgaactccaccagctccgcccccagctcctccagcagttctaggttatcctcgtaataaaaggagaaagcccggtcccgtgctacggcgatgggtattccgccgccgctccggggcctcgctgtctccagcgatgcagtcaaagggggggctgaagccgcaatggcgaacagggtgtccaggtccacgctctcctccatctggccggccagacgcaggatcttctcctgaagcccctctacctcggccgccgtgatgaggcccaggtggcggctggccagcgcacagtccggcatccgcgggatatgccccaaaacctgcaggccggtctccctctccaaaatgggtgtgagatggcggcagagcttcggggagcactgattcaggatgacgccctgtatcatgtcgggcgcccggaatgaccgcagcccctgcaaaacagcagccaatgtgagggaggtgccccctggaacgacggtgagaacgaccggcgtatccgtagccctggccaggtgccagctgctggcccgttccgttccggcgattccatcataaaagcccatgcagccctccagaacggccaggccatggcccgcaccggcacgggccatcagcccccgcaccgtgggctcgtccgaaaaaaacaagtcgagattgcggctgggcagactcagcacctcccggtggaagagagggtcaatatagtccgggccgcatttgaaggcacaggggtccactccccggttcagggcggcctgaagcagcgcgcaggtcagagatgtcttcccgctggagctggcaggggccgccaccatcactctggggagcgatacggtctgatgttccatggatcaagttcctcccagtgggttcctcggattctcattatagcggctctccagacaaaatgcaatctgagaatccagacattcctgccctttccaggcccgatccagaaagctcctcggaaaaaagagggcgatccgccgcggacatgctctgggacgcctgtgtcccgccggggccgccgctctccccacggcataggatggtgcggaggagcaatcctccaatccacacaaggaggaatcctgcattgaacaaagaaacttgcagcgcggccggatcggccagctgcccggactatttcggcacactcccctcttgtgccgggctggctgtcccctatgtcccctttcagcagaatgggtctcaaaaatattctcagggggatgccctgagtaacggtacgctgtttcccggtctgaatctgcccttccatctgaaagtggaaggcagcacccttccctccaatccgctggtagagctccaggcactggagttcgtggtgctcgagctgggcatctatctggatacccatccggaagacatggaggcattccagctgttccagcagtatgctgccatggaaaagtccgccaaggcggcctatgaaaagcggttcgggccgctgatgaaaagcacggcggccacggaggacacctaccgttggctccaggacccatggccctggaactaccagcagaatgaggtgaagtgacatgtttatttatgaaaaaaagctccagttcccggtaaagatcgccacgcctaatcccaaactcgccgcttttattatcagtcagtacggaggtcccgacggggagctgggcgcttccatgcgctatctgtcccagcgctactctatgccttatgccgaggcaaagggactgctcaccgacatcggtactgaggaactgggccatatggagatggtggctgccatcgtccatcagctgacccggaacctcactgacgaggaggtacggaactccccgtcctttgccccctattttgtagaccacaccaccggcgtctatcccacggcagcttcgggcttcccctggagcgccggctctatccagtccacgggcgacgtcatcgctgaccttacagaggacctggcagcagagcagaaagcccgcctcacctatgacaatatcctgcgtctcagtgatgacccggatgtgaacaacgtgatccgcttcctgcgggagcgggagatcgtccacttccagcgcttcggcgagtgtctgcggctgtgcaaggaaaagatgaacagcaagaatgtctatctcaccaaccccgcattcgacaaacagatgacgccccagccccggaatgcctgagtgtcccggagtctgctatcaaaaagtgcaaaaaagcctgcggtctgatggaccgcaggcttttttgtgggttcagacccggatcagctcataggtccggctgcccaggccgatcttttccccatgggccaagcagctctcccactcgcactccggcgtcacattccggaagtggtcgtggagatcatggaagccttcctcatgcatccggtcatccagaaggctgcctgggatgggctgctgccgcaaacaggcatccacgcacgcctggtccagggccaccgggtcaaacgaagcgaacatccccacatcaggcaggatggccatatcgttgtccccatggcagtcgcagtagggagatacatcgatcaccaggctgatgtggaactggggccgtccatccaccaccgccttggcgtattcggccatcttccggttcagctgctcacaggcacagtcgttggggttaaaaatggcatcaaagttacacaccgcgatgcaccgcccgcagcccacgcacttttcctggtcaataaatgccttacccccatcgtaggagatagcgtcctgcccgcactgcttgatgcactggcggcagcctgcgcagcgcttctgcttcaccaccggctttccgccggagtgctgctccatcttgccccggcggctcccgcaccccatgccaatatttttcagcgcaccgccgaacccggtctgctcatggcccttgaagtggctcaggctgatgaacacatctgcgtccatgatggcgcggccgatcttagccttctccacatactcgccccccgccaccgggacctctacgtcatcattgccccgcaggccgtctccaatgatgacctgacagccggtggagaagggggaaaacccgttctcataggcgctctcaatgtgctccagggcatttttccgcctccccgggtagagggtgttgcagtccgtcagaaagggaacgccgcccagctccttcaccacatccgccaccgccttggcgtagttgggccgcagataagtcaggttcccgggttctccgaagtggagcttgatggccaccagctttttttccatgtcgatctcaccgatcccagcgctgcggatcagccgctggagcttggtgagctggcttgtccccacaggggcccggaggtccgtaaagtaaactttcgatttgttcatagatctcacatctcctcacatgcatcgattgcatcgatcaaaactcagttggacggcatctgttgtttggcgcgtctgatctccagtatcccggggatgatattggcaaacgagcccgccaggatcagcaggatacccgccagcatattgcccgggatctcctccccgtggaccatccaggccagtatgggcgagagcgccggcttgaagaaatacaccagcgagaccacgctggccggctggtattccatagccaggaagtaggcgcagaagcccacgccggccacgccggccgagacatagagcacatagggcaggttctggagggtatagccctccagaatggggatctgggcaaaggagggcagaccgatggactggaagaatcccgccacggcggggatatgggtgatcaggataaagcagaaaatgatgacgctcccgaagaggaagctgaagcaggtgaccaccgcgcccccgtactccgcacactttcgtttgcccatcaccccgtagatggagaacagcacagtggagcacagggccagtcctacgcccaccatgttcagcttgatatgcagggggttgataatggccagggtccccaggatctccagactcagggctgccagatggcgcctcttgatgggctccttcaggatcatgaaggcaaaaaaggtaacaaagactgggttgcagctgaacaggaccgccaccacggaggactcggtaaagttgatggacatctgatagatcggcatgcagatggcaatgccgatcaggcccagcagggcgaaataggccacgcttttccggtccaggcgcttgcttcgcttctttagggtgtagacagccaccggggccagaaaaacgaagccgatggaaaagcgggccagcgtcagctggaccggattgacctcccccgcgatgagtttcagcaccacctccatggaactgaacgcgatagttgcaatcaggataaaaaaatatccttttttcatgttaagtgtctccccttacaggctcatgtaagtttgttttttgattatagcacagcaggccctgaaaaggaaccaaaactcagagcagacaccgaaacggctggaccaggagcgatgtgatgggataaagtgcatgcttccagtctccgttatcccagggggtcaccccttccttctccacataggtctccagtccggacaccagcagagaatcctcctccatttccgctaggtaatgttccaagaccgcattaaattcctccccatggatcacgaacatcacttccgtatccacataggtgctgcgcatatccagattgtaggagcctaccgccgcgaggtcctggtcaatgagcagggactttccgtgggaggagtaatccccgtaccactcccatacctgagcaccggtatccagcacccgagccttattgcggtaatagtcggaagaggccataaaattgtcccctactcccatggagttgatctgaacggagaagggcaccccgcgcccagccacccgtgaaagtccgtcatacatcgactgatcacatactgcgtagggtgtttggaggtagactctctcctcagcaccctccatcagctgctgcagctgccaccataccagaggttcttttgccaaaatattgatcgggttatggataaaagtcacagcttttaatgggaccgtggcctctatgtaatctgtattctgtttgctcaaaagctccggatgagcctccctccatgtgctgtgccgcatatggagggcttctgtctccagaagtacgctctttcgatagaaaaatggtgcggactccagccaggttttgctgtggctgtcagaccaaaccatctgaaagtactgctccacctgatggagtacgctctcaccgctgtcagccgtccctgcggcagaattatagaacagaatatccaggtcatgactcttttccgggtccgggacatagtcccctaaaaatttatcaaaagtgtttcgtccgcctgccagcagcagccggtcatctgagagaatatatttgtcatggagcctgccgttaaaggtccagggcatgagcggattgggcgtattatagaaacggatctcaatattgggatgtgcgcccagggcataaaacaccggcgaggaggccatgctgaccaggccgttcatcccatccgtgaggacctggacctggaccccgcgctccgctgccgccaggagggccgctgccacatccctgccgctctcacaatcccggatatcaaaattggtgaaaatcagccgcttctgcgcctcttcaatcatgcggatccggatctccagtgcggcaacattgtcatctatcagggctgcacgatccacgcttccagtcccataaaatccacttttgtcaaatcctctctgaaattcttttgacactcccggctggaacagaaatgggagccacattcccaggagcagatagaccgcataacacagaaaaaccactggcagaatccgcagtataaggtgtacatgccggccaccagctccccctgctttgataaataaatgtttcatcttatctgtaaacctccgggctttgttatgagagcagacgctttcattctctatttttcattattatagaacgaaacgacttttttctcaaggggatatgatcggaacccacacaggctttcgatcgcactgtccctcagaagcggacggcggaccgtctgccccctgctggcctccaatgagctgacagccgggtattctctatcagaatacccggctgcctctgacttttcacatctttacgcggtggaacaccttttttccttttttgagcatcaggccgtcgcctgccatctggtcggcagtgtaggatgcggccacgtcggtgaccttctccccgtccacctccacgccgccctgttccaccaggcggcgggcctccttcttggagggagccagcttgcacttcatcatcaggtccaggatgccgatggagccgccggccaagtcctcctgggacagctgggtggccgggacattgctcatgtctccgccgcccacaaagagggccttggcggcctcctgggccttctcagcctcctccttgccgtggaccagagcggtcagctcataggccaggatctccttggcggtgttcagctggctgccctcccacttgtccatctcgtcaatctgctccaggggcaggaacgtgagcatgcgcaggcacttgagcacgtcgccgtcgcctacgttgcgccagtactgatagaactcataggggctggtcttgctggggtccagccacaccgcgcccttggctgtcttgcccatcttcttgccctcggagttgagcagcagggtgatggtcatggcgtgggcgtccttgcccagctttctccggatcaactcggtgccgcccagcatgttggaccactgatcgtcgccgccgaactgcatgttgcatccgtagtgctggaacaggtagtagaagtcgtaggactgcatgatcatatagttgaactccaggaaggagagtcccttctccatccgctgctcatagcacttggcccgaagcatgttgttcaccgagaagcaggctcccacatcccgcagcagctcgatatagttcagtttcagcagccagtcggcgttgtttaccatctgggccttgccctcaccaaactcgatgaaccgctccatctgctttttgaagcagtcgcagttgtgctggatggtctccggggtcatcatgttccgcatgtcggtgcggccggaggggtccccaatatagccggtgccgccgccgatgagtgcgatgggccggttgcccgccatctgaaggcgcttcatcaggcacagggccatgaagtggcccacatggagggagtcggcagtggggtcaaagccgatgtagaacaccgccttcccctcattcaccatcttggagatctcctcctcgttggtcacctgggcgatcagtccgcgggctttcagttcctcataacaggtcatcgtactttctcctttttattcaatattctgctggcatgaagtgttttcagcaggactgttgtttctctccctgagcaggcacgcgctccttgtgctccctgcgtccacagatcacattgtaggccaccacgctgcccaccacgatcaccgcgcccaccagcgcagtgggaccgatcatttcatggtaaaagacggctaccaggatggggttgaggaccggctcgatgccggagaccaggctggccgtcaccggaggagtggtcttcaggccgatggtgagcaggatataggccagtgccacctggaacacccccaggatcaggacgctgaccaccgctgtggcggagaagtcggtctccatggccacaaagggcagtcccaccaccgcgctgaatacatctccccagaagaccgagctgatggcgtccccctccggcatgtcgttcatcatgaacacaccggcgtaggagatcccggagatgagggccagcacgttccccaccatcccgccagcggaaaggctgtccacaaagaagaacaggatgccgcccagcacggccgcgcaggtcaccagatccagctttcccggcctgcgccggaagaagatggcggtgaacaccatcacgaagatgggggcggtgaactggaggacgatggcgttggccgccgtggtcatcttgttggcgatggagaagaggatgttggtcccacacaccgccaaagcgcccagcaggacccagcggttcatcctgggcttgtggcagatggcccacaggtacagcccgataactaccaaggccaccgcggtcctggctccgttgatggacatcccgttccacgggatcactttgatgcagagccccccgatgctgtacagcaccgcggcggcaaagacgcacaggacgcctctctgctttgcggacacgacaccgcccccttttctgtctctctccacatttccagaccgcccgaactcattttgcggagtctcccccgctgttcccgcccctgcggcgcgggaatacacagagaggatcgggctctctgaaaaatgccccctgtcccgaaggacagagggcatgaaatgcggtaccacctctggaccgtcctgtcctcgcgggcaggaccttatggagtgctggactccggcgcggtaacgggcgcggcccggcctgtcccctactgcggcttgtccggttcgggcggctgctcggaggcgtattcccggagcgcccctctccccctctcaccgtccgggggttctctgggcagcggcggctccgctactggtcctcttcattgcaatgtgtgcaatatagcacacgccgttttctttgtcaaggggcgggcagggatttccggacagatctgggtccgggcggctgccccggcccttgtcactcggaccggcccatggtacaatagcaccgccccccggcggggtccggggaggcggatcaacagataagtggtgatatctcatgcatcagatcctcatcgtggaggacgaccctgccctcagccagggcatccgcctggcactgggccaggaagggcgccagttcgtccaggccggcaccatcggccaggcggagcgggagctggcggagcggacctttgacctgctcatcctggacctgaacctgcccgacgggaacggcctggacctgctctcccggctgcgggaccgctccgccctgccggtgctgatcctgacggccaacgatctggagatggaccaggtgaccggtctggagctgggggcggatgactatgtgaccaagcccttctccctggcggtgctgcgcgcccgggtgaacagcctgctccggcgcagccgtcctgcccccgccgcgctggagctccccccgttcctgttcgactttgacgccatggtctttgccagggacggcgtgccgttggagctgtccaagacggagcagcggctgctgcgcctgctggtggagcaccggggacagaccctgtcccgggaggtgctgctggaccgggtgtgggacggcggcgaattcgtggacgaaaacgccctttccgtggcggtgaaccgcctgcgcgccaagctggcggacgcccccatccgcaccgtgtacggcctgggctatcagtgggcggtggactgagatggactggaagctgatcttctgcatggggctggcggcggccggcctgctctttggtctgtcccagtggctgcgcgcccggcgtcagttggaacgcatggaccggatgctggaccgggccatcgatgggagctttttggagagctccttcgatgagtccgtcccctccgccctggagtccaagatgtcccggttcctcaacggctccgcctcctccgcccggaatctggcggaggaaaagagcaagatcgcggctctgatcgccgacgtgtcccaccagaccaagacccccatcgccaatctgctgctgtacgcctccctgctggcggagagcgagctgaccccggaacagcaggcccaggccgaggccctgaagacccaggcggagaaactctctttcctggtgaacgctttagtcaagtcctcccggctggacaacggcatcctcactctgtccccagcacctcaccccatccagcccctgctggatggggcggccgcgcaggggctggccgccgccggacagcgtggcatttccctcactgtcctgccctgggagggcgcggcccgctttgactccaagtggacggcggaagccctttacaatgttctggacaacgccttgaaatataccccgcccggcgggacagtgaccctgtctgtcaccgcctaccatatgttctgctgcatccaggtctcagacaccggccccggtatcccggaggaggagcaggcccagatcttctcccgcttttaccggggggccgccgtccgggagcaggaagggctggggctgggcctctacctcacccgccgcatcctgaccagcgaggggggctatatccgggtgtcctctcagccgggaaagggcagcaccttctccctctatctgccactggagtgacggctcccccgcggccccgcccctgaaatctttcagctctgaaagatttcagaaagagtgtggaaaggatcttttgctagaatgggcactgtcaacaagggcagcgcccatttttatccataaggagcgatcaacatgacaattttggagaccaaggatctgagaaaattttacggcagcggcgacacccaggtgaaggccctggatggggtggacctgagcgtggaaaacggggagttcgtggccatcgtgggcacctccggctccggcaagtccaccctgctccacatgctgggcgggctggaccggcccaccagcggcgctgtgctggtggacgggaaggacatcttctccctgaaggacgaggagttgacgatcttccgccggcggaagatcggcttcgtgttccagtcctataatctggtgccggtgctgagcgtgtatgaaaacatcgtcctgcccatccagctggacggcggcaaggtggaccagtcttatgtaaatcaggtcatcgaggccctggggctggagcagaagctccagaacctgcccagccagctctctgggggacagcagcagcgcgtggccatcgcccgggctctggccaccaagcccgctatcatcctggccgacgagcccacaggcaacctggactccaaaaccagtcaggacgtgctctccctgatgaaggtcaccgggcagaagttcgcccagaccatggtgatgatcacccacaacgaggagatcgcccagatggccgaccgcatcgtccgcattgaggacggcaggatcgtcaagcgctgagggggtggattccatgaacgtctccaacggcaagtgtatccgagacctctcccgtaagagcctgcgagccaaccgcacccggaacctgatcgcggtgctggccatcgccctgaccacggtgctcttcacctccctgttcaccatcgccatgtccatcaacgacggcatccagcagaacaacttccgccaggtgggcggcttctcccacggcgggttcaagtacctgacagaggagcagtttcacgaattgaaggacgaccccctcatcgaccagtggggtctgcggcgctttgtgggcatgcccagtgaggtgcccttcaacaaaagccatgtggaggtgggctactccgatgccaacgaggcccactggatgtactgcgacccggttgaggggcgcctgccccaggagggcaccgatgaggccgccacggacacccatgtgctggagctgatgggggtcacgccggagatcggcgccaagttcacgctcacctttgatgtggacggccatgagaccacccagactttcaccctgtgcggctggtgggagtatgacgaggccattgtggccaaccacattctgatcccggagagccgggcggacgccatcctgacggagaccggcgtggtgcccgggcagaccacggacggcatgaccgggacctataacatggatgtgatgctgaaaaatggggcccgaaatattgcaggcgacctggaccagatcctggaaaaccatggctatcaggccgagagctccgcgcagccgggctatatccataccggcgtcaactggggctacaccggcgcccagctgtccggcagcatggaccccgccaccttcatcgccatctgcgcggtgctgctgctcatcatcttcaccggctacctcatcatttacaatgtgttccagatctccgtcaccaacgacatccgcttctatggcctgctgaagaccatcggcaccaccccccggcagctgcggcgcatcatccggcatcaggccctggccctgtccctggcgggcatccccctggggctggtgctgggctggctcatcggcggacagctgacgccggtgatcgtccggcaggtgaacggagtgtccaatgtggtgtcaatggacccgatcatttttgcggcctccaccctgttttccctggtgaccgttcttctctcctgccgcaagccgggaaaaatggccgcccgggtctcccccatcgaggcggtgcgctacaccgagggcgggaacctgaaacgcagagccaagcgcagagccaagggcgtctccctcttctccatggcctgggccaacctgggccgcagccggggcaagacggcggtcaccgtcctctctctgtccctggcggtggtgctgctcaccgtgacggtcaccttcactcagggctttgacatggacaagtatgtctccaacttcactgccagcgacttcatcgtggccgacgcgggccagtttcagaccggcggcgacgcctataacgacgagatggacgtgacggaggacgtgatcgccgccatcgacgcccagggcggcatcaccggcggcggcttggtctacggaaagacctccgctgcgctggagttcgtcaccgaggagtactaccgctccgtctggagccgctggaacaccccagagcagctggacagcatggtccacttcaaggaccgcaatgaggagggcctgctggccgaccgggtgcagctctacggcatggagcagttccccctggaccacctgacggtgctggagggagacctgtccaagctcagtgaacccggcgggcggtatgtagccgctgtgtacagcgatgacgactacggccggcccgagatgggctcccactgggcccggctgggggacaccgtcaccatccggtatgtggaggaatatgagtactataatcccgacaccggagaggtgtacggcccatgggagaacgtgcccgagggtgccaactgggtggaccgggcggtgaagtaccgggacgtggagtacgaggtggccgccctggtgaccgtgcccatggccctgagctaccgctattacggcgcggatgagttcatcatgaacgaccagaccttcatccaggacacgggcacggacagcgtcatgtactatgccttcgacaccacggatgaggccaacgccgccatggagtccttcctggcggactacacggaaaatgtgaatccccagttcgactatgagagcaagtccacctacgccgcggagtttgaggggatgcgatccatgttcctgctgctgggcggggccctcagcggcatcgtgggcctggtaggggtgctgaacttcttcaacgccatcctcaccggcatcatcaccaggaaacgcgagatggccgtcctccagtccatcggcatgaccggaaagcagctgaagaccatgctggtctgtgagggcctgctgtacgccctgagctctgtgctcctgtccctggtcctggcggtggtcctgggccccctggccttctccgcccttcagagcatgttctggttcttcacctaccgcttcaccctggcccccatcctggcggtggctccggtgtttgccctgctgggcgccctggtccccctggcggtgtaccgctccatctccaaacacaccgtggtggagcgcctgcgggagtcggacaactgaccaaaccatacaacgggacagctcctccgcctgtgcggaggagctgtcccgttgtatatctctccatagggcccaccggatggggagatgacaaaaaggaggagccgggatcgagcggctcctcctgtccatcagggctcagccatagaac

SEQ ID NO: 13620 - DNA, 64487 bp, Unknown
  gut microbiota DNA sequence
ctgttttctgacaaaccgggccttttccagaacatttcggcccactatgcctgtacaacacttctgacgcaggaggaattggttataaaaagggagagatcaggggaaaaatccccgagattctacccaaaaagtttccctggtagacatttggtagacacatgaaaacaggaggggcggcgaggccctgaaactccaggccgccgccgcccttttttggtagacttttggtagacatttttatttttgagagacgagaaagagacggaatcggttgcgtgatttatgtttagagattataatggggccgtaacattgatcagagaagctttccaagggagagcggatcatgacagaaaaggagcaatctatgtccattttggtgagcggtggcgccggatatatcggcagccacacctgtgtggagctgatccaggcgggatatgacatcgtggtggcggacaatctggtgaattccagccgggaagcgatccggcgggtggagcagatcgtgggaaggcaagtccccttcgttgaggcggagctgtgcgacccagagcaggtggaagcgctgttccagagccacccggatatccgggcagtcatccatttcgcgggcctgaaagcggtgggggagagtgtagagaagcccctggagtactacaccaacaatctggtcaacaccctggtcctgctcaatgtgatgcggaagcacggcgtgaaggattttgtgttctcctcctctgctaccgtctatgggaatcccggccgggtgcccttccgggaggacttcccggtgggggggaccaccaacccctatgggacgaccaagcttttcatcgagcagatcctcaccgacctgtgtgcggcggacagcagcctgaacgtggccctgctgcggtatttcaatcccatcggggcccacgagagcgggctgattggggaggaccccaacggcatccccaacaatctggtcccctatatcgcccaggtggcagtagggaagctggagaagctccatgtgttcggcggcgactatcccacgccggacggcaccggggtgcgggactatatccatgtggtggacttggcccggggccatgtctccgcgctgaagaagctggaggagaggtgcggcctgttcgtctgcaatctggggaccgggaagggttactccgtgctggaggtcctgcgcgcttatgagaaagcctgcggaaagaccctgccctatgtagtggatccccggaggccgggcgacattgcggagtgctatgcggacccggagcgggcagagcgggagatggggtggaaggcgcgctacggcatcgaggagatgtgcgcctcctcctggaagtggcagtccatgaatccggacggatacggaagataagagggggtggaagtatggaaaaaccggtgcttgtggtcatggcggccggaatggggagccgatacggcggtctgaagcagattgatcccgtgggggccaacggccagctcatcatagattactccatctacgacgccaggcgcgccggctttgagacggtggtattcgtcatcaagcgggagcttgcggagcaattccgggccgccatcggcgaccggctctcccgggtcattgaagtaaagtacgcctatcaggagctggaggacctgcccgccgggtacggggtcccggaggggcgggtgaagccttgggggacctgccacgcggtgctggctgcccggaaggaggtggacggccccttcgcagttatcaactcggacgactactacgggccggaggcgttccgggagatataccgctatctggaggagcacccggacaagccggggtgctatgaatttgctatggtgggttatctgctgggcaatacggtgacggagcatggacatgtggcccggggggtgtgccaggaggatggggagcactatctgctccgtgtcacagagcacacccacatcgagaaggacggggcggacgcccgctccacggtggatggcggggagacctggacccgtctgccgggggacaccgtggtgtccatgaacctctggggcttcacccccagctttctttgggaggcggaggcgcgcttccccgcgtttctggaccaggtactggcagaggacccccagaagggggagtatttcctgcccagtgtggtgacacagctactggaggagaagcgggcccgggtcaaggtgctgcgcagcaccgacaagtggtatggtgtgacctatcgggaggataagccccaggtggtggccgccattgcggctatgacccagtccgggctctacccggaaaggctgtgggatatctgaaacgcagaaaaatatccgcctgatccggctgttgagcaccggtccggcgtaaaagaagtccggcttcccagcagcagagggggccggacttttgtgcagtgcggtaaaaaagaattcgacggatcatccagataacggaaaatcaaaaaagaacagatgtacacacaaaaaggacaaaaagctgccgaaagcaaagcaggccctgccggccgttcaattgaaagatagaaggctctttgctataataagcaatcagacaaaacggcgtgcatattattgtccgggacgggtcctgagaacgggggacctggaagagagaaggggggaggagccgtgtcagcgctgatcctgcttctgctggcggtgtgcctggcgctgctgattctggaggaccggcaggtgcggcgggaccgctctgagctggtccacgtggtctatgtgaacggcatccgggggaaatccactgtgacccggatgatcgacgggggcctgcgggcgggagggtggaaggtgttctgcaagaccaccggcaccgtgcctatggttatcggggtggacggaacggcccggcctctggtccgccgggggcgggccaacatcagcgaacaggtgcgggtcctccaccgggcggtgcgggagggggcccagatcctggtgatcgagtgtatggcggtggacccggcgctccaggccgtctcacagcaccggatggtgcgggcggacatcggagtcatcaccaatgtccggctggaccacactgcggagatggggcccacgctggaggagatctgcgactccctctccaacacaatcccctggaatgggaccctgttcacggcagacggagcgttcctggaccagcttcggaccaacggacgcagaaaaaactgccgggtggagctggcccagccggacagcggcctgccggacttcgattttcctgaaaatgtagctctggccctggcggtctgccgggagatcggggtggaccgggatcgggcgctggaagggatcctgaggtatcagccggacccctatgccctgtccctattccgcctgccctctggggcggcttttgtcaacgccatgtcggtgaacgatccacagtccacccagctggactaccaccgggtggccggccgcccaggaatggtgggccggaggctggtgctgctgatcaacaaccggccggaccggggatatcggacggagcacatgatgatggtggcccgggggctggagccagaggagatctggctgatcggtgcctcccagcgggcggtgcgccgcaccctgcggcacatcctgccggacacacctgtccggctgtttcctggagcggaggcactgcccttggacagccggggggcggacactatgatctttgccgctggaaacttggccggcccgggtaaggcactgatggagcgggtacggaaggagggagagcagagtgtattatgagatcgtactggcgggggtggccatcagcctgctgttcgtggagctgaccggcctgtcgcccgcgggcctgatcgtgcccggctacctcgccctgtgccttcagacgccttggaggatcgtctacaccctggcagtggctgtggcggcctggggcatcgccaaactgctgggcaatgtgatgatcctgtacggccgccggcgctttgcggtcatggtcctgctctcctttgccatcgatctggcggtcaccagcttgggcctgctggcctatgacccgggaatgatcggggtgctggtaccgggcatcatggctcaggagctggaacggcagggatttttgaagtctctggtccctttggcggcggtggtgggcatcctggcgctgatcatgatgtggcaggggatgcaggtgtttcctatatgagcagagcgaagcgggaacggaagctgctggccctcctgctggcctgcgcactgctggcctgggggactgcggcgctggcggcgggacagggccgccgaacggaaacgggctatgccgctgtgcagctggcagcggcggatctgctggaggactgcttccggcaggtgcgcacctacaaggaggagctgggcatccccctcagcgagctggactaccatcagaccggcatgatcggggaaagctacaccgggatcaccaccaccctgggggccatcgaggcgaagcggaccaccgcctggccggaaatgggtgcgctgtgtgtccgcctgctccacgaggcgggcgtccgatcgggggacaccgtgggggccggcttttccggctccttccccgccatggatctggcggtgatcgccgcctgccaggtgatgggcgtggaactgatctatatctcgtcagtgggggcatccacctacggggccaatcatcccgccctcaccttcccagagatggcccaccggctggtggaggacgggctgctggagacagacagcgcggccgtcaccctgggcgggggaggcgatgtgggcggggggatggacccggcctgcgcagaggagatccggggtcggctggcggaggcgggactgctcctgctggaggagccggactaccggcgcaatctggagctgcgccagcagctctatcagcaggagggccccatcgactgctttgtggcagtgggaggcaacgtgacctccatggggcggggagagagcggcatcagcctggggcagggcctgctctccccggagaagatcgtccggctgacagaggacagcgggctggtgcagcgctatctcagccaggggcttccggtgatcaatcttctgaacatcaagcagctggcggcggactacggactgccctatgacccggcccagtggccggagcgggggacctctgccgtctactttgagactgactaccccggggcggtgctgctcctgggactggctggggccgcggtgctgctggctctgtgccgatgggtgaggaggggcgcggggaccgcgcggaaggaggagagaggataccatggacagacagaatcgtccgctgaccatcctgaccattgacgacgaggaacagatccagtacgccctcagggccctgttcaactcccagggctgggaggccatctctgcccgggatgtggaggaaggagtgggaaagttccggacctgccgcccggacctggtgctgatggactaccatctccccaagatcaacggggtcaaaggggtggagatgctgcgccgggaggacccggaggtgccgctgatcgtcttcaccatcgaggacaaccagcgggtggccgaccagttcctggatgcgggggcgagtgacttcgtgcttaagccggtgaaggccctggacatcatcgcccgtatcaagctgcacgtgcgtctggtggagagccggcgggagaaccgccagagcacagaggagccggtgaagggcattgggcagggcacactgagcctgatagagggttatctgcgcagtgtcagcgagtaccagcctgtggaggccatcgcggaagggacggggctggcctatcagaccacctaccgatatctgcaatatctggtgtcggtgaaccgggtggaggtgagccagcactatggaaaggtggggcgccccaaacagcgctaccggatgatccgggaggcgggcgacggggaaaagcccgaaacaggactataaggcgggacaaaaagcgccggtcagccattgggctggccggcgttttctcattgtccgggacagaaaaagctgtggtcaaaatagacaaataaaaatataaaagggaagatgcctaaaaaagaggtcggaagagaaaaatgagaaaaaactagaaataaaagggaaaaaatgacggatcaaaaaaggataagagtggcctgttcataaatttttaaaatttcagaaataaataagagaaaaaattgcacaatgaaatgggggcgctgtatgatagatttagttagaattatggtggacgcagatggtcgctgccgtccgtcacaatggggggaggaataagctggaacagacggaaataaaacataaggtgaacgcacggccctattggaaaggagagtcaaaatgggaaacagacgcagacacattggatcctcgctggcggccctgaccctgaccctatccctgctgacgggactgctcaccggatgcggccccggcgggagccagagcagttctccggaggccggcagcacgcccccggcggccagccagagcacgcagacgccggaacagcccgccctgcccgagctgaccacagatacctacggcaacgccgcggtgggctatcaggcagcggtggtcagcgccaatgagtacacctcccgcatcggcatggatatcctggaggcggggggcaacgcggtggacgccgcggtggccatgatttttgccaacagcctcaccgagccgggtgccaccagcctgggcggcgccagcttcatgaccatctatctgaaggagacgggcgagtacatctgtatcgaggccatggagaccgctcctgcggcggcgggcatcgacactctggacgagatcaatgagaagaagggggccatgctggtcaccgtccctggacaggtccacggcgccctgaccgccctggagaagtatggcaccatgacccgggaggaggtgctggcccctgtcatccagctggcggaggagggcttcgatgtccacatcagctttgaggagcgggcctcggccagcttcgacaaactggtgcagaacgaggaggcggccaagatatttaccaacgaaggcctgccctatgcggtgggggaccacttcaccaaccccgactatgcggataccctgcgcaagatcgcggagggcggcatcgacgagttctacaaggggagcatcgcccagaccatcgtggacgaggtccagcgcctgggcggcctgctcaccatggaggatatggccagctacaccagcgtggagcgggagcccatcagcaccacttatcacggctatgagatcgtgacccagggcccgccctccaacggcggcgcccccatgctggagatgttcaatatcctggagaactacgacctggtctctatgggcttcaacaccccggaatatctgttcactttcaacgaggctctgcggctgagcatggcggatggcatcacctacttcggggacccggatttttatgagctgcccatcgataccctgatctccaaggagtacgccaaggagcgggtggagaacgacatgcccaaggacggcaaggtcaaccccactcttgttcccggggagggcctcccctttgagaagctgaccaccgccacgccggaaagcggttccaccacccacgtctccgttattgacgagtttgggaatatggtgagcaccacccacaccatcggcggatatttcggatcctgtatcgtggctccgggtaccggcttccccctgaacgcccacctgtccaaccagaagctggacattgcagaaaaagacaaccccaactttgtccagggcggcctgcgggtcatgagcactatgtgccccaccctggtggtcaaggacggcgagcctatcatggccatcggctcccccggcagctggtgcatcccgcctgccatcgtccagatcctcaatgcagtgctgctgttcgacatggacctgcagcaggccatcaacgagccccgggccatcttcacctcgtacagcgccccgctgaaggtgtacgccgagcctcggctgccggaggagaccatccaggccctgatcgacgcgggctatgaggtggactccggaaaggactggaacaccagcctgggcagtgtgggcgtggtcctggtggacccggacgacggctttgtctatgcgggcggagataaccgccggcagtacaagtcactggcctattgagaaagccagcgcatacagataccaaaagtctgatgggcatttgaaacggaatgagaagggaggaaaagaaggcccatgaggagatgtatgcgaggtaaaaaatgttacatcaataaggaggagagcatatgaaacggaataatcagtccctgacaacgaaattcagcgcactggctcttgtacttgcaatgatgctgtccctgctggcgggttgcggacagaccacccagccggcagccagctccacccctcccgcggcttcttcagagcccgctgcctctgagccggagacccccgagatccctgagaccatggagggcgatgagttcggaaacggtgccatcggcacccatggcggcgtatccagcggcagcgtgtacgcctctcaggctggcctggagatcctgcaggccggcggcaacgccgtggacgcggcggtggccaccgctttcgcagtgggcgtgtgtgagcccaacctgagcggcatcggcggctgcggcatgatgaacatctatctggcggataaccacgagtacgagatcctggagtacatggagactgtccccgtggcggtggagcccggctggtacaatccggagacagactctgccacggccaagaatgccgccgtccccggtcaggtggctggtctgctcaccgccctggagaagtatggcaccatgaccccggaagaggtcatggcccccgccatcaagctggcccgggagggcttccccatcgaggagcgtctggccaatgccatcatggactcctttgatatgatctccgccaatgaggaggctgcggccatctacaccaacgacggcctcccctatgcgaccggcgatctgttcaagaacgagcccctggccgacaccctggaggccattgccaagggcggcatcgaggagttctataccggcgagctggctcagaagatggtggacggtctccaggccaatggcagcctgatggccatggaggacctggcgacctacaccgtggcggagcgggagcccatccgtaccgagtactacggctatgaagtggtcaccgttccccctccctccaacggcggcgattggctgctggagatgctgaacatcatggaggagaaggacatctctcagtatgaccccagcactctggagtaccagtacatcttcaacgaggcctgccgcatcggcttggtggattcctacacctacatcggcgaccccgccttctatgacctgcctgtggaggagatgatctccgacgagttcgccgccgagcgggctgcccttatcgacatggacaacatgcaggccatggagtctgtgcccctcagcgacctgccggtcaccaagctggagcccaccgcggaggagagccagcatactacccacatcgccgtcatcgaccagtacggcaacatcgtctccaccaccaacaccctgggcaacggctggggctgcaaatttatggcccccggtctgggcttcttctacaacagccacatcggcaacctggaccatgagaaccccgacagccccgactatgtgatgcccggcaagcgggtgcgctccaccatctctcccagcctggtgctccaggacgggaaccccatcatggcggtgggctcccccggctccctggccatcccgcccgcagtggccaccattatcaacaacgtgctgctgtatggcatgaatgtgcagcaggccatcaatgagccccgcgccatggccatcaaccgctccggcatggactcccccgcccgggtgagcatcgagcagccccgcttcgatccggacctggtggcccagatggaggggatcggctacgagatgaaggacgtaggcgagtacaacatggcggtaggcggcatcgcagccatctatctggaccgggacaacggcatcttctatgccggcgccgaccccagacgcggctataaggccctggcctattaagacccggcattccgcgggcccggtccggcttcctgccggctgaacgggaacggacggccctccccggctctccggggagggcacgggccccgatctccgattggctgatccggtccggggaccccagatacccggccggaatgcgtgttacaaggagtggtaatgagtgaatttgactgaagcgtatctgctgctggctgtcatgctggctgtcgtagcggtggtcagcgttctgttcaaagggaaaagcggcctgatcgcgccccttatcttcgtggcgggcctgatcaccgcgctggtggccgggctgggcttccggctcagagaggtcaccgagggtcccttcgtctttgtggacaccctgatgtgggtgctgtgcggcgcagccttctcctatctgctgtatgtcaacgggaccttccagttcctgttcgccaaggtggtggggaagaagcgcagcccggccgcccagatgttcatcctgatcctgttcatcggcctgcccggaatgatcaccggcacggccctggccagcgtggccaccaccggcctgatggctggccgctacctgctggacaaggggatggagaagagcaaagtggtggaggtggtgacagtgggcgctctgatgggcatgctgctgcctcccctgtgcgtacccgccatggcccccaccattgcccggcaggggctctatcccggcgcttttgagggatattttctccccatcctgatcctggccctccccgccctgatcgtctactgcgccctggccgggcgccgggtgctgggggagtgggaagcggacgggaacgtggaaaagacgggcagcgcggtctgcctgatccccctggccgtggtggcggtgctggtgctctgctacaacttcctgtacttcctgatcccctattacgggggttatccggtgatctacctcatcggcttcgtgctggccctgatcttcaagtgcaagggagccaaccccctgatcgcggcagcggacggcatccgcaccgtggcggtggagctggccctgatcctggcctatgcctctgtggtcgagaccttcaacctggtgggcgtcaacggcaccctctccgcccagatggagatcgccggcatcaacggcgcagtgatcgccctggtactgggactgctggtgctggcgggcggtctgctgctgggaacccccttcgcctatgtggtgggggcgctggccacttatctggtcagcaactccaactatggaagctatgagctgtccatgatggcggtgggcgccgccatcgccatgagcatgttcctggccctgcggggcagcctggcggagacggtgggcgagaccctgggggtgactggggtcaccggaactgaggtggtcaagcgcaacatcatcttcacgctggtgctgaccgccgccatcgtggtgttcctggtggcaggttcatcgctgaagttcctgatgatttaaggggggacgaagaatgattgctgcattgttcatcatctatcggattatcgtcgctgtcctggccctggtggtgatctgggacatcgtgcgggagagatcgctggcccatgtgatgagcctggggatcatctgtttccccttgatcctccgcgcgctgctgatcaaatgaagggggaacggaaatgaaaaacaagagtctgatcccaaacattgccgttctgctcgtggtggccctggtctgcgtgctgacagggcagatctatctccagcagcagaaggacgacgtgctgtacaccgaaaatcccaacatcaccagtgtgatccggctgagcgactacaatcctgacttgaaggacacgccgggcgacgtggatatctatgtctttgacagcgggatccccggaggcaaggcgctgatctacggcggcacccacaccaatgaggtgggttccatgctcaacgccgtgacctatttggagaacgtgaagtgtgaagagggcaccctctatgtgatggtgcgggccaacaacagcggatacagccacacccagcccctgctggcccaggccaacaagatgaccttccagctgtccgacggctccacccgggagttccgcatcggcacccgcatctccaacccggtgcaccagtggcccgaccccaactaccggctgaatacctccaagcgggaactgcgccacgacgagatcgcggagatccgcaacctgaaccgcaaccaccccggactggaggagggctacctcaccgagatggtgtgctacgccatctataacttcatccagactgaacagatcgactttatctttgacggccacgaggccggcggcgagtcggtgaagctggtcaacaccctggtggtccatgagaatgccatgcctctgggctcctccgctgtgatgaactgcgtcatcaacaacctgcccctgaagatggagatctccggccagacctcttacggcctgtcccaccggggcctgggcgacaataccgacgccctgtgcaccctgttcgagacctgcaaccccgccatgggcagctaccacgacaaggtgacggaggagctggtgaaggacggtatctcgggcaactatctggccatgcatcgggcggggctgttccccaattcctacgactttgacgagaacggctggcccatcgagaagcggaccgcctaccacatgagcatgagtgcggagatcatcaacaccttcgaccagatgtaccccgacaagcccctgaagatctccggcctgcccgatgccaacgaaatgatcgccaacggcctggaggccaccctgaagtccctggcctgagggactcgactggtaaggtgctaagtcccggaggaccgggatcaagcatagaactgaaatgatcttaggaggaacttaaaatgaaaaagcgcaacgtatgtatgctcctggcagcggccctcagctgcagccttctgttgaccgcctgcggcggtggcgggaccagcaccaccaccccggggaccagcaccccgtccaccagcaccagcgcccccgccgggagcggcggcgcctccaccggtgctgagagcggctacaccttccgcaccagcgagagcaaccgggtggtgacggagaacggcaccttcaccaaggaccaggtctccgctcccgtcctgatcacctccttcggtcagagcgccgacgtatccatgctggacgccctgatgaagaaggtgggagctgagtacaccttcgatgccaccgcctccgcagaggacgccgccggatacaagaccatcatcatcgccagcggagcctcctccaaggggctgggcgcggccggcatctcccaggaggacgagatcgcccgcgctgaggccatcgcccagaccgccaaggacaacgacatcaccgtgatcgtggcccacatgggcggcgctgcccgccggggcactctgtctgaccagttcagcgacctggccctgggctgtgccgactacatcatggtagtggaggagggcaacgacgacggcaagttctctgacgccgccaccgacgctggcatccccatcaccatgctgtacaccatcgccgacgctgtgaccccgctccaggagatcttcggcgcctgaaccccattgcactgcaaggaggccccgcctgtcaaaacgggtggggcctcttcccaaaagcggacgctccgccggcagaggcggccgtctgcccgactcccgcgaatactccggaacaggagggatttgattggaatttgaactggtaatattcctggtcatgctgggcgtgttcctgctggggaacttcctgctgaagctgccggtcagcttgtctatggcggccggcgctatcgccggcgccctggtgggtggggagggtatccccctgcgccatctgttcgagggcacctttgtctatatggatacggtgctcatcatctccatggccatgatctttatgacggtgatccaaaaatccggggcactggaggccctgaacgccgtcatcgtctcccgcttccacaaggtcccggcggtcatgctgattctgctgatgctcatcatcatgttcccgggcatgatcacgggctcctccaccgccgcggtgctttccgccggcgctatcgtggcccccatcctgctgatgatgggcatcccggccccccagaccggcgccatcctggcggtgggcgccatcatgggcatggccgcccccccggtgaacatccccgccatgctgatcgccggcggcgtggatatgccctacatcggctttgagggccccctggccttcatgaccttcccctgcgccatcttcaccgtcctctttgtgggcctgcgctactgccggcacctggattacgacaagatcaaagaggggctgaacctggaggtgggcaaacagtacgggctcaagctctacatccccatcctggtggtcatcgtcctcatggtgggcagccgggctctccccaacgtgttcccatccctgggaatgccgctgatcttcttcatcggcagcgtggtgggcctgttcaccggcaagaagttcaacgccatccaggcagtgtcggaggctgtggagaccaccgtccccgtgctgggcaagctgatgggcgtgggcatgttcatccaggtgatgaccctcaccggcgtgcggggctacatcgtggtcagctgcttcggcttcggcctcatcgtcctgtatgccgccgtctgcctggtgatgcccgcctttggcgcggtgtcctcctacggcgcggcctctgtgctgggcgtccccttcctgctggccctgctggacaccggcgaccagatcgtcattgccgccgccctgtccttcatctgctccatgggcgacctgatgccgcccacggccctggcgggcaactatgcggcccagatcgtggaacagaagtactcccgggtgctgcggcactgcgccatccccttcatcgtctgcatcctgtacggcctggtcaccctgctggtgtccggcaacctttcgttcctgacttgagataggaggggaaagcatgttattatatgtttatttgggcctggtgctcttcctgctggtattcgttatcaagaatatggtgcgggaaaagaacctgatgctgcagatcgacgccgcgctggtggtggtcccgctggtgctgcggctgctgctgatcaaatgagggggtggacagagtgaagatcgaagtgaaaaagagctggttatccgccctgatcctgctggctctggccgccgccgccatcgtgtatctggccggccagttcctctccatgcgggaggtggagcccatctaccctggccccggagtgacagagatcaagatgctgtccgactggtatcccggtctggagggaaccgccggagacacggaggtctatgtgctggagggggagcaggagggggactccatgctggtgctggggggcacccaccccaatgagccttccggcctggtggccgccgtcctgctcattgagaacgcccagcctgaggcgggcaccctgtacgtcatcccgcggaccaacaacagcgccttcacctgcactgacccccaggagggggcccccatgcgctttaccatcgacacccccaacggggagcgctggttccgcttcggctcccgggccaccaaccccatccaccagtggcccgacccggagatctatgtccacgcctcctccggacagcggctgtccggctccgagacccggaatatcaaccgctcctacccggggcgtaccgatggcactttcaccgagaaaatgagctacggcgtgacccagctcattgaacaggagggcatcgacatcacggtggacctccacgaggcatctcccgagtaccccaccatcaacaccatcgtggcccatcaggatgccctgtcactgggctcccaggcgctgatcaacatgcagctggagggaatgagcatcggcctggagccctctcccgagaacctgcacggcctgacccaccgggagctgggcgactacaccgataccctggccctgctgatggagacctccaacccctcccagggccgcctgagaggaaagaccgacgaaaacctggtggtcaccggacaggataagtactatctgaaggcggctggctacggccgtctgtacgacttcggctatgacgcggacggcgcccccatctctgagcgggtagcccgtcatgtcaccggcgtggctcagttcgcggtggccttcaacgagctgggattgggcaacctggtcatcaacggcatcccgtcctatgtcgatatggcggcggacatcgggcagttcctcgctcccgactgagcgcggaaagttgggaggtgaaggcatgaaaaagcagatgttgagtctcttcctggccctggccctcaccggctgcgccgccccagggccggggagcacctccgccccggcggagagcggagcggcccccgcaggcagcgaggcgccggcctccgcctcccaggaggagagcggctatgaccgccgggaggccatcgaacggccggagatcggtgcggaggtggtcatcgacccgccctatgatttcgaccccgcggagatggtgcctggcgacttcggggactacttcacagactgcgatcatcccacccaggtgagcacctacaagctcgccgaggggaccgacatcgaaaatgaggtgacggtgctccagggggaggaggagggacccaccatctacatcgtggcgggagtccacggggatgagatcgccggctggatgaccgggaacctggtcaagaagatcggcatccgggccgggacggtccatatcctgtccccagccaaccgctggggcgcggaggcggaccccagagtccgctatgtgacggagcaggaggatctgaaccggtccttcccgggggacccggaggggaatatggcccagcgggtggccgactccatctaccaggacatccagagggtggacccggtattcctctttgacctgcacgaggcccgggccaacgcggagaacaaagatttcctgggcagttcgctgatctacaccgacctgagcgaaatgagcgacatgtacctggagatgctgatggccacggagtccggcgagctgtgctccgagcgattcaacttctatggacccggccccatcgggagcatcaacaatacggtgaccacccagctgggcatccccaccatcacagtggagacctaccggggctatgagctggagcgccggatcggagaccagctggacatcgtggaatacgtgctgcggtactacggcctgatttgagcgtgcagcggcctgaagccggactcgggatacaaaagaaaagacacggcaagccttgccccgggcatccagggcaaggcttgcggtgtattccttgggcggaccgcaggggaagagggggatggacttgaaacgagagcatgagctgggacagacggcagaggccagaaaaagaacggaccgggacctgcggtgcatcggctggggcctggtgcttctgggggtgctgatgcccgccctggtgacggtggagaacaccggtatctaccgcacgctgatgaacggcatctatcaggggcaggagatctacgtgctgctggcggcgctgaagctggtggtgctcaatgcggtgcgggcctatccccactacatgggcgtgttttttctggtggagaccttccggggcatggagctgagacggcggctgctggcctccatcgctgcggtgggcatcctgatccccggagtgtatctcctcatcaaccggatctatggcatccgctatgacttcggaattccggcactgtccatgatcgccatgatctgggtgctggccaagatcgatttcagctttgtggggctgatgaagaaggggctcatggtggcctttttcatcacggcactgcaattcctggacatgatgcctctgctgtggaattttcccttcggcagaggagagagttcctatgacatcaagctcgtctccaagttccttcaggcggacagctttctccaggccatggccaccatcttttttgctctgttcctcttcatgtccgtgctgctcctgctgctggtggtggatgaaaacaacatccgccgcatcagcgagcagaaggagctcaacgagcacatgctgatggagacccggatgcgcatcctggagaaccggacctatatggaactgcgccacctggtccatgatctgaagtcccctctgaccagcatgcaggccctggtgggggtggtcaaactgtccgccggcaggagaggggaccagacggaaggggagtatctggagcggatcgagactatgatagaccggatgagcagcatgatttccgagatcctgcacgaggagcagcggagcgtggtgaccacccaggagctgctggacgccgtgatggcccagatctccagcgcggagtatgcggacctggtccacacggagaaccgggctccagaggcgaagatccggatcaacaagatccgattctcccgggtgctcatcaacctggtggagaacgccgcctatgcggtccggaggccggacggcaagatctggatcagggtcgaggagacggagggggcagagatccgctttcaggtggaggacaacgggacagggattcccagggagctgctgggcgagatctgggagaagggcttctccatccgcagctccagcggactgggactgaatttcgtacagcaagtggtggagcagtgcggcggcagtgtcgaactggagagcgtggagcgggagggaacggtggtcaccgtctccctgcccccctgtgaggaggatgtgtgtgagacaggaccagtatgagctgaagggagcggtgctggaggcaccgctggagtggcagggcctccgtctggctcccggacgggggggcgtcctggtcacggggctggaggggacggaccagcggcggttccagcggcagctgaccgtactgaaagggtacgccgccctggcggcggacaggcggggggaacgccccctccgcctgcggcaggaggacctgccggagcgggaagggccggagaccctggccgcagtctggtacggccgggcggcggaggcggaggaccaacacggcaccctggtggcctgctacaacgggttcggcgccctgccggggggctttgccgctgtggaggagagcctggcacgctgggctgggcggcccctgggggagaagctgctggactatgtccaggcggtccggcgggaggagggggacctggccgagaaggcggagcccttccagaccctgcccagctggacggaccgggagacgggggagctgctgcgcgcgctgctgcgggcgctgtgtgaggggtctggcgggcgcgggagcgcccagggataaggggggagcggagtggagaagcgagccaagcagctggaatacctgatcaccagcatgatcctgctgggcatcgggatgctgtttttcttcatgaacgagagcgtcaatacctatacggtgctgcgttttggcctgtttcagatcatgcagagcgtgctgctgctgatctgcgctatcctgctctggtatcgggcatatgtggtccggcgggagcaggagacggccgaagggggggcggagacgctgggagtagccccggctgcgccggaggaggccggagaggaaaagcgggaggccaagcgggacgcggtggacagcgtcaatgccaccatgctgctggtagtggtcaccgtgctggtggtgggattctatctcttcaccctgaagccccgggaggatgtgactggggccgtggctcccctgcacatggtggtatgcgtggtgtccttcatcctttacgcctgtgtggagcgctggtggtccatgcagctggacaccaacccggatgcggccagcatctgcaacctgatggtgctcaacaagatcgctgtagccgccctgatggcggatatggtcacctccttcaccgggctgttcagcgtcagccagtatgtggactatgtcatcctgggctgctggttctatgtggcggccatggcggctgtcagcgtggcagtgaagatgacccggcaccgggaggaactggtcttccgtctgtacatcctgttcccggtgtactactacgggggacaaaagggcagcggggccctgacctggctggagcagcacaccggcatctccatgcgctccctgtggagcctgaaattcatcaagatgatcctgccctcctgcgcaatggcggtgctcctgctggtgtggctgtccacctgtgtggtgcaggtggagacttatcagcagggggcgctgtaccgcttcggcagtctggcgcgggaggatatcctggagccaggcctgcacttcaagcttccggtgccctttgaagaggtgaagatctacaacgtcacccagcctcaggggatgatcgtgggctatgagggggacgtaaacaacaagaacaacctgtggacccgcccccacgagggggaggaacaggctctcctgctgggcaacgggaatgagctggtggccatcaacctgaagatcacctaccgcatcagtgacctgtacacctacctgacccggtacagcagcccggaggacgtgctcaacgccaagggctatgaggtggtgatgggggagaccatccatacggacatcaacaccatcatcagtgaggaccgcagccagctgtctcactgcatcgaggagcagctcaaggaatatgcccgggaggcggagctggggctggaagtgatgagcgtcacactggccagcatccacccgccggtggccatcgcggatatctaccagagcgtggtgagcgcgggcatccagaagaagaccagcgtcctcaccgcggaagggaaggctctggtggcacgggagggggccgaggcagacaaacagctggccatcaatgacgccggcatccagcgggatgagcgggtctccagcgccaacgcggagatccagaaatacaatgccagcatcgaggcctatctgctggacccggaggcctatctgctggaccggtatctggagagtttccagcaggctctggcccagcagagaaagtatatcgtagggccgggggtggacgccggagccctgtatgccaacttcggactgggcggctcggggagccggtggttcagcggccttgacggcggaggcgccggcggggagcaggcggcggagacacagacagcggggacgcaggcggagaccggcgcagtgccgggtgaggaggggacatgatatgaaagggaaccgcatcatcaagtggatgttcgccctgatcgtggcggccatcatcggcttctttggctttgtgttcaaggtgaacgagggggagtacgcggtggtgacccggttcggcgcggtccggtcggaggtgacccaggcagggatgtacctgcgcctgccctggccctttgaggacgtgcagatccaggacgccaggaagcggtatctggactccggctacctggagactctgacccatgacaagaaaaatgtcatcatgcagacctacaccatctggagcatcgccgaccccctgcggtactacaccagcgtgggggataccgccttggcggagacctacctcagcgacctggtcaccagcgccaaaaatgggaccatgggcaactatgacctgtccgctctggtctccctggacgaggaggacatcaagatcgacgagatcgaggccgccatgctccaggaggtgcagtcccacgctctggaacagtacggcatccaggtccatgagctgcggctgaagcgggtgggcctgccggccaccaacgtgcagagcgtgttcacccagatgcaggcggaccggcagaagtacatcgaccagctgctggcggagggtgagcgggacgcccagatcattatgagcgagtcggatgcggaggtggccgccatcgtggccgagggccgggaggaggctgccgccatcaacgcggagacggagcgggaggtggcagagatctatgcctcggcccacagccaggacccagagctgtatgaattcctacagaagctggctgccctggagaactcggtggacgaggacacggtgatgatcatcaccatggacaccccgccattcgacgtgctctacggcgatgactgaaggcggtgagggaagatgaaggattctcagcggttcattgccatcatcaacaccgccatccgctactgcaaatggctgatcgtcatccttgtggcgctgatctgctgctccggcatccgggtggtcaacaaccacgaggtggcggtggtgctgcggttcggacggctggtgggggacacccgggaggagcaggtgaaggagccgggcctgctgctggcattcccctatgtgatcgacgaggtaatcaaggtgccggtgggaaaggtgcatgaggtgtccatcaccactcacgccgcctccgctgaccccacctatgcggagattgaggacaccggctatgtgatcacaggggacgagaatatcatccacatcgatgccaccctgaagtatcagatctctgacccggtggagtacgccctgtacaacagcgacccagagaccgagatcaacggcgtagtcagcggcgtgatgacctcctgcgcggcgtccaagagcgtggacggcctgctcaccgaccagaaggcggagttcggaaacgaggtcatccgccaggcccaggccatcctggacgggatggagatgggggtgagcatcgtgagcctggagttcaagagcatcaagccccccagcgccctgcaataccacttcgaccaagtaaacgccgcctcggtggagaaggagacccgcatccagcaggccaaccagtaccgggagcgggtgatcccggaggccaacgccgccgccgataagctggtgagcgacgcccaggtgtcgcagcacgaccggatcaaccgggccaacgaccaggtggcggagttctacggcctgttccaggagtatcagcagaaccgggacgtggtctacgagcgggtgttccgggaaaaggtggtcaccatcttcaaccagatgggcggcaagatcgtgctgcccgaggggaccaacacgccccagatctttctgccctgaggagggacggctatggagaacctgacgaataccgcggtccacctgctggaggacagccagggggccgacctgacccggcgggagaagcgaaagctctcggtggagatcaccaccgccatgatagccctggtctgtctggtcaccggactgctctataaggggatcttcccggagcagacggcggtggcggggctgatctattctgtgggcgtgctggtggagggcctgcccctgctggcgaccgccatccggggctttctccagcgggacgtgaccaacgccatggagatcctggtctccatcgccgtgctggcctgctacatcactgggcagcacgagctggccatcctgatcccggtggtgctcagcgtggtccactttctggaggagcggagcatcatgggaggccgggacgccatcgagggccttaagcagatgcaggccaccgacgcggtgctggaaactgaggatggggaggtgacggtggaggtccaggccctaaaacggggggacatcatcattgtccgacctggcatgggcctgcccatcgatggcaccgtgatctggggcaattccaacatcgaccagaaatccctcaccggtgaacccctgcccgccgccgtgaccgtaggggatacggtgtacgccggcaccaccaacctggacggcatgatcaagatccgggtggagaaggaatatcaggacacctccttcaccaagatcgtcagcctgctggaggaggcccagagcatcaccgtgcctgagatccggatcgtggaccggttcatgcactactacatcccgctggccctcatcgtggccgccctcaccgctctgctcagccgaaatatctccaacgccatcgccgtgctggtggtgagctgtccctgcgggcacatgctggtcagctccgcccccatgatcgctgccctggcggtgtccaccaagcggggcatcctcatcaaaaacgccaaattcgtggagcagctcaccaacatcaccactgtgatctttgacaagacgggcaccatcacccggggggagctttccatcagcggcttctatcttcaggaggcccagagcagggaggagctcttcgccaggggcggctgcgtggcgtgcagctctatgcaccccatctcccgctccctgatgaagaccttagagggggagggcatcccctatgaggaggggttccaggtccgggagaccgcgggcaaaggactgaccgggacccggggcggggaagagatcctgttcggctcacggcactggatcgagtccctgggctaccagccagaggacccccatatggacaccggagggggtcccgccaactgggtggtgtacaatgggcgggtgctgggctgcctcatgtttgatgactccgtccgtccggaggctgaggaggtggtgagccggctccacgaggacgggatggaacagactgtgctcctcaccggcgaccgggagttcgctgcccggaaggtccagcggcagacagggatcgaccaggtatatttccacctgctgccggaggagaagctggagcacgtgaagcggctgaggcaggacgcccatgtgcttgcagtgggagacggcatcaacgatgccctggccctggcagaggcggacgtgggcattgccatgggggccatgggctctgatgtggccatccagagtgccgacatcgcccttatgaacaacgacctgaacaacatcccctttgtcatgtccctggccaggagcaccaagagcatcatgtatcagaacatcggcatcgccttctccgtcagcctcattatgatgatcctggccgccgtgggggtgatccccgccctggccggggccttcctccacaatatcggagcctttgtgatcctgatcaacagctcccgcatcctccgggacagcggcggggagggctgaacgcctgccgcaaaaaattttctctctctgggtgtacggtttcgagcacatattccatggaccgcggcatatactgatgtgtacgccggtgggaggaccaccggcgccgcgatcagatacagagggaggaagttctcgatatggaagaaaatcagatgatccaagtacagcgtccgacgcagcctgagccctggcgcgatctggacgatctcatctttcagggggacggctggctggccagcgaccgctgaagggccgtctcgctgagcgagacggcccttccatttgtcgaagcagagggagaacgcctctgcacggtgggagcggcggcgcaaaaaaacactggaatatccggttttttctttactttccagccgagttcagatataataattgggctttgattggaatactgcccgtcagggcgggaatttgatggaaagagtgaggaccatatgctccaattcgacgaatacaaggtcaagctgaacaacctggctcccaccctggaggaactgggaaaagccctggacctggaatccgccgagcgggaactggacatgctccaggcggagagcgccgccgacggcttctggaacaacctggagaaggctcagaaggtgcagcagcgcatcaagaatttacaggataaggtggacaagcagaacaagcgccgccgggagtgggacgacctgatggccctgtgcgagatgggcaatgagttcgaggacgaatccctgctgcccgagcttgaggagggcttcgcccagctggagcgggacatggaggaggcgcgcttacagaccctgctcactggggagtatgacagctccaatgtgatcctgaccatccaccccggtgccggcggcactgaggcccaggactgggcccagatgctctaccgcatgtacacccgctggaccgagcgccacggctttacctatcagatcatggactaccaggagggggacgaggcgggcatcaagtcggctaccatcatggtggagggggagaacgcctacggctacctgagaggggagcacggcgtccaccgtctggttcgggtatctccctttgatgccaacgcccggcggcagacctccttcgcctcagtggaggtcatgcctgacctgcccgaggatgtggaggtggatatccgccccgaggacatcgagatgcaggtctaccgggccagcggcgccggcggccagcacgtcaacaagacctcctccgctgtgcgcctgatccacaagcccaccggtatcgtggtggcctctcagcaggagcgctcccagttccagaacaaggacaactgtatgaagatgctccgggccaaactggtggagttgcagatgcaggagaaggcggacaagatatccgacctgaagggggtccagctgaagatcgaatggggcagccagatccgctcctatgtgttcatgccctaccagatggtaaaggacaaccgcaccgcctatgagaccagcaacatcaacggcgtgatggacggggacctggacgggttcatcaacgcctaccttaccgctgaggccaccgggaactgggcggagaaatgaccaacggaacggccggggacagaagggcgggccgcgggaggagacttccgcggcccgcttttttatagttgccgccaaggagtggatacgctatactggaggcggcccccaggagtggggaaaagagactgatcgatcagaaaggcgggaaaaccatgcagtatcaaatcacaggagaacccatgccggtggtgatctgccagctggccagcggagagagcatgatcacagagaaggggtccatggtctggatgagccccaacatagagatgcagacctcggcgggcggcatcggcaaggctttcgggaggatgttttccggcgagtccatatttcagaatatctataccgcccggggcggcgcggggatgatcgcctttgcctccagcttccccggttccatccgggaggtggaggtcatggacgaccgcccgatggtggtgcagaaggccggcttcctggcagcggaggagggggtggagctgtccatcttcttccagaagaaaacgggcgccggatttttcggcggcgagggcttcatcatgcagaagctgtccggccgtggcaaggctttcgtggagatcgacggctctgcggtggagtacgagctgaaggcgggggagaagatggtggtagacagcggaaacctggccatgatggacgcaacctgctccattgacatccagacggtgaagggcgtcaaaaacgtcctctttggcggtgaggggctgttcaacaccgtggtcaccggcccggggcgcatcgtgctccagactatgcccatcaataattttgcggcggcggtggcgtctgtcctgcccagcagcaagtaaacaaggagcagaaaaatcgctcttccggactcaaaggtctgggagagcgatttttctgctcacaggggttcggcggctaccggattgatgagagagccgatgccctggatgcgcatctccatcacgtcgccgggatggaccggactgacaccggagggggtgccggtgaagatcacgtcgccaggttccagggtgagggcctgagagagatagctcaccaggtggaaggggtcaaagatgagattgcgggtgttggagtgctgcttccgctccccgttgacaaagctctcgatctccagcccggcccgggggtccacatcggtgacgatacagggaccgatggggccgaaggtatcaaagcccttgcacagcgcccactgcccggtgggggactggagatcccgggcggtgacgtcgttgcccacggtgtagcccagaatatagtccggggcctgctccggggtgacatggcgggcatgccggccaatgaccactaccagctccgcctcatactctacctgccgggtcagggcacggggatagaggaccttctgcccatgggcggccaggcagctgggcggcttaaggaagatgtttgggtcggtgggaatgggggtgtggaactcctcggcgtgatcccggtagttgaagcccaccgccagcatcttgccgggagagcaggggggcaggagcttcagaccgtccaggagaaaaccctctccggtctcctcccaccagccaaacaggtcaccggacagggtgtagaccacgtcgtcctccacgcggccataggtggggccgtccggccccagaaaacgaatgaattttgccatcttgcattacctcccgcactcagaatgaaggatgcttcctgcttctagtgtactccggacggagaaaaaaggcaagtggaaaggaagatgctccgggcacggcggacaaggggacaaaagtgcgtctcccggatcgggagacgcactcggcttttcgtaagcttttttcagggacagatgtttcaggatcagacaggggagttcgagggggcggcagcccgcctcgaatgagatcacatcccccgcagcctttgtacgtcaagggctgcggcgagcaaagcgaggacttttccgccccagagcgggcggaaaagtagcgggatgcatgctgtggaaaacgtccatggaggatttccccacagaataagcgtatctcccggaccaggagacgcgcttggacggggacggagtcagaagtcgtcctgatccatcagagtgacggtgaactccaggtgctccccgccccgcaggacctccaggagcagggagtcgcccacgtccagggtgcgcttgatccgctccaggtcggcgaaggtctggacctgctgcccgttggccgccacgatgatatcctggggctgaatgccctgccggtggcagtcgctgtccggatctacctcctccaccaccagaccgccgttctccccctggccccggcgtacgatgatccccagggaggggcgggtgaccggcgctccagcgatgaggcggtccaccacctgcttgacccgggtggtggggatggcgaagcccagcccctcggcagagccgtcgtctgccacgatcttgatggtggtcacccccaccacctggccccggtcattgagcagggcgcccccggagctgccgtagttgatggctgcgctggtctggaggaggtacatggtggtcccttccactgataccggctgatccagggcagacacgatgcccggcgtgatggtggagcggtagcccatggggttgccgatggcggagacggggtctccgctgcggagcagggtgtcatcgccaaattgggcgggggtgaggccggaagcgtcgatcttcagcaccgccagatcctccaaaggctcgaagcccaccaactgggcggaccagagcgagtcgtcggagagggtgacgttgacctgttcggcgccggcgatgatatgggcgttggtaacgatatatccgtcggcagtgagtacgatcccagtaccggtagagaccattccggcgctgtatgcggtcaaggccgcaatggagggggcggccttttcatagacctgggtgtaggtcagcgcctcaccggaggggggagtaatggagaggatgacgccggtgccggtctccgcctgcggaatggaagggggcgcggagaggtcctcctcctgctcccagctgctgtatcccgggtcggacccagaggggacggggtccgcggaacggggggcgaggccgccattgaacaagactgcaagggcggtgagggagacgatcaaagccagcgcgatgagaaagccgatccgaccgctgtggcggtgttggggcggcctgggaggacggtatttctggggcgggattaccacggcgggcggcggggagaaggggcgggcaggctgctcccaggggccgccctgccagagcccatcgcttcgattgtccatagaagaaacctccccgcgccctggggcgctcagttcagtgtgaagattcctgctcggagcagggggacatgggggcgaagggccgcccgcacgcccttccagtcaaagaatatgccgcaggggggacaaacatacgcggccggacgaaaggggcccgcgccgcaggcccaaagaaaacgtcacagaggagcctggaagaactcaggcgagggtgagggtgaaggtaaagttggtgacaccgtcctcactggtcacggtgatgttttcttttagattgcccaaaatggtcttgacgatatacagacccaggcccacgccctcccggtccatgcttctggagtagtccgccttgtggaagcggtcaaagaggagagagagctcgtctggagggatggtggcccccagattgcggatggaggtgtacgccttgccgtcctttttggtgatctggaccgtgatggtggtccccttggcggcaaatttggcggcgttgtccagcaggttgtagcacacctgggtcaccgaatccgggtcgccccacaccttcaggggctcgtccggcattttaacatccacatccaggtcacgtccggtgatcttgccctccaggctgaccaatacctgggagacggtctccgtgaggtcgaactgctcctgagcggtgatgttctccgtcaaagcattgaggcgggacaggtccagcatccgccgcaccagccgggacaggcggcgggtctcagagacgatgatctccagggagtcccgttcccgctccggggggatggtgccgtccaggatgccctccgcaaagccggagatggtggtcatgggggtcttgagctcgtgggagacattggcgatgaactcgctgcgctgggtctccaccttggacagggaggcggccatggagttgaaagcctccgccagggtgcccacctcgtcgcaccggttctcatagcctgtgacccgcacgtcgaactccccctgcccgaatttccgggcggcctctgccatctcgttcagcggacggacctgatgggaggaggtgatggaactggcgatcacggcgatgagcagcaccgtcacagcggtaaagaaaaagatggtggcggtggcacgccacatctcggagacgctggaagtgtcggaggagaccagcaccagcccctgagggatggtggctccgccgaagatgatgccgaaggggtaggcggccagataccgcttctcggagtagatgccgtccaggttggtcaggccgttgtaggaaccgctggacagcacctgctggaggacccgctgggggatgcggctgtcggtgtaattggacaggtcggaggagctgccgccggaggcatagatgatatccccgtccacatcggagagcagcacgttggagtcggagacagaagccagggtagccacatagctgcggaagtagacatccaggctcccagactgctggatatattcggaagtaaaggaggcgatatagtcggcgttgcgctccatggcgtcccgcttttctgcgatgatatagcggtaggagagcatcatgaaagcggcggacagcatgaaaaaggagagaaagacgatggccaccatcatgaacagctggcgcttatacaggcttttcaaggcaaacacctgcctcagccgggcgtcccggcgggggagacctcgaacttgtagcccacgccccagaccgttttcagacgccactggtcgctgaccccctccagcttctcccgcaggcgcttgatatgcacgtccacagtgcgggagtctccgaagtagtcaaagccccacacctcatccagcagttggttgcgggtgaatacccggttgggggaggaggccaggtggaacagcagctccagctccttgggcggggtgtccaccggctggccgttgacgatcagctcataggagtccagattgatgaccagcttgtcaaaggccagttttttggcgcccccctcctcctcgccgccggcggtgcgccgcagcacagcgtggatgcgggccaggacctccttcatctcaaagggcttgacaatatagtcgtccgcacccatttccaggccggagaccttgtcgctggtctcccccttggcggtgagcatgatgacgggcaccttgctgctctcccggatctttttcagtacggaccagccatccattaccggcagcatgatgtccagcagcaccaggtcgggctggaaagcccggaactgcaccacccccttgccgccgtccttggccaccaggggctcaaagccctctttttccaggtagaggttcagaagctccgcaatgttgctgtcgtcctctacgatcagaactttttttgccatcatcagcaccgccttttccatgtttcggggaagagacagggcgctccccaaagtttatcctgtgaccgggagcgcgtgccacggccccgcatcacaccgttctccttctattataagggattttgcccctcttgggtgaattttttgtaaatatccctcagttttggacgctccgctgatcgatataggagtgatccacctggatcaccgggtagtagtgatcggacagggctcggatcgaccgggtgagctgctccagcacctgctggtcggtgaggcggaagccataggggaccaccacgtcaaagatcaggttggtgtggagcggaccagctgtgatgcggaaatcgtggatggtgaggaccgggtccagctcctgggtgagccgggtcacctggtcccgcagggccagggtgcgctcgtcattgaccaccgggtccacgtggatgacggtctcgatgtggtggcgctccttcagttcccgctcgatgtggtccactacgtcgtggatctccagcaggtcgcagccggcggggacctccacgtggaaggacatcatggcccgcccggggccgtagtcatggtagactaggtcgtggatgttgaggatgtgggggtgggacaggaccagccggtcgatatcggcggccagcgaggggtccatggggcggcccagcagagggtccagggtctccctggcagaatcccacccagtcttcaggatgaacactgccaccagcaggccggcgaagccgtccacctggacatggaggaagtgagagatcagagtggacaggagaacgaccccagtggagacggagtcggagagggagtctgctgcggtggcctccatggcggcggagccgatgcggcggccaagggtccggttgaagaaaaacatccacagctttaccaggatggagaggaagagaatgaccaccgccatccaggagaaggtggtgacttccggggaaaagatcttctccagggaggacttgccaatctccacccccatcagaaggatggccagggccaccaccagaccggtgaggtactccatccgtccgtggccgaaggggtgctcttggtcggcgtcctgcccggccagccggaaccccaccaaggtgatgacggaggaggcagcatcagacaggttgttgaaggcatcggccaccacggcaatggagccggtggccagaccggagaggagcttgcccagaaagagcagggcattgagcgcgatgcccacgcccccggacacagagccgcaccgctgacggacctgggggtctccgggatccgcaccgggggggagcagaagacgaatgagaaacgcggtcacggggactcctcctgtcatttcggaattttattattatcccacatctggaaggagcagtcaagaaaaaggaggtggggaccctttttacttcgggactgatgggctccaactccatcgattttactatacattgaacagagcagaaaactatgataaaatagacagaaaataaattcccaatttgcctaggaggaagtagtatatgaaatgtttagattgtggaatggaaatggaacaaggaactgttgaaggtattggacaaagtggtggacattggtatgaatttacttctaatgaagaaaagaaaaaatgtgggctaaaaggtttttttacccgaaaaactatcagcgtagaaacttctgttcttgaaaaaactgcatggtactgtcctaaatgtaagaagattttaatgtggatggacagcaacgaataatataaatcctgatttaacagaggagcatggtagtatgaaaaaaacaatagctttgatatccttactggttttaatgctttggctggtcggctgcaacaaaaaaacggtcaatatcaactttccatttgaggttggagatgttgaaaccattgaactgtaccgctatgcgggagcgcccgtttcagcagaaaagaaagttgttgatgcagaagaaactataaaagacctgtatgatatgttcgaggggctgaccttagaactcaaagaagtagaagaaaccacaggagcaaagataaccagttttagatttaatctatccgacggaacgacctacgaattgatttatggctgctatggagtaaagactggcaatctaaaatcctcaacaggtaattttgaatactttacgagtgcagacattggagcttattggagcgatattgaccttgaagcagttgccgttgaagaaagcgagctgccgaagtaagctgcctcgttttaatttttggactgggcttgtattgaaaaagtgcatactaaattttcatcatcagtgtgttggtatgtgccttttgaggtttgcagcatgcaggtcaaacatagactagggaaaagctccacctgttcaagggtggagctttttctgtgtatttcggcgaataaatcgttgggcaggcctaaatcagcccaaatgggacaagggaaaaccatgtgttgccaaccgcccgcgccggggggcggggacggggagatcagccccggggggaggggcagcgggcctccagggccacccagccgttcttctcccgccggccggtgagggtcagcccctggcggaccagggcctcctccacctcgtgagcgcgggtgtcgatgatgccggagcacaggaacaccccatcctccgccagcagagcggggacctgagcggacagggggatgatcacgtcggccacgatgttggccagcaccagatgatagcgctgacaggccagctgggcggccagcgcccggtcggagaggatatctcccgcccggacggtatagcggtcccggccgatgccgttgagggcggcattctcataggccacatccaccgctttggggtcgatgtccaccgcggcggcggtgctggcacccaagcacagagcagcgatggagaggatgccgctgccgcagcccaggtccagcacgggccggccggtgagggtgtgctcctccaccccctccaggcagagctgggtggacgcgtgggagccggtgccgaaggtgaggccggggttgaggtacagggggctgcggccctctggaacgggctcatcccgcatccactcgggcactacatagaggcgccggccgacctccagaggtttatagtacttctgccagctgtacgcccaatcgttgtccgtcaggggggtgacggtgtactccgcgtccaggccacgtgtgtactgctccagctggacccggccggccccgtcgtcggtgacgtagaacttcacccgggtgacgccccgcatccggtccatcagctcctggtccacatagtcccagtactgccggttctgctccagaaactgctggaactccccctcatcctcgatgaccagcccggtcatgcccgcggcggtcagcttggcggtcacctcgtccaggcggtccggggtggtgttgacggccacttccagccatttgatctcgtccatggagacgctcctttgtgatgaaaatagaagttggctcagcgctgagtgcccagataaaacagggccagggtgccggggccggagtgggcgccgatgacggggcccacatagttgatgcggatgtcctgggtgccgaagcgctcccggaccatctgggccacggcctccgcgtcctccaggcagtcgccgtggctgatgaagacggtctgtttccccgcctcggtgacggtcttttccatcttgtctaccagggccttcagggaggactgccggcccctggccttgccgatgttgatgaggtgcccctcgtcgtccacgtggagcacaggcttgatctggagcatggagcccaccacggcggtggtggcggagatgcgcccgccccgcttgaggaagtgcaggtcatccaccgtgaactggtggcagagggagagcttgttggcctcggcccagtcccggacctcctcgatggtgcggcccttcttccgctcctgggcggcgtaccacacaagcagcccctggcccagggaggcgcacagggtgtccacagtgtacagcttccgctccgggtacttctcactcagctcctccaccgccagcttggaggactggaaggtggccgacagaccggaggagaaagccaataccagcacgtcccggccagcctggagcaggggctcgatggcctccacatactggttcatgttgactgcggcggtggtagccacctcgccggcacggaggcgctggtagaagagatgggggtccatctcccggttgtcggggtagttgtggtaatcggccccgccgatggtgaaagtgaggggaagtacctgcacgtccgcagcctgggccatctctccgctcaggtcggcggaggagtcggtgagaatgatgaagtcggacataagattgacctcctgatatttgaactggagcggtgccgctccgaagggatcgcgatgagatcacttttttgccttttttggggcctcctcgcacgggggctggaggatatccaggatgcgtgcacaggccagctggctggcatagctgcgcagggccaggtccagggccaggcggggcaggtcctcgggggcggcctggggtggcagggattgggcggtctcattcagcgcccggtccagggcctggaggaagtaggcgtacagctcctccggcggcttctcccgcttttccccagcggagatgagcaccttcatgtcccgcacggagagcacccgcttcagggcgcacacggcggtgaggtagcccagatggatgggaccgtaccgcttcccgtccgcccgggggaccagaccgtccttgatatagttgttgaccatggcagaggtaaggacctcgccgtcgtcgaaatggatcagctggcggggcatgtaggagatgatctgatccatgtaaagggccagatcaggcagctccgcccagggggtgggacgctcctgctccagccgctgcttcaggtccaaaagctcatccaagggagagccccctttcaaaagtggttatcgttagtatatcacaaaataacagatactgcaaaggaagatcacacagacccgccttttttctcctgacgctccttctgacgctggcgcagccgctccagggcctgcttgtggtcgatggagcgcatctgggggaaagcccgcagcaggcggcgttgaccgaaggtgtggcggtccagcagctcgctcagggacttgcgcagctgttccagctcctccagacgctgggcccggcgcagcgccagatccagctgatattcgctgcgctgctcggccagctcctctttccaactggccagatcctccatcaggtcctcacgccggtcggccagggactccttccagtccgcacctttctcggctgcatccagcacccggtcagccaaattttcgcccaaatcattggagagagccttgatacggccggccagctcgtcgatttggcccaggctgcggttgatccgggcgatggtgcgcacggtggcggtcaggtccaccgccatgacggagacgaagcaggccagcaggaccaggcccagggtgtgggggatgtggcggataagccatagcaccgaggggtggatgatctccatcaccagcaggcaggccagcccccaggccagggagaagcgcaggcagatatagccgcccaggttgaaaggctcgttggtgtagtcccaccagcgctgatggaaaagcttctccagcgcgaagccaacccccagttccagcagggaagtgaggagcaccgagcccagaaagagcaggagtgtgttctccataagaggggtgaggcagaggaccacgatgaccacgccaaagccgtagatgggacagaccgggccgttgagaaagccgcggttgacaaatttaccggtgttcagggcgaaaaagcagacctccaggcaccagccgagaaaggaataaataaaaaagatccataaaaacaaataaaaagaatgcaaaagatacctcctgccctcaggctgcgtgggatgcgtccatgtctgtctgttaagaagtatagccgatttgccggggaaagtccagaaaatttgtgggaatacttgacaggacgaaaaggacagagtaaaataattagaacttcaaactatttgaaattcaaagaaaaatacttgctggcggagagggggagagcccggtgacagcggagcaggagcgctatttcaagagctttttggaccacatgttcgaccatatcatggatctggaggagcgggccctgcaccacgtgggggcggatgacctctccgtgcgggaactgcacgtgctggatgcagtgggggagcggatggcggacggccgcaacaccatgacaggcatcgccgacggcctctccatccaggtcagttcgctgacggtagcggtgaacactctggtgcggaagggatacctggtccgggagagggagaaccgggaccgacgggtgatacgggtcctgctgactgagaagggggcggaggccagccgggtccatacccagttctatggccgggtagtccaccgggtatgcagccgtttgaatgaggaggagtcccaggtgctggtccagtgcctgcgtcagctggacgagctgttcgactcgttgaagcggccggggaagaccggcgtcagtgaaaaaaagggaggttcttgaccatgtccgttcagatcctgaccgacagcacatccgatatcctgccggaagaggcggagcagaagggggtgcgagtggtcccgctgctggtgaacttcggggaggaggccttccgggagaatgtggagatcacccaccaggagtattttcgacggctggcccaggcggagagcctgccgaccaccagccagcccaccccccaggacttcctggcccattttgagcaggtacgggacgcgggggacagcctggtgtgtgtgctgctggcttccaagctcagcggcactttccagagcgctcagctggccaaggagctcagcggctacgacgagatctatatcgtggactcccagcaggccctgtgcgggctgcgaatgctggtagactttgcctgcgtgctgcgggatgaggggctgtccgcacgggagatcgcggagcaggtggaatccgccagccaccgggtgcgcctgttcggcatcgtgaacaccctggagtatctgcataaggggggacgcctgcccgcctccatggcggtggtggggacgctgctgaaggtgaagcccctcatcaccctgcgggagggagaggtgggcatcctgggcaagggcctgggggtcaagaacggcctggacaacctgctgaagctgatgggggacgagatccatcctgagccccgtctgcccctgtactttggatatacccagacccacaacctctgtgaccagctgcgggagcgggtggtggagaagtatcacccggcccgggtggagcagaattctgtgggggctgtggtgggtacccatgtgggccccgacggagccgtagtggtctacctggatcaggaataatattttgcgggattgcggaaaaagccgcccctttcgccagcttggcggagggggcggctttcgctgttcccagcaggcctgcatctccatggaaggccgccccccctcatttatggaggtatgcgccgtgccgcctttcccgagaggaggcctttcgggcggcccacaatttttttaaaaaaatagggccggcctattgacaaaaggaaaatgactgttatactgtatatatagtatatatacaatatgacccgagagaaaggataagcgctcccctgggcgggccggcggcggtccggacgccgcacgcctggtctggcggggtgcttataaggtgccgcaagtggacatcatcatcagtaattccagcggaaagccgatctacgaacagatcgtggaccaggtcaaggagcagatcatggcaggcgcgctggcggcaggggacgccctgccttccatgcgcctgctggccaaggagctgcggatctccgtcatcaccaccaagcgggcctatgaggagctggagcgggacggattcctggagaatgtgccgggaaaggggtgctttgtagccccccagaaccgggagctgctgcgggaggcccagctgcgccgggtggaggaaaagctcacccaggccatcgaagaggcccgacgcggggcggtgtctctggaggagctgaaggaaatgctgacagagctgtatcaagaggtgtaaagcgatggaaaacatcattgtcgcagagggactgcggaaggaatacgacggatttgccctggaggatgtctccttccgggtccccggcggagccatcatggggctgatcggggaaaacggggcgggcaagaccaccaccatcaaatgcctgctgaacctggtccggcgggacgccgggaccgttaccctgctggggatggatgatctggagggggagaaggagatcaagcaggatgtgggagtagtgctggacgagtgcttcttccatgacagcctgcgggcaaaggacgtaggcgtcattctggcgccggtgtaccggggttgggacgaggagctctaccgccggtatctgaagaaatacaaactgccggagaaaaaatttatcaaggaatactcccggggcatgaaaatgaagctgtccctggcggcggccctggcccaccggccccggctgctgatcctggacgaggctaccgcggggctggacccggtggtgcgggatgagatcctggacgagttccagggctttatcgaggacgaggagcacgcgatccttatttccagccatatcaccagcgacctggagaagatcgcagactatatcacctacatccaccagggccgcgtggtgctctcggacagcaaggacgccattctggagcactatgccaagctgggctgcacccaggcccagctgcgggacatccagcccggagatctggtgcgggtgcggaagggcagcttcggctgtgaagcgctggtacgggaccgggcggcctttgcccggaaataccccggcctgatgctggaccgggtgacgctggaggatatcatgctcttgatcggaaagggggagtcggcatgaccggcctgatgatgaaggatgcccttgtgatgcggaagaccctgaggctctatgccctgttcctgttgttctactccggattggccgtgctgggcgttttccccatgtccatggccctggctatggtggaggtgatcgtgatggtgctgcccatctccagcttcagctatgacgaggcggcgaagtgggaccggtacgcagctgtgctgcccgtgggacgtaccgctgtggtaaaggcccggtatctcttcctgctgctggtgctgctggcggcggcggccatcgggctggtggggagcatcctggcctccctgctggcacgggaggatctgggggagctgctggccaccctgctggtctctatgggcttagggctgatgatcgcggacattatgctgccggtggtctatcagctggggccggagcgggcccggccttggatgtatgtcatcatttttgcccctatcgtggtgctgctggggggcgccaagctgggcctcttcgatgggatagacctgtcctggctggatcagctgcccgagcttgctgtcctgggggtctttgccctggtgccattggtgcccctggtggggatgctcctgtcctgctggatctcctgcaggatctacgccaggaaggagttctgaggtggactgggcgcgggcgtccctgtggggcggaaaggcgctggggctggcgctggctctcctctgtcttaccaggagcattgagccggacggtccggcggcctggggaatagcggccgggggtgtcctcctgatcctctggggcgggggccggggcggaaaatgagcgcgccggaacggcgggccccttgcgcccggcccggaccccgtggtacaataaaaggagaatacagggaaagggagcgtgagcgccgtgacgacacaggaggcgatccgagagctgcagaatatccgccagtactgcgcggccaagtccatcccagcggtggattttgccctcaaagtgcttcgggagaagctggagcaggaggaaaaacagtaaaaagacaggaaaaagccccggcatccgaaaatgcggatgccggggcttttcacttgagggaaataagatggccggaaaagagctgggtcatgcggcgcggtgggactggccgggggagagctgcttcatgataaacaggaaagccagcatgagtacgatgcccacaggcagggcaatgaagggggtctgcacgaaaccggccacaatataagtgacaaaggagatgaccgcacaggagatggcgtagggaagctgcgtggacacgtggttcacgtggtcgcactgagcgccggcagaggccatgatggtggtgtcagagatgggggagcagtggtcgccgcacacagcgcccgccatgcaggcggagatgcagatgatgcccaggggattgtccagggggaagacgttctgcacgatggggatcaggatgccgaaggtgccccagctggtgccggtggcaaaggccaggccgcagccgatgaggaacacaatggcgggcaggaagttctgcaggctctccgcattgttgtacacaaaatcacggacaaaatatttggcgcccagggagtcggtcatggacttcagagaccaggcaaaggtgaggatgaggatggcggggaccatggccttgaagccctcaggaacgcaggacatcatctccttgaaggacatggaccggcgcacggtgtagtagatcagggcgaagagcaggccgaaggcagagccgaacatcaggcccacggaggcgtccgaattggagaaggcagagacaaagtcggtgccggagaagaagccgccggagtagatcatgccgatgacgcagcagacgaccagcaccgcgatgggcagcaccaggtccatgaccgtgcccttggtgtcgtcgatctcctcatccagcatggcataggggttggaaccggagaagaggtcgttgttctcaatggcgttgcgctcgaacttggccatggggccgaaatccaccttcatcaggaccagacccagcatcattacgatggtgagcagggcatagaagttataggggatggcccggatgaacagggtcagaccctggccgtcctccgcaaagccagagacggcggccgcccaggaagagatgggggcgatgatgcacaccggggcagcggtggcgtcgatgatataagccagcttggcccgggacacatgatgccggtcggtgatggggcgcatcacactgcccacggtgaggcagttgaagtaatcgtcgatgaagatcaggcagcccagcacgatggaggccagctgagcgcccacccggctcttgatgttcttcttggcccagcggccgaaagcggcggagccgcccgccttgttcatcaggcacaccatggtgcccaggatgaccaggaagatcaggatgcccacgttgtagctgtcagacaggacggagacgatgccgtcgctgaacacgtggacgagggtgccctcaaaggcaaagttggagtagagcaggccgcccaccaggatgccgatgaacagggaggagtagacctccttggtgatcagggccagggcgatggcgatgaccgggggcaacagggagaaggcggtgttgtaaaagctgctgggggactggacatagccggtcccgccgcaggtggcacacacattggtcccgccgcaggactcgcactgtgggtccaggccgtagcacaccatacaggcggtgctggtgccgcagtcgggacactcgatcatcttgctgcccggctcgtcggtggggttggaggcgaagacggaggtggtcagggccagcagcagcatgaccaccagcaccgcccgtgtgatccaggtgcgtcgcgttctcatagaaatcgttccttcctttcttttgatccacacacatcccagctgaagcggcggtcagacaaaagaaaaggccatggcgcgcgatcccggagcggccatggcgaaggggggcggtctggcggcgaaaacaggccagacggcaggcccccctggatagcgctccacttgcagtgacagtccgggggatcttctcccccggcccaggaggggacgcccaggcaggcggcccgaccttcggcggcgttccctctcccccgggacggctgcctggcctctgtcccggcgtacgcatgaacgccgcgcctctatccgacacgattcagttggaagtgcaagtatcctaccacgcctctgtcaaaaagtcaaggcatttgacgggcggtttgggaaaaaacgagaaaaaagtcagctgtgggacatgaaaaaggtgaaagtcccggtggccacggtttcaccggacacattggtcagctccacctggatgacggagaggtggtagcccatcttcttcggggtggcagtgcagaagatgcgggggccatcggcggggcggaggaactccatggtgctgctggaggtgacgcaaagcccccctttggaacaggcgcagcacccgcccactgtgtccgccagggtggccagggcgccgccgtggaccttgccgtgggggttgatgctgttggggcccacctccagcaccccctgggcaaagccgggctccacccgggtgaccagaacgccgctctcataggagaactggtggggggcgttgaccacggagttgaggtggactccaggcaggtcggcgttggaagaagagagagacaagggaaacactcctttttcacaaaaagtctgaaagacgggaaaacggggagagttgtatccatccgcccctccggcgcataggatggggagaatccaggcgggcgcaggcccgaaataaggagggagcgactgtggaacagagacagaccgccccggcccaggacacggagcgggcggtggtggatttggagacctttgagcgggtctggcgcagagtgatgcccaaccaggacatgagccccatccaggtgggggcgccgaccgggccggggaccggggtggagcggcaggcggaacggatacccgccccggcgcagctccagaatcaggatcagggggccgccccgacggcccagatccagagctcggcgcagctccagccccagagccaagttcccgctccggcggagcaggccgctgggcaggtccggcagctggaggagttgatggaaggggcctggatgggccacaggatctatctggagctggcccggcgggcccggggcagcggggcccggaccctgaacgccctggcggcggagcagcgcaggacggcccagcggctggcggcctgctggttcctgctcaccggcgcctgctaccacttctccagcccgcccatcccgcgggtctgccccctggccgcagcgctgcgggaacagttcctgcaggagcagaagtggagacggttatgccagcgggcggcagcggaaggggacagcaccgcctgcggggggctgtatgagacgctggacgggcaggcggagcaccgcatggaggccatccgatgcctgctggagcagatgcagcccctgcccagcgggggttgacggatggagaaaatctgatagacttgagccataaggaccagagggtatcttaacacgaaagagggccggtgtcatgtgtcaatttcaacagttccgatttccgtccagcgatgggagcagctcctgctacgccggggcgtggctgcccccggaggagcctcggggcgtggtgcagatcgtacacggggtgggggagcacatcggccgctatgagacagcggcccgattcctgacccgacagggctttctggtgtgcggcgaggaccacctgggacacgggaacacggtccaggacggccgctacggcgccttcgccccccagaacgggtggaagctggtagtggccgacatcgcccgactgcgccgcatccagggggagaagcatccgggcgtcccctacttcctcctgggccactccatgggctctttcctcacccggacctacctcatcgactatccggggacggtggacggagccatcctgtcggggaccgggcaggagcccgcccccctggtggctttcggaaagctgctggccggactggagtgccgccggctggggtatgacggggtgagcccgctggtggaccgcctctccctgggggcctataaccgcaggttccggcccaaccggaccagcgcggactggctctcccgggatgaggagcaggtggacgcctatctggccgacccgctgtgcagccacaagtccagcgtgtccatgttccgggacatgatgggcggtctccagtacattgcccgccgggagaacctggcgcggatggacccggacacgccggtctatttcttctctggggaccaggacccggtgggcggcatgggaaaaggggtgcgcaaagtgtacgccatgttccaggcggcgggctgccgggacgtgaccctgaagctgtatccaggcggccgacacgagatgtttaacgagctggactggcagcaggtctttgacgacctgctggcctggctggaggcccacatgccccgggagggacgggcgtaaagagaccgggcgcgccgcgcagagcggcgcgcccggcttttcaataccggtggacccagccgctgaggaaccacacaggcagcagccacatcagcagataaaacagcaggttcaggggggagagggaggcgtaggcgtccacagaagtcaggtagtaggccagcagaacccccagggtggagccggcgcaggtgagcaccgcggaggcccggacggcccggcgcaggcggcgggcccccaccaccgactcggcgaaggggagcagcccctctcgacagagcacggcggtgagcacgccggtgtggtcctgctccgggtcggacagctcccgccggcgttccaccggaggaaagtccatccggtctgccgccagcttgaaccgctgctggagcatggccgggatgagattgaagtcccgggtggccagcaccggcccaacccgctcccgaagcagggaggtgagggagggaaacacggtgtcgggcagggtgtaattcagggcgaagatgccggccagctccccgtcgatggcacagaagaccgcgtttttcacgttcagcccctggggcaggggcacctccatcagattcatgaaggcggcggaacccaccagcacctggtccccccggatgttggcggagaggcctccgccctcatagcagcacaggctgtccgccctgcggaagatggccccctgggtgcggagcaggtcgtggaagagcttttccagcccacagcccgagtcccggatcagggtggcggtgtagcccaccacccgttccacggagaagtccccaaagaccttgatgccgttgagctccacaaagccgggggggaacaggtccagatcggtgatgaggacccggttgccccgccgggacccggccgcgccgggccagccggccaaggcaccgccgctctgggagacccggcgggccaccttgtggaaggagcggccataggccagtgccccgccgaagccggcggcggcagtgaaggtggcggagagacaccacatcaggtgctccccctccccgatgccgaaggaggccagcagggaaaagactatgcaggccagcagcaggacgggacagaacacccggtagatgcgctgggcgccgtcgtccatctggatctggctgccaaagccggcgggggtgccggaccacttggcgtaggtgtccttcccgttccacttgccctcgtccagagtgaccagatagggctccgcggcggccgctgcggtgcggcaggacaggcgaagggcgcaccgcttgtgataggtgccgtggagcaggaagaacagaccgaacagggcggcgggacagtaggagagctgcccgccccggtcttggctcccggccagcagcaaggtatccgccagggtgaaggcgcaggagagggcggccagggtgtccatccccaccttcagcctcacaccgcgccacaggccggcggccagcacgtcgagagacagcagcatacctgcccccagaagcccggcggagatccagaggaggaggggatatcccaccgccagctccggggggagggagacagggagcgaggggagcaggcaggggaccagagcggcggcggccaaaagaaagaccaatagggagcggacccggagccccttaaggcccttgccgtaggtgcgggccagctcctggggggggaggtcggggggcgggggctcctgccggcggggccggcggacatagcgcaggtcctcctccgtctcctggtcggtgccggggatcagggtctccaggcggcggacctcctctgggtccatctgctccgactcctcaaacatacggtcggcgtagtcatccgcctttttgctgatgtccttgaggaaggaggccagagggctctcctcctcgggaaactcgaccaccttgtctccgttttcttcggcatccaggacggcgtctgcctccggggcctccccttcgggctccgaagggcccttctccggctcggactcatcctggggggcggggccgtcctcctccggagggagagctcctccccctgggaaggccaccacgttgtctcggttccgacggggacggggggcctccggccagggcaggtcggggccgtcgtcctccggggacgatgggcgcagggggatggcgctgcgccccggcgggcttttgacgccgtactcggccagaatgtcgtccagggagaagccgccgtcctccgcaccagcgatcagggacttgacatcggccagctcgtcgccgagattcagttttttatcctcacggtcgctcatggtcattcctctgtgatgtgtgaaatggaaattctgtgccgccgacccctgggggcggcaggtgcgttatccgcccaggcgctgacgcaccgcctcgtaaagcaggacggcagcggcagcggaggcgttgagggagttgatcttgccaaacatggggatggagacggtgaagtcacagttctccgccactagacggcccatgccgtccccctcgctgccaatgacgatggcggcggggccctttaaatcggcctgatagagctgggtggtaccgccggcagcggtgccgaacacccagacgccctcctccttcagctccttgagcagggagggcaggttgggcacccgggctaccggcacatgggccaccgccccggcagaggtcttggccaccacggcggtcaggccggcggagcggcgctttggaatgatgactccgtgggcaccggcggcgtcggcggtgcggatgaccgcccccagattgtgtgggtcgctgagctcgtcgcagaccacgatgaggggggcctcaccccgctcccgggcaatattcaggatgtcgtccacagtggcatattcccgcacggcggccagggcgatgaccccctggtgggaatgggtgcggctcatgccgtccagcttccggcggtcggcgtccactaccacaatgcccttctcccgggcggcggaggcgatgtgtcccagggtgggatcggtgtcccccttcatgagaaagatcttgtcgatggctacgccggcccgcagggcctcggtgaccgcattgcggccttcaatgacgccgtcgttttccgcctccacaggggcggagcggcgcagcgggggtcgtttgttcatggagcagtcctcccatccgtcgttccagtttgcataataaaataatatatcacaatccggcagggaggggaagggtcaaattgcggggatcggaggaaaacggccgaaaagagaggaaaccaggaaaaaagacgggcgatggggcagcatcgtcaactttcacaaaatgtttacagcgctctttcttgtttttaataaggagatatggtatgatactaatcaatgtaccccgcacacccggccggagcagtccgaacgatcttatggaaaaggcaggaggttttctcctttgaaaccagataaaggaaacaataacggaaataacaacaagagaaacatcatgggcctggtcagcatcatcttttgggccctgctgttcacaatgatgatcaagagctgcacctccagctatgccaacatgggtactgtggaagtgccctacaccaccttcaaggagtggctggcggaggacaagatcgacaccgtcaatgtggagaacggcaaatacaccttcaccctgcgggacggcgtggaggtggagctgccccgggaggagacctccggcgggagcggaagcctgatgaactccctgatccctgttcccgcccagacggaggaggaaaagcagtatatcaccgtccccctggccggggtggacgacccggagctgctggccatgctggaggagcacgccgatcacgcctacaccgagccggtggacgagtcggcctatttcctcagcctgatcctctcctatgtgcttcccctgctgctgatggtgggactgatgatgttcctgttccggggcatcggtggaaagggcggcatgggcggcctgggcggcgtgggcaaggccaacgccaaggtctatgtggagaagaagaccggcgtcaccttccgggatgtggctggccaggacgaggccaaggaatccctccaggagatcatcgacatcctccacaatccccagaagtacacggagatcggtgccaagctgcccaagggcgccctgctggtgggccctccgggcaccggcaagaccctgctggccaaagcggtggctggagaggcgggcgtgcccttcttctccatctccggctctgactttgtagagatgtttgtgggcgtgggcgccagccgggtccgcgacctgttcaaggaggccagcaagatggccccctgcatcatcttcatcgacgagatcgacaccatcggcaagtcccgcgacaaccgcatgggcggcaacgacgagcgggaacagaccctgaaccagctgctggccgagctggacggcttcgacccgggcaagggcgtcatcgtgctgggggccaccaaccggcccgaggtgctggacaaggccctgctgcggcccggccggttcgaccgccgcattaccatcgaccggcccaacctggccggccgtctggccaccctccaggtccacacccggaagatcaagctgggagaggacgtggacctcaagaagatcgctctggccaccgcggggaccgtgggcgcagacttggccaacctggtgaacgaggccgccctgcgggcagtccggcacggccgaagagtggtcacccaggaggatctgctggcctccttcgaattcgttatcgctggaagcgagaagaagaacagcgtccttaccgagtttgagaagaagctggtggcctaccacgaggtgggacacgctatggtggcctacaagcagaagaacgccgagcccgtgcagaagatcaccatcgtcccccacacggaaggttccttgggctacaccctgctgatgcccgaggaggacaagaccaacctgcgcaccaaggaagagctgatggccaaaatcacagtctccatgggcggtcgggccgccgagcaggtggtgctcaacaccatgaccaacggtgcctcccaggatatccaggaggccaccaacctggcccggaacatggtagccatgttcggcatgagcgacgagtttggtatgatggctctgggctccatccgtaaccagtacctggacgggggctacggcctggactgcgcccaggacaccgccgctgtcatggacaaggcggtaaaggccatcctggaccagtgctatcaggacgcagtggaactgatccgggaaaacctggaggacatgcacaaggtggtggcctacctgctggagaaggagaccatcaccggcggcgagatggtggccatcatccaggggcgggaccccgccctggtggaggacgcttacgcctccacccacggcaggagccgttccctcactggggacatcgagccccccgccaagaacatccacatcgtcagtgagccggtgtctgcgccgcagctcccagacggagagccggagcagagcggtccggaggagccgcccgcccagccccgggatgacgagacaccgccccctcaggacggggaagggcccaatgagaagccggagcaggaccggccgtaaagcagaagaccggggcggcgctgagccgccccgattttttcaagatcgacaaagagggagagagaaggtatgatccgactggcgacagagcaggacctgcccctggtggggagcatctatgaggagatcctggcggaggaggagaaacggcccgcctcctttaccaactggcagcgggggaagtaccccacggttgaacacgcgcgtgcggccctggaggccggcaccctgtatgtggcggaggaggacggagaggtgtacggctgcgtcaacctgaacggagagcagctggcggaatatgccgcactgaactggtccgtcccggcggatccggaggatgtcatggtgatccacaccctctgcatcagcccccggtgggctgggcgagggaaggcacgggagttcgtggccttctgcgaggaggaggcccgcaggaaggggaaaaaggtgatgcgcctggacacctatgaggggaatcttccggccaacactatgtatcccaagctgggctatacctttgtgggcgggacggagttcttcttccagggctttatccgggagatcctgaactgctacgacaaaaagctgtaaatgggagctgcgcccacctcagttgaggcgggcgcagctcatatccgggaccgacaccggcagagcggggagcggaggggggggcgcggcgcagaccgcaggccccctcagctcgtaggaaacgatccgcagagtcccgcacccgcaggtgcgaaggaattacaggctgccaaaaggtccctgaaggactttttgacagagtgaattaaatctgctttttcggcggcatgtatgtgaaaaaatacgacttgtcctgcaagtgtgaactttgcctgtcgtgagtggacaagacgtgcgcacagcggggacagcctgctccaggcatatcagggcgccagccaccgccacagaaagaagagcaggagcgcctggaacagaaacaggagagggaagcctgcccgaaaataccagtggcgggtcttgtggtggaaaaagtacatccccagcatcccccccagggaaccgcccaggacgggaaagaagaacagggccttctccgaaatgcgccaacagccccggcgggcccggcgcttgtccagccccatcagggcgaaggccagcaggtttgcagtggtccaatagaggcaggccagctgccagagttgtgtccgcatgattgctcctttctgataggcggcaggggggacagagaaggatccctatcagaggatagcatgaaaggaagcgattttccagcccccaaaataggtggaaataaaaattcaggaatgtgggggcaggaggtgcagaaaaaggggggaatgtggacagcgagtgtcgaatataaacgaatctaagcgcatatcgtcggatttgatataattgcttccattttgtcgtatgatttccttaaaactaaattgggaggaaatgtcgatgaatgaaataaatgtaattcgacgggaactgcgcgccctggggatcacgaggcgatgccgctgttatggccgcatcgtaatggccattcagctggcggtggaccaggaggacagcctggaggcagtgaccaaggagatctactgggaagtgggcagccgctgcgggcggaaatggaccgcggtggagcggaacatccgcactgcggtgcagatcgcgtggcggaccaacccggaactgctgcgggagatggcggggtatcccctggacgggccgcccaccgcatcggaatttttggagatcctgtccaacgatgtgcagcgggcgatggagagaagagaggagggagtgtcttcaactcccggaatatgacagaaaaagggggagaaagccggcccgtgcattgcaccggagagagaaaaacggtataatggaggggatccttgtgaaaagagggggacatccatgtatattgctgatcttcatatccactccaggttctcccgggccaccagccgggactgcgacttgccccacctggactggtgggcccggcgcaaaggcatccagctgatagggacaggggacttcacccatccggcttggcgggcggagatgcgggagcagctggtccccgcgggggagggggtctatgccctgcgggaggggctgacaatggaggggactgcgcccggggccgccccccgtttcgtggtcaccggggagatcagctgcatctacaagcgccacgggcggacgcggaaggtgcacaacctgatcctcctccccagcctggaagcggcggaagaactgtccgtccggctggaggccatcggcaacatccactcggacggccgccccattctggggctggacagccgggatctgctggagttgaccctggagacctgcccagaggccgaattcatccccgcccatatctggacgccccactttgccatgttcggtgccttctccggctttgacaccgtcgaggagtgctttggggacctggcggaccagatccacggagtggagaccggactgtcctctgacccgcccatgaactggcgggtgtcggcgctggaccggctgagccttctgtcccactcggatgcccactccccctccaggctgggccgggaggccgacctgctggacaccggcctctcctatccggagctggtccaggctatccgcaccggggaggggcttctgggcaccctggagttcttcccggaggagggaaagtaccacctggacggacaccggaactgcggggtgtgcctcacccccgccgagacggcggaacggggcggactgtgtccggtgtgcgggaaaaagctgaccatcggggtggagcaccgggtggaggagctggccgaccggccggcgggcttccggccggaggaagccaagcccttcgagagcctggcccccctgccggaggtgatcgccgcctccaccggcggctcggccgccgggaaaaagaccctggaacagtatgagcgcttgctgcagaccctggggccggaattcactatcctgcgggacgtccccatagaggacctgcagcgggaagcgggcccctgcgtggcggagggcatccggcgcctgcggctggggcaggtggagcgccgtcccgggtttgacggggaatacggtgccatctccctccttgccccggcggagatccagcgcctgagcggacaggtctccctgtttggggcagaggagaccccaaaacagggggagaaaaagcggggacagctcccaaagcggccgaaggcggcggagcgggagggggagcagggcctccagcgctccaattcccagcagcaggcggccatctcggcggaggagcgaaccgtagcggtggtggccggacctggcacaggcaagaccaagaccctggtggaccgaatcgcgtggctggtggaggagcggggggtccggccgggggagatcactgcggtgaccttcaccaaccaggcagccgctgagatgcgccagcggctggaggagcgcctggggcggcgggccgcctcccgcatgactatcgggaccttccatgccatctgcctggctctgctgggggatgtggggctgatcggccaaggggaggccctgtccctggcggaggagaccctccgggtgctgggccggaaggggagcgcacgggcgctgctccagggggtgtcccgggtgaaaaacggcgcgtctctggagacggctggactggaagaggagatctggcaggcctactgtgcccggctggaggagcgggggatgctggactttgatgacctgctcatccgggcgctggcgctggacactgggggccggacctgcttccggcacctgctggtagacgagttccaggacatcaacgagacccagtaccggctggtccgggcctggagcgccagcgggtcgctctttgtcatcggagacccggaccagtctatctacggtttccggggggcggacgggaagtgtttccagcgcctgcgggcggaacggccggagctgcgggagatccggctggtggagaactaccgctccacgccggaggtgctggaggctgccgcccccgtgatcgagaaaaatccgggcggttgccgccgcctgcgccccaaccggccctccggcccggcggtacggatggtgaggagcccggatgccttctctgagggggtgtttctcgccaaggagatcggccgtatgaccggcggggtggacatgctggaggcccaggccctgggccacgagcggacagtgcgggctttctctgacatcgccgtcctctgccgcacccatcggcagctggagctggtggagaagtgcctgcgtcacgacgacatcccctgtgtggtcagcgggcgggaggactttctggaggaccgccaggtgcggggagtactggctttcttccgctccctccaaagcccggcggaccctgcagccctggagaccgcgctgggccttctgtgggactgtcccgccgacctggccggaagggcccgccgcctctggacacagggggcagacttggcggccttggaggaggcggtccgaggctatggccatctagagctttggctggaccgggtgaaggagtgggagccagcggtggagaaggagaagccatggaaactggtagagggctgggaggagcggtacgggacctcgccggccttggagaagctgcggaatacggcggtgttctacccagccttccgctccctctgggaggccctcactctgggggaggaggcggatgtgcgccgggctgcgggccggggctgggagtccggggctgtccggctgatgactctccacgcctccaagggactggagtttcctgccgtctttgtggcgggactgacagaaggcacgcttccccttgagatgcccggccgtccggcggatctggaggaggagcgccggctgctctatgtggggatgacccgggcccgggaggagctgatcctcagcgccgggggcggaccctctcccttcctggacagcctgccgcagggtgtggcccaagagcaggcgggccggaggcaggagcggagactagagcagctgagcctcttctgagacggggagcccccaggtccggcagaatcagtacactggaaaagagagacatctgcggctgcgcccttgacagtgggtgtgtgtcccattagtatggaggagcggggacgaaaaaataaacggtccgggatggaacaaaatcccgtgtcgggtcgtctatacaaatagaaggaacactttggataccaggaaaggaaacgcgactatgaaatggaatcggctgttggccggcgcggtgtgcgcctccctgctgagcgtacccgtctgggctgtggagggcggggaggctccggccgccggggcgggccagacatcttccacggcctgcggggtgacgctggacggagtttgcctggacctgagcgaggcgcccgccgcgccctaccaggagaacggacaggtgatgctcccgctgtggaaggtggcccaggccctgggatggactgtgacctggctgccggaagagaacgggacccgcatcgaaaatgaggatcaggtcatgaacctgacctacggattggaccgctatgcctgcgccagcaagtcctccatcggggctacctcgccggagcactatggagcggcgccggtggtggtggcgggacgtacctacgtccccgcctccatgttccagctgctctcctgcaccgtgacgatggagggggggaccgtggccctgcggacagagggcgcaccacccgcggaggacgaaccgccctccggcggggcagtggagtatcagaccgcagccgaggcggagcaggcggtggggttcccattgaaagctcccggggagctgggagcccctgaaaagatccaggtgatcagcggagcggtggcccagctgaactggccggagggcatcagctatcgggtggcccgggggagccaggaggtcagcggcagctacactgcctacggctgggaacggagccagagtgcgggagaacagatggtgaccatcaaggggaatggggactggacctatctggccgcgtggaaggacgggacatacagccatgctctcgcttttgaacagggcgtgagcgcccagcgggcagtcagcctggttggggacctggtcccgctgtctggggaataagcgcatcaaaaaggagggagccccgctccgccggcaccatggccggcggagcggggctcctttgagaaagaaagggggctcagtccccctgcatcacagtcagggcctggcggcagttctccactacgttgatctcgtggctgcccccgtactccccatccagcgtccagggaatgggcttttcggcggtgaacttcagatgggaggcgtggaaggagagcacggcccctgactgggggggctcctgtcggataagggcctggaggctgtcagtgaggtcggtgatgctggtgggcttgcggaccagaatgacctcaaacagcccgtcatccagcaccacccggtctgtaggcagggccttcattccgcctacggagatggtgttgcacaccattccgtaaaagaaatcgtcctccagcacctggtcgtcgcactcgatcctcaggtggtagggggtgatggaggggagggaggcgatgcccgccatcacataggccagatggccgaaggtgtttttcagatcctggggggtgtcgtaggatacctcggtgaaggcgccgaaagcggccacatagacgaaggggcggccgttgagcctgccgatatcccaggggcggggaacgccggtctctgaggcggtctgggcggctttcaccgggtcccggggcaggcgcagggtggtggcgcagtcgttggtggagccaaaggggatgtaacccagcaccggcggatggtccagctgcatcaggccggacaccgtctcgctgagcgtgccgtccccgccggagcagaccacccggtcgaactggccgcccagctcggcggcgatgcgggtggcatccgccttcccctgggtgggatagacggtggtcaggtagcccgccttggtaaagacatccagaacagcggccagatcggccgtcacccgccccttgccggcggtggggttgtagagaaaaagcatggttttcaaagctggggcctcacttttttatgagattggcgcccggagcgccccgtccttggactccccggatgctgctgattacgaattattataaggaatgggacggaaaaaacaagggaaaatttgtgaatctttatgtcatctgtacaggagaaaagaaaggaacgggcccgttcccggaaaatggcggaaaaagtgggaaaatcccttgcgtatccggccaaaaacgagtaaaatgtggaacgcaacaaacttggtgcccggcggaggtgtgtgctgccccgtctcagcagacggcaccaccgctatggggtgaatgaaagagatggatcgaaacgtcctctccgccgctttccatgtcaccattccggtgctgatgggctatctggccatcgggatggccttcggcctgatgatggattcggcgggatacaatgtgttctgggccctgctgatgagcctgatcatctatgccggggccggacagtacatgggggtgactctgctggctgcgggggcctccccccttcagacggctctgatgaccctgttgctgaacttccggcacatgttctacggcctgtctatgctggaaaagttccgggggatggggctgcggaagctctatatgatcttttccctcactgatgagacttatgcgctgctggcgtccgccaaggcgccggagggggtgcgggagaaggactactacctggccattgccctgatggaccacagttattgggtgctgggcacggttctgggctccctgctgggcagtgccctgtcctttgacaccaccggagtagacttcgccatgaccgccctcttcatcgtcatcgcggtgggccaatggaaggggacccggaaccatctgccagctactatcggctgcctggccaccctggccagcctgcggctggcgggggaggataatatgctgatcctggcgctggtggtcatcgtggccgccctgctggtattttcccctaaaatgccggaggggcaggccctgcacaaggccgggacaggaaaggaggagcggacgctgtgaacggagagaccacacgggatctgctcctgatcctggtgatggccgtggtgacctttgccacccggctgctgcccttcctgctctttgaccggggggaggagccccccaaggcggtgctctatctggggcgggtgctgcccccggccatcatggccatgctgatcgtctactgcctgaagggcgtcagctttgccaccccggcggggtgggtacccgccctcctctcctgcggggcggtggtcctcctccatctgtggaaggggaacgatctgctctccatcttcggagggacgatcctgtatatggccctggtccagggcgtgtttgggtaaggaggagcggaaatggaagactgtttggccgccctgcggcaagaggtggaccgcctggacgatcagatcgcggagctgtttttgaagcgcatggaggtgaccggccggatcggggcctgcaaggaggagctggggctgcccctgatggacccccggcgggagctggaggtgctccggagcgcagcggcggagacgttggatgagggccggaaactagagctggcccacctgtttgagactgtgctggccctcagccgccgggacctgcggcgccgggtgggagggaacgatcccggtccgggatacagccgatgccggagggccgaggccgccgcgcggcagccggtggagagacccagggtggtttatcagggcgtggcgggggcatacagcgagatggcctccctgcgtttttttggagaggactgccggtgccagggcctgcccacctttgaagaggtgttccagacagtggcccagggcggggcggactacggcgtggtgcccatcgaaaacagctccaccggggctatccgccaggtgtacgagctgctgggcaggtatgagtgctacatcgtgggggagaataccgtcaaggtagagcactgcctgatggctccccatggggctaccctggataccatcacccatgtctattcccacgagcaggggctcttccagtgcgagcccttcctggcccggcatcccggctgggtgggggtggcccacggggacacggcgggcagcgctcagtatgtggcccagaccggggatatcaccaaggcggccatctgttccagccgggcggcggagctgtatggcctggagattctggcccggggagtcaactacaacagcaacaacaccacccgcttcgtggtggtctccccggtgatggagctgcgggagggggcggacaagatctccgcggtcctcagccttccggacgaggtgggcagcctccatgaggtactcaccatctttgccgtccacgggctgaacctggtgaagctggagtcccgccctctgccgggacggagctgggagtatctgttcttcctggagtttgacgggagtctgacggacccggcgatggacggtgccctccaggagctgtcccaggcatccgcggagatgcgggtcctgggaaacttcaaaagcaacctgtaaggaggagaggcgatggacagggctgtgcttatcaccggagcttcccggggcatcggggcggcggtggcccgccgctttgcccgggagggctggcgtgtgggggtgaattatcgcacctcccgtggccgggcggaggccctggcagcagagatcgccgccgccgggggacagaccgccctcctgcccggcgatgtgtctgacccggcccaggcggccgctctggtccgggcggcggaggaacagctgggccccctggacgccctggtgtgcaacgcaggggtcgccctgccccagcagctgcttaccgacaccacggacgagcagtggcgccaggtgatgggggtggatctggacggggtgttctacaccctgcgggcggcggtccccggctttgtccgccggcagcgaggggccatcgtcaccgtatcctccatgtggggggtcactggcggctcctgcgaggtggcctattccgccgcgaaggcgggggtcatcggcctgaccaaggcgctggccaaggagctggggccctcccacatcaccgtcaactgcgtggcccccggggtcatcgacacggagatgaacgggggactggatagcgaggccctggccgctctggcggaggagacccccctgggccggatcggcacggcggaagaggtggcggagagcgtgtggttcctggcagggggcggcgcccccttcctcaccggacaggtgatccagcccaacggcgggatcgtgatctgaccgcgggagcgggagagagggaatagcgccgccgaaaggcggcatactgaaatgagacgaccccccgagggagagggcggacccctttcacgccgggtgggtgggaaaggaggtccgtgatgcgcgggaagcggttcgtgtacggctcctaccggggacggaggagcaccacagacgtgttgaagaccatagccctgatcctggcggtactggtggtgctggccgtggccggagtgtggatggcgcagaaatacatcgtctacgacgacgggggttatcacctggagctgcccttctttcaaaaggagggaccggcccaggagccggaggacctccgggtggcggtagagcccgccgcctcccagccggaggagacaccggaggagggagagccccttctggcggcggtgactgttcccctttcagcggtggaggacggctcggcggaggcgctggccgcccaggcaggagccaacagcgtcctgctggacatgaagacagaccggggccagctgggcttcgtctcccagctggccatggccgcctcggcgggggtcaacgccggacaggcggacatcaaccgccagctccaggccctcaacagcggggaactgtacacggtggcccgcctgtcctgcttccgggaccacgccctggccaaggatgagacatatgccatccggaccaacagcggctaccggtggaccgatccggaggagctgcggtggagcagcccagccagtcaggcggtccaggactatctggtcgctctgatggtggagctggcccagctgggctttgacgagatcctgctggacaactggggctatccggcggagggaaatctgggctatatcaagcagggggatgcctacgacctggagcacctgtcccagccggtggaggagttcctcgccagagcggaggcggctttggagccctacgggacgcggctggcccttcggagcacctgggcggtgctggagggggatgagagtcccggcggccagacggcccagctgctggagcggtatgcccagcgggtctggctggaggcgccggaggacggtatggcggacctgctttcccaagcggggctcccagaaggagaggagcggctggccctgctggtggaagagctggacccagacctggactgttcccaggggatctgggacccggaggcgtgaactccgtacgaggaaacaggcaaggcgtctgagtgagagctcagacgccttgtttttctcccaaagagggcggagccatgtggctccgccctctggaagatagaatttacgcg

SEQ ID NO: 13621 - DNA, 49868 bp, Unknown
  gut microbiota DNA sequence
ggcatgggtgtaggaggagggggtgggggccgcctcccgggcggcggcgggggcttccccgccctgctgcttggccagcgccttggcgttggccagcatcagcttgatgcggttctcctggttgatcttggtggcgccggggtcgtagtcgatagccaccacattgctgtacggatagtcgtccttcagcttgcgcagcatgcccttgcccacgatgtggttgggcagacagccgaagggctgggtgcagacgatgttgggggtgccggtgtggatgagctccagcatctcggcggtgaggagccagccctctcccatcttattgccgtcccccagatagccctggatcattcggtgcaggtcctggaaggtgcccggtgcacggaagcggccggagcgctccagcgcctggatcatgtccttctgacaggcctcgatgtacttcataaagagctggcaggcagccttcttgatccacttgccgccgtacagatccacgtccactacccggttgtagatcttgaagatcatgaaatcggtgaggccggggaccacgggttcggccccctcggagagcagaaagtcctccagattattgttgcccaggggggagaactttacatagatctcacccacgacgcccacccgcaccttctgctccccggtgacggggatggaggcaaagtcggcgcagatggcgtcaaagttggtccgcatctggccgcggctcatccccttaccctgctggaagccctggatcagccggccctgccaggtggagaccatggcgtcagtggcgccccgctcccgctcatagggccggacctggttggccacattgacgatgatgtccccgtacatcatggcgtagaccatcttgcggatgatggggagagtgagggagaagccgggatttttctccagaccggacagattcaccgagatcaccggcacaaaggccaggtccgctttttccagcgccttgcgcagcaggtggatgtagttggaggcccggcagccgcccccggtctgggtgatgaacagggccaccttgtgggggtcatagccgccgtgcttgatggcgtcgatcagctgtccgatgaccagcagggcggggtagcaggtgtcgttgtggacatatttgagcccttcatcgatgatgccccggtggttggaggtgagcatatccaccttgtagccctccagctccagcagacgctggaacatcccgaagtggacgggcagcatctggggcatgaggatggtgtactcctccttcatctccttggtaaagaggagacggccggtgtcgtcatatactagcttcgccatatcaaaatccctttctgccgatagtcgcaataaaatcaggaatggggaacgaaaagtcaggaattgagggggccggctgtgccggcgagtttgaaccggtcccgccggagcgggtcggtcccagttccctcatttctgatttctaattttcttttcgcgcatcaatggccgccatgagggagcggatgcggatcttgacggcgcccaggttgctgatgtcgtcgatcttcagctgagtgtacagcttatccccgtcctccagaatggagcgcatctcgtcggtggtgatggcgtcggtgccgcagccgaaggagaccagctggaccacctgcatgtcgggctgggtgcacacataccgggcggcgttgtacatccggctctggaaggtccactggttgagcaccttccggggggcgtagccctccagatagctcagggcgtcctccgtgaccagcacgaagccgaaggaggtgatcagatcgttgatgccgtggttgatctccgggtcgatgtgataggggcggccgcacaccacgatgatgttcagcccgtgggagcgggcgtagtcgatgtattccttgccggtggcgcgcacgtcgtggacgtaggcctcataggcctcgtaggcggcccgggcggcggctgccgactcctttttggggatgccgaactcctgatgcatcagctgggcgatgcgcttgccgaagtccttgtgccgccacaggcccacataggggtccaggaaacgggtctgctttagagagggcacgttggcggcgatcagctcggggtagtaggccaccaccgggcagttgtagtggttgtctccgatgccctcgtcgttgttgtaggacatgcaggggtaccagacagcgtccacccccgcctccaccagggcctccacgtggccgtggagcagcttggcggggtagcacactgtgtcggaggggatggtgcgctgccccttgagatacagcttgcgggaggactcaggggagaggaccacctcaaagttcagcttggtgaagaaagtgaaccagaaggggaggttttcgtacatgttcagcccgaaggggatgccgatgcggccccgggaaccgtccccctcccccttgccgtggagagcacggagcttctgatacttgtaccgcatcaggtcgggcaggtggtggggctcctcccccagggggcgggagcagcggttgcccgagataaagcgccgcccgccgtcgaaggtgttgacagtgagggagcagtggttggtgcacagaccgcaggtggcaggcttggcggtgtgggtgaacttctccaggtcctgggaggagagcagggcgctccgctccaggtgcaggtcccgggcggccagagcggctccgaaggcccccatgatgccggcaatggtgggccgggtcacctcccgccccagctcccgctcaaaggagcggagcaccgcgtcattgaggaaggtcccgccctggaccacgatgtgctggcctaagtcgtcagcggaggcggcccggatgaccttgtagatggcgtttttcacgatggagatagacaggccggcggagatgtcctccacgctggcgccgtccttttgggcctgcttgacgctggagttcatgaacacggtgcagcgggagcccaggttgacgggctttttggcaaacaggcccatcttggagaagtcggcgatgttggagcccagggccttggcaaaggtctcgataaaggagccgcacccggaggaacaggcctcgttgagcatgatggagtccaccgcgccgttgcggatcttgaaacacttcatgtcctggccgccgatgtcgatgatgaaatccacatcggggttgaagtgggcggcggccttgtagtgggccaccgtctccaccaggcccaggtcacaggagaaggcgtttttgatcaggtcctcgccatagccggtgaccgccgcgcctttgatttggatgcggtcgccgcacagctcgtagatttttttcagctgctccaggacgatggagaccgggttgcccaggttggagtggtagtaggtgtagagcagtccgccgtcggcggtgatgagggccagtttggtggtggtggagcctgcatccatccccagccaagcggggccggcgtaagtgtggatgtccgcctctgggggccggctggcattgtgccgggccagaaaggcgtcgtactcctcctgcgtgtcaaagagagggggcatggtgtccgccgaggtgttggtctcccggctctcctccagccgcttcagggcgtcctcaaaggggacgggctcgtaatcggtggcgcacagggccgcgcccatggcggcgaagcagtccccgtcttccggaaagacggcgtgctccccgtccagcttcagggtctccacaaaacgctgccgcaggcccatcaggaagtggaggggcccgcccagaaagacgatctttcccttcagctcccggccctgggtgaggccggctaccgtctggtccaccaccgcctggaagatggaggcggctacgtcctctttccgaccgccctggttcaggatgggctggatatcgctcttggcgaacacgccgcagcggcttgcaatggggtagatcttctcgtgcttcagggagagagagtccagctcgttcaccgacacattcatcagggtggccatctggtcgatgaaggcgcccgtcccgccggcgcaggagccgttcatccgctcctccagcgcgccgccgaaaaagatgatcttggcgtcctcgccgcccagctcgatgacggcatcggtgtccggaatgtaggtgttcaccgcggcggcggtggcgtacacttcctggacgaagtccaggccggcagccttggccacccccaggccggcggagccggtgatgaccagcttgacccgctggccgctgagctggcccgagatggacttcagggtctcacaggcccgctcccgggtcttggagtagtgccgctcataggagcggaacagcagcttgttctgttcatccagcaccaccactttcaccgtggtggagccgatgtcgataccgatgcgcagactcataaatcaagaaactcctaccgttgggacgccataaggacccaaaataatcacttctaatgatagtgcaggcgcaaaaactttacaacaatcttaacggattcttaacggctgaaaacgcaggaaatacgacttttttatgccggaaatccgtcaatttgacaacagggggaaaatatgccgcctcccacaggcacaagggccggggggaggcggacggggtggcgtcaggatatctttacgcccacacaagaggcgcgaggccaggagacagtggctgtcaagcggcccgatcccgatcctcctgccggtcactgatctgcaccagagcgtggcacatttccctgctggacagggagagacggcccagctccccaccgccttcgccgcagaagatcaggcaggagtcatagtacagctccacagggtccagggtaccgtcctggggattactggaggacaagagctgccgcacctcctccaccaggtcggcgtcccggatggaggcgtaccgtccggtgagagagccgaagtatgccgcaaaggaatgggcttgagcagccacggtggagaggtcctggagccaagacagctcctggacccattgggcagttccgctggggagaagggccaggggaagcggaccgttctcttgggcaaggatcagacagcagttccgctcctgctcagcgagatagaagactgcgccgtctcctggcccgccggaaatgcggagaaagggaacagtatccgggtcaaagttcacggaatcggtggggtgcccaccgccggaaaggaaggtgaccagctgtgccctggcctctggggaggagatgaggggcgcagtgctgctgtaagcgcgccccttgcagcactggacagcgtcggcctgccggatggcggagagcaggtcatcctgggtctgaatggagggggactgagctgagagacggaggagctgaggaatggtgctgctgggcagggcagccacggggacggccccgctggccgccccgtccagatagggcaggacatagaccgggccgttggatgagggatagaggtagaaatacatccagtcctccctcatggagagggccagttgataggaatatggagccatgtccgagaacccgaaagctgtcgcatccctgctgtcgtcatactctaccgccttgagcaggaacgaccgggcctcctccagggcaccctcctcctctatgggaggataccccgcgctggagactggcggcgctgtgagatggatggaccgagcgtcctccacggccgccgcatacccggcgtagctgtatggggaggggggaccgcccccgaaggcgagcaccgccgccagcgtcaggagcaccgccgctgcggccagagcggctttttgggggcggtccctcttcgccagccgggccacccgctgctggatggcctgcctgccatccgccatggcggacaccatcagcctcacactcccacgatagatacggtccaggaaggagcagacctccgactttgctgcctcctcccgccgcacacatgggtgatactgcgtgtcccggcccacgggtgtgctgcggaccagtcccttggcctccatctgctccagagtggtgatggtggtgctcttggcccagcctgcccgctgggagagatcggtggccagctgcatcactgtctgaggcgcatacgcccacagacaatccatcacataccattcgctctgagttagacagacttctttccgcaccaccatcctgtagaccctccttttgtctattgtatagactgattatagtaaggagggtaataaagtgctaagtaaaatacatgatacccctccgcttatttctattttttaattataccacaaataaaggagttatgtcgaattattcatgtgcgttccaaggtatagctaaaaagcaagtgtactttttgtttagtacacttgcttttcgcaaccttgtttgtcaatcgtcaagttaatgataatttctacttccttatcactataaagtcaggcttttggagctttttctttgcaaaggacggttaaaatcgatattttgaaattttaaagaggtataggagaaccacccaaccggccctctgagccgcgccgcttttttgcgcagacgggacagccgcttccgcaaaacctgttgtcgggggatgcttgccacgcatggccgcagacgctgcatttccaccatacttttttgttggaccgcgcagaacaatcttgcggtgttttggtgttcttcccataattccattccccaagcaggtcaggccgtgcttccgcgacgctgcccaaccttttggagcgatccgcacaatagggacagttatgtcctctccggctccggttggaaacagaggctttccattcatgccccttctcacattgccaccaaacattccttccgcttcccggcgtcacatcccgaggtgtcagccccttatttctctccgggtgccactgggcggcaatggcagggtaacaggtctgcaaacaatattccttgcttgggcgatggcctgagcaatatgggcagccatccccgcggatccgcttgttgatggtactctgccaaacatgccccttttcacattgccaccaaatctttctcccggactgcgcagaaacctgatccggtgtcagcaacgcgttttttgagccgtcccactgggcggcgagctccggatgagtcacagacaggcgcaggtgcgggtagcacttgaggtattggccacggggaatcccctcccctttccgctgacgatctttgatgctcgcctgccacacgaactccccgcgccgccaccaatactttttgccggagcaatagagcacttgatccggtgtcagtggaaaattgagtttgtggtcccactcccgtgccagctccggataccgcgcaagcagggaattgtccccgcaaacagcccggtcattgcaataggggcaacgctttaaaggtaccagcttgttgagatggctgggatcacattgccactcatgacctttttcacatttccaccaaaattttttatttgattgacacgctatctcactgggcataaccggcaaattttttgtggggtgccagatctgaacaagcgcaggatccatcggccgcattgggccgcatcgcgtcacggtcctcggatgacatatggggcatctgctttcgcggggattggtgcgggaacagatggctgccttccaaacatgtccttctgaacatgcccagtatacttctttttcagagccgggaactacatcataaggcgtcagggggaaattcaactcgggatgccattgagcggcaatttccggccggagtactgccaggcagtttttctcatatgcccggagattggcacagaaagggcaatttgatttatgtttcgttcgattggaaatcgttgcttgatactcctgctgacactttgggcagtgccaccaaacttttcgaggcgagccgctgaatacagtatcaggcttgtcagtattgcgggcgctccactccctcgcaatctctggatattctaccgccagggtgcgtttctttcgctcatgaaaatacatttggttgattgcatattgatcccgccggtggtgaaaatcaagcggcggcaaatcaagataggaaaatacagcagcgatcatttggtcaagataccggtctcgctcgtcaaacctgtacagaatttccgccttttgaatcacaatcggcccagccagttccctgctgtcacagatgcgaagcacctgataccccgcctcccgcagagcgcggtctttccgttccgccctctttctggctgccaaactgctgtggtaataatacccatcatgttccagcaccaattcgcgttcaggcagaaaaatatccattttatattttcggaatggctcctcacaggtgcagctcgggcaggcctgccgcaaataatagaataatgcgcgcgcgggataggacattttaaagtcctttgcacattggggacagcctcgtcccaacgacgtccgattggagattcttgccaaccatttgtgcgagggattatacatgcatttccaccaagctttttggttgctgtgcggtaaaaaatcttccggcttttgcccgctgtttaatacatagtcccactccacggcaatttccggatatttttcagccagattataggttgtggacacacgctctccggagcagtaggggcacaccggggctcctgattttcgtgctttctctgctgtttcagcgcgatcacagattatggccttccaccgatggttttttgcacagtgccaatagacgttttgatttgaatggggcaaacagctttccggcgggaatggttttttttcgctgtcccattcatccttcaattccgggtactccgtcgccagattgtaaaacgggctgggttttcggtgttcgcagaagggacaggtttggaccaccggatgccttgtggcatgattcaacgtgcgctgccatgacagcccacagacatggcagcggaacctcacacgctttccggcggaaaatccgatttcttcaggagcgcacgggttgttcccttcctgataaaaatggagcagcagataggcgtgattttggatgcaccagtctcgaaagctcattttaggcttcattcaatttgctccttcatctaatctgattgaatacgggcttcttttcgccgctaaaccgcgcccttagatcacaacagtttgttgaaaaagggagtttatttgcgtatgcgctacaatccgatttattgtctcagaagaaaccttatattggcttgcgtaggcctcctcacaaaatagtttatattccgacatgcctcttctattttctagaaccattttaacgaatagaccgcagcaggtcaaggcagagtgaagccgcccccggacggtgaagcccaaaaagaaagacatgacctgttggtcatgtctttctttttggtacggccgaagggactcgaacccccaacattcagaaccggaatctgacgctctatccattgaactacggccgcatattaagaagcattttctcaatgcgctccgttattatagcagggatcttccaaaatgtaaaggggatttttcacttttgggggattttctttcccacgggagggagttgccccggcgtgagccagcggatggaggaggcgcagcgggcaggagagcagacggcggcccgccagccggggccggagaacagggtgaagcagacggaaccgaaggggagacaggcgccggaagggaggatctgccggggaagggggacggggatggcggagatgggccgagtcagacccagaccggtgaatttgcagaagctctccttcagggtccagagctgggtaaaggcctccgggtcgtctcccagccccagcagccaggcccgctcctctggggagagcaggcggtcgagaaaagcggaacgccgcagggtgatctgctggatgtccacccccacctcgtcccggtccagggcacacagggcccggggtccgctgtggctgaggttgaagcggagctgggggaagtccggaaaaaggggctttccccgctttccacgggcgatggagggcagctgctccagatcccagtgctcccgcagtcccacagccagaagcccgtaggcctggctccggtgcgtcatgccgtccaatccgtacagcaccatggtcctcacctcctgagagggattttaccacaccggcccccaaaagtcatgccgaaaatcaggacaggtcggcaaagagcaccccggcaggcgggaaaaaggtgaacaggaggatcagcgcccccagaaggaaagccaggattgcggggatgcgccaccgccagccccggaagggaccggagaagcggacagggaaccagaatccgaaggccatcagccccagatacagggcgatgtccagccacagggcgtggagggcgagcgccgcatggagcagcaggcccaggaccagcatcaggggacacaggatgacaagggacagcagccaggggcgcatcccggtgggacgcccccaggcgaggaaggcggatgccgccagataaggccagtacaggatcttgatatgctcccacaggctctcacagacgggagacagaagggcggagagggtacagggaaatctggcatacaaaaagtggaggcccacgcccgccagaacggcgcagacaaataccgggacgatcagctttttgggataaaacatggatatgcctccttccatgagaacggtcctggagcattgtatggcgcgtcaaaaaaattatgcagatgccgccgtataatccatgaaaaagaaggggagattaggaacgagaattttttggatcgcggaggtgtgccatggatatgacgaatcaggactatggaaaactggtcaaccaatactctcagtcctcccctctggggaaaaatatggtgtgggcctttttggtgggcggcgctatctgtaccgcggggcaggggctgtccaacctctatcagaactgggggatggatcaggatgcagccggcggcgccgtctccatcaccctgatcctggcggcggcgctgctgaccgggcttgggtggtttgacaagctggccaagcgggcgggggccggaaccctggtgcccatcaccggttttgccaacgccatggtctcccccgctctggagttcaaaagcgaggggctgatcaccggcacagcggctaagctgttcgtagtggcggggccagtgctggtgttcggaatcagtgcatcggtgctttacggactgatcttgtgcatcttccgcggataatatcagcagacgccgtcccaatcgagagacggcgtctgctgtgtgcgcaaaagaaatttttgacagttcgggaagagaactccctgtaaaaaatggaggtccctgcgcctgaggcatttccgcattttccatggaaggagtggaaggtcccgccatggtttttcggcggaagggatggccataatgagtgtgtggacggcgccaagggcagtccacgacatgatttttgaaaacagggggtgaaattgatggagcaagagacaaagcagaagccatggaccgggatcgctgccggggtcctggtcctgtgcctgatcctgagcctggcactctccgacggcggagcgcgggcggcctcggcgggggcggtgctggagctcccccggagcggcggaggggctcagccggtctcaggcgcccaggtgggggacaaggtggtccccctgggccgggcggtgggaatcaagctgttttccgacggcgtgctggtggtgggcctgtcggcggtggagacggacagcggtccgtccagcccgggccggacctgcggcctgaaggcgggtgatatcatcacccacatcaatggtcaggaggtcaacaccatcgaggaggtccaggacatcctgggtgatgaacagggggatgccatgaccctgcgggccacccggaacggaaagccggtccagctctctgtccaggctattcagaatacccagggcagctatcagctgggcgtctggctgagggattccatggccggaatcggtaccatgaccttttatgacccggacagcggggtgttcgctgccctgggccacggcatcaacgacgtggatacggccacgctgatgcccatggagtcagggagcattatgtacgcttctgtgaccgatgtaaaaaagggagagagcggcgcgcccggagagctccatggcagctttgacgtgaaccgggatctgggcgatctgtatgccaataccaatctgggcatctatggcgtcctgcgggacggagcgctctcccctcgcggggaggctgtggaggtggccgcccgggaagaggtgcatgtaggaggcgccaccatcctgtccaacattgccggagagcaggtggaggagtatcaggtggagatcactcacgtttaccccgcagccgcgggggatacccggaacctgatggtgcaggtcaccgacccccggcttctggaaaccactggaggaattgtccaggggatgagcggcagtccgatccttcaggacggcaagctggtgggggcggtgacccatgtcctggtcaacgatcctacccggggatacggcattctggcggaaaatatggtctcccagtgtgtgtgggaggagcaggcccaggtctcctgagtgccggcgttctgtcgaaaaaagcggaagatacccgaaaagttgatttccaaaaaataccaaaaacatcttgcatatgctgtctgattatgataaattattggtgaccggtcgaaaccccataagggaaaaacaagggcaggtgcggaagcctgtcggaagggatttgattgtgaaaatgggtgcaaaacggattttggtcgccgataccggggaagaatttcgccggagctttatcgagaccgtggccagcgagcctgacatccaggttttgggagagacgggagacgggcaggaactggtccaaatggtaaaggagatggctccggacctggtagtcatggagatcgtgctggcccagatggacggcatcgaggtgttggaggagctgggaaagctggagcatcggcccaaggtgctgatcctgtccagttttgccaagggaagcatggccgagctggccgccgccaagggagcggaccactatatgaccaagccctgccgggtgagcacggtgtgtgagcgcatccggcagctgaccggcgaaaataaaaaggaagaaaatggagatatcccctataatttggaaaatactgtcacctccatcattcacgaggtgggggtgcctgcccatatcaagggctatcagtatctgcgggaagccattctgatcgcagtggccgatatggatgtcatcaacgcggtgaccaaggtgctctatcctgaggtagccaagcggttcaataccaccgcctcccgggtggagcgggccatccgccacgccattgaggtggcctgggaccggggcgacttggagacgcttcaaaaatattttggctatactgtatccaatgtgaaggggaaacccaccaactcagagtttatcgcaatgatcgccgaccggctccagctccagcagaaggagatgtgatgcggggcggcaacaggcgggggatcgcagggaaagatcctccgcttgttattttttccgccgtctggtatagtagcaggagcggcccggatgaaagagagcccgggccggaagatcagggaagggaggtgggagtccatgacgatccgctatcagcccaggggcgtgtgcgcccggcagttcgagatccaggcggaagatggaatcatccagtctgtacaggtgacggggggatgcagcgggaatctccagggcatctccagtctgctgaaagggatgccggtgcaggaggcgatccagcgcatggaggggatccgctgcgggatgaaatccacatcctgtcccgaccagatggcccaggcgctcaaacagttcctgtaaaagagaaaggtccgcggatcccgtctgtgagacgggcccgcggacctcttttttgaatcggtcggcaggtcagcggcgccgccggccatgatagctgccccggcgcccgcctgctccggcgcccgctcggtaacggcggcgcttacggaagaccagcaggcggagcaggacgaggacggccacgaccaggactgcggccaggatcagcttcgtaccggagttggcaaaaaactgacggatctgctcctgccgatagagcagctcggagcgatccacagaggtggtggccaccaggtccagggtgccgaatacctccccgtcgtaggtgagggtcatggtccccatcacctgcccctccttcaccggggcctctaccgtgtcttggaacagggaaatggtgggctcaatggcctccaggtccatatccaccgggagggtgcgctccagggtgcccaccggcttgaccaggacttggttggcgtcctgggacagggtgacgttcactgcggccacgggggtgtcctcctgggagatggtggtgcgctggaaattccggaagccccatttcagcagggcggtgctctccgagaactgcttcaggtcggtggagccatcctcccggaccgccggctccgctcccaggatgacagcgatcagatactcatccccgtccacggcggcagagaccaggcagcggcccgcctccggcgtggtgccggtcttgacgccgatggccttgtcatagacatagcccatgtagtgccagttggagaggagggcgttggtgttgtagaactcccggggctcagacaggttggtggcggggacggtgtagaccgaggtgcccaccacctcccggatcaggtcgtgcttcagagcctcgcgagtgaacaggcagatgtcgtaggcggtggtgtaatggtcgtcgtcgtgcaggccatgggtattggcgaaatgggtgccggtgcagcccagctccctggcccgctggttcatcagctcgataaaggaggctacgtcgccgcacacggcctcggccaggatgttggccgcctcgttggcggaggggaggagaagacagtacatcaggtccttcaccgagatgacctcccccggcttcaggttggcggtggagccgtcggcggagaggtcgaactgggaggtgctgctcaccgtgatcatctgatcctgggacagctcgccccggtcgatggcctccgacaccagcagggcggtcatcacctttgtgatgctggccgggtaggccttctcccgggcagccttctcgtagaggatctcaccgtaattggcgtccatcaaaacggcatggcgggaggtgatgtggggggcgtcggccgccagggcggagaagggggccagcagggtgagggccagcacaaaggtgaccagcagggaagaaagacgatattttttcataggaaaatcctcatatttatgatatactaccatcagcgcgggagcagagcgctcccgctcctggtgagattataattacaatcattatagcaggatctgacgaattccgcaacagctgggagggaacaacttggccgccatgaccagatttgacaagatcgttctggggctcaccgccgcctttctggtggtgacggggggctattttgtctccggacagctgggggaggcggagtaccaggtgaccgtctcaaaacaggcgcctgcggtcagcgcctccttgccggaggtggaggacggctatccggacagcctgctggagggagaggtcatcgatctgaataccgcctccgccgccgacctgacccggctgccggggatcggggagaagcgggcccaggccatcgtggactaccgggagagcagcggccccttccaaagcgtggaagagctcactgaggtgaaggggatcggcgagggcatcctggcccaggtatatgactatgtgacagtggggggaccggactcacccgctgagtaaggagaaagacgcaatggcaaagattctgatcgtggacgacgagcgggtgctggtaaagggcatcaagttcaatctggagcacgagggctaccaggtccaggacgcctatgacggagaggaagcggtggagctggcccgggaggggggcttcgacctgatcatcctggacgtgatgatgcccaagatcgacggcctccaggcatgcatgcgcatccgggagttctccaacgtgcctatcatcatgctcaccgccaagggggaggacacggacaagatcatcggcttcgagtgcggggcggacgactatctcacaaagcccttcaacatcttggagctgaaagcccgggtgcgggctctgctccgccgggccggggctgcccagcagcagcgaagcggcaatgagctggccgcaggccacattatcctcaacacgggggagcggacggccagccgggacggggtctccgtggagctgaccgccaaggagttcgacctgatggagctgctgatgcgcaaccctggccgggtgtacagccgggagaacctgctgaacgtggtttggggatatgagtatatcggggatttccgcaccgtggatgtgcatatccgccgcctgcgggaaaagctggagctggacccggccaacccggagtatatccggaccaagtggggagtggggtactatctcagcgcccgtggcccgcgccgcctggaaaacgtttgaggaaaggcgtgtggaagagatgtcaaagcgagaagaacagggcaaccagggtgagccatccctggaggagctgggccatggagtgggatcgcccttttggggggagctgcacagctttcttcgggagtcctatggggtctcccccactgtggagtacagcgggtgcagcctggcccccggctggaatgtaaaatatcgagccagaggacgagcgctgtgtaccatctatccggataccggcacctttacctgtatgatctccatcggacaaaaagaagccccggcaatggaactggtgctccctggtctgaccgcctatgtgcgggaggtctatcagaattccagacccagccgaatggggcgctggctgatgatccgggtatcgggaccggagatcctggaggatgtcaaaacattgctgcggatccggatgccggtccggggagcgggaaacaaaggctgaaaatatccggcttgcgggaaaagggagggagcgctgtgcgggaggaaaagaagaaaaagaggggcagagttccgtttttttcctccatccagatgaaatacgccatgagctacctggccatcgtgtcagtggtgctgattctgctgaacacctacccggtgctggcctcccaggacctgctgtttggctccaagcgggattcgctgaagagccaggctgcggtgatggcctctgccctgatggagctggagctgctcacctcggaccaggtggagcgggtcatgaccatgctggacagcagcggcctgacccgggtagtggtcaccgaccccgcagggctgattctgtacgacagtacccagcccagggagaagcgtggggagacagcggagaccgccccggtccaggaggagccggaagaaccccagtaccgctatgccctctatcaggaggtggtgctggcccttggggggaatgacgtgacctgctccgagttcagcggccaggtgttccgttccacggcggcggtccccatcgtgtaccgcaatatgaccatcggctgcgtctatatctgtgaggaggacgcggtccagggcgcgctgttgttgaacttacagaaaaatttgcggagcatctccctggtggttgcggcggtgaccctggtgatgagcctgtttttcgcccaaatgctctcctcccgctttaccgccctgctcagcgccatccgcattgtgggggagggggagtatgggcaccggctccagccctcgggccgggacgagctggccctgctggcggaggagtttaaccagctcactgaccgtctccagaccacggaggaggtgcgccggcgcttcgtatccgacgcctcccacgagctgaagacccctctggcctccatccggctgctggcagactccattctccagaacgagaccatggaccaagtgaccctgcgggacttcgtttccgacatcgggacagaggcagaccggctgacccggatcaccgagcacctgctggccctgacccggctggacagcctgccggcggcagagaccttcccggtggacgtgtcggcggtcacccggcgggcgctgtccatgctggcgccggtggcggacgcggctggggtggccctgggatccaatttgaaggataaatgtgtggtccaggggacagaggacgacctataccagatctgcttcaacctgctggagaacggcatcaagtacaaccggccaggcggccgggtgatggcggacgtgtaccgggacggggaccaggtccttctggaggtatcggacacgggggtgggcatcccggaggaggacatgcccaaggtgttcaaccggttctaccgggtggacaaggcccgctcccgggccgccggcggcaccgggctggggctgtccattgtccgggacacggtgcgccgccacgggggatgggtcaccgtccgggcccgccagccggagggcagcgtgttcacggtgggctttcccgctgtgccggaaaaacggaaggagggagaccggggatgaagcggtggacgatgtgcctgctcctggggctgctgctcctgctggggtcctgcagcactgccgcggagaagggcggataccagctctatttcgcctccggtctggaggacggcagcgccatcctcagcgagccctaccagggggaggcggacccgggccctcgggaattgatggaggctctgctctccggtcccacggaggaggagctgaacagccccttccccagcggggtgtccctgcggagctgggggctggaggagggggtgctggtcctgaatctgtcggagcagtacggcggactgacggacatctccctcaccgtggccgactactgcatcgtcctcaccatgagccagctggacggagtggaggcagtggagatcaatgtggccggacagccggtgagctaccggaaccaccagatcctgactcgagaggaggcggtgctctcccagccggggcaggggcaggaggccacgaatgaaggggcttgacaaaacgggcggacccgtttaatctaaactacattgtaccgaagagcggcgccgccgctccggagagaaagaaggaatcagagcatgagtcactatcagatcggcaccaactgcctgcatgcgggctaccgccccggaaacggggagccacggaatttccccatcgtacaatccaccaccttccgctatgagaccagcgaggagatgggcaagctgtttgatctggaggccagcggctatttctatacccgcctccagaaccccaccaacgacaccgtggcggccaagatctgcgccctggagggaggcaccgctgccatgctgctctcctccggccaggcggcctccttctactccattttcaatattgcctcctgcggtgaccatgtggtgtcctcctccaccatctacggcggcacctacaacctgtttgctgtcaccatgaagcgcatgggcatcgagttcaccttcgtggacccggactgcaccgccgaggagctcaatgcggcctttcggcccaataccaaggccgtttttggggagaccattgccaacccggccctgactgtgctggacatcgaaaagtttgccgatgcggcccacagccatggggtccccctgatcatcgacaacacctttgctaccccggtgaactgccgaccctttgagtggggggccgacatcgtgacccactctaccaccaagtatatggacggacatgccctccaggtggggggggccatcgtggattcgggcaactttgactggacccgctatccagacaagttccccggcctgtgcaccccggacgagagctaccacggcgtgacctacaccgagcggttcggcctgggcggcgcctatatcaccaaggccaccgtccagctcatgcgggacctgggctccatcccctccccccagaactgcttcctgctgaacatcggtctggagacccttcccctgcgcatggccaagcactgcgccaacgcccaggcggtggcggagtacctggagaagcaccccaaggtggcgtgggtcaactacgccggcctgccgggcaacaagtattatgagcgcgcccggaagtacctgcccaacggcagctgcggcgtggtctccttcggggtcaagggaggccggagcgcagcggagaccttcatggccggtctgaagctggcctccatcgccactcacgtggccgatgccaagacctgcgtcctccaccctgcctcctccacccaccgccagatgaacgacgaggagctggccgcggctggggtagcccccgacctggttcgcttctcagtgggcattgaggatgtgaaggacatcatcgcggacctggagcaggcgctggccggggtgtgacaggcgtcccagctggaccctgaatgccgaaggatgggaaaactgccggagccggatcttccggctccggcgggaccagaaggagggactgtcatggcaaaggaaacagttttgctatacaactgcgggggcgatgaatttaagacgctgcgggctctgctcatgatgctccgggtccgggtccgcatggtggagccttcccggtaccacctgcccctggagcaggtggccgccggaaaaggcgaagaggacccgaaacagcaggcggatatcccggaagcgatgatggtcttctgtgacctggggcccggcaggctggaccagctgctgaacaccatgcgcaggacggagtttccgcctgtgctcctgaaggcagtgctgactcccaccaaccggacgtgggattcccgccagctctggcaggagctgcgccgggagcacgaggcgatgcggggcggtcaggaaacccagtaaaaatccattgacaaacccctgtaaaaattgtataataattaagcggttctgaaagagccgctgatttgcggctgtgctggaattggtagactggcaagcttgaggtgcttgtgtcctatgggcgtacgggttcgactcccgtcagccgcaccaccagaaaaccccggaagtccttggcttaacagtgataaggaactaatttacttatcaactgttagctgacggtttccggggtgcatacagacaaatcccgcctgatttctaacaggaagtcagacggggttttttccttataatgaattatggaggacataccatgaaagccttaatatcttgtgcctacaatatggataactgctgtgtggaactaaaatttagcgatggcagcatgattgcaattgatacgattgccgtggagaatgaggttgcacgtaatatgtacgagcgttcagagcttgactatctgatctacaacgctcctttagagtatgcagaccttatcttgaacggtgatccagaaacgtatttgaaaaccgtgactgagtataagtctttggatagctgaacattttcattgcccgtgggaaaaatcctgcgggcaatttttgtagcttttccgtgaactctattgactttccgtgttacaagctgtaaaatataaatgcgtactacagattgtaacacaggaggtgtaagtatatgtctgatttgaaaatgggaactgctgaggctcattttgccgatattatctgggaacgggaaccgataacatccggtcaaatggctaagatcggcgcagaagaatttaattggaagaaaagcacttctcacacggttttgcgccgtctgtgtgagcgaggcttgtttaagaatgaagatggcacagtcacttcgttgatctcgagagaggaatactatgctcggcacagtgagcagtatgtagaggaaaccttcggcggctcactgcctgccttccttgctgcgtttggaacgagaaagaaactctccgaacaggagattgatgaactacagaaggtcattgatcgaatgagggggtaacgctatgtttttctacacatttatgcccaatctattcaatatgagcttaacagcaagcgtagcgattgctcttgtcatattgcttcgtttgcttttgaaaaaagcacccaaggtcatttcctatgcgctgtggggagttgttctgttccgacttttgtgcccggtgtccatagagtccagtttctctctatacaatctttttgatgcgccaacagaggagtcaggcacgataaccagcgttatcgaatatgtacctaataacatcgttcataccgagtaccccactgtgactctgcctgtccccggcatcagcgatgcaattaacgaggtgctgccgcaaggacaggagcaattggttgctgacccactggaagccccaatgtcatttgcaacctatgcttggatggctggcgtattaggcatgactatttatagtatcgtttcctatgtcaaattgcggcgcaagctgtctgttgtagttccacttcgagataatatcttcatcgcagatgacatcaagtctccctttgtggtcggcctgttccgtccgaaaatctatctgccctgcaatctcggagataaggaacaggagtatatcattctccacgagcagcaccacatcaagcgactcgaccatgttatgaaagcacttgcgttcttggctttggcaattcattggttcaatccgcttgtctgggtagcgtttattctggcaagcaaagacatggagatgagctgcgacgaggctgtgatccgtaagatcgacggcgatgttcgggcagactattccgcttcgcttctgtctctggccactggtcggcgtatcatcgccggtactcctctggcctttggcgagggcgataccaagggacgcatcaataacctgtccaaatggaaaaagcctgcggtgtgggtagtgctgctggccgtggctgcctgtgttattctttcaatcagtcttttgacaaatcctgctgcagagcgtgagtttcccattaacggcaataatgtgtctgagcttgatacagagatggtcgtagagaagattgccaaagccgaagaactggaaaatagctcacaactttttgtcgatgcggataactttgacctcatgtttacctcggacttcaactgggccaatgatggagcgattcgctttttatatggacagaatcagaaatattacagtgcgcagttgagaatgtttcatgacgataataagtatttcattacagaccgaagtgaatggattgagccggaaaagatatttctgctatcccactatttggatgcgttgaagtatatgccgcaggaggaaatccgccagttgtctccggatgctgatggctattccgtatttatgagacatgagggagctcccagtgactatgatcgcgttctgaagtatagccagaatggtgtaaatgccaatgatggatggtatattcatctggaggtacagccgctgcatgaagttgaaggtggtggctataacggaactggtgatgaagtgattcacctgttttataacagcggagacaaccgaggtgatattgccggaaaaacctatctctatgatggagaaggctttgggggcagttttacaatcaccctctacgaagacggcaccttcacttattacgaaggaatgcttagcagctatatcggaacaggaagctttatgcttgatggcgataccgttatcatgaccgatgacggacatggcggatatgggctggttaaccatttcagacatgacggcgatgacctcgtatttgtcgagcaggattccgacaacttcgtttatgtcaaagtcaaggatggcgagaagttccactgcaccggggaagcattcaaacaaaacgatggcgaagacagcacggtacagattatgcccaaccgcaagctctccctgaatgatgtcatcatgctttcgcagaagggctacgatctgacttggagtgattttgaccagttcaagtacattgagacaggctccgggctgtatattcgcgtctatgagatcaatgaaatgtatgagctttggatcggcggaagttggatagatgaagaccccatgtatatctatctggccttggcggatgaccttgatacacgcatcgacattcgggatggtggcgtgacagattttatcggtgcagatcattcctctgtcctgctatcaaaagcaatcaatgaggcgattctgacagaaaataagccttccaagccggatggcctgtaccactgcgcgagctttgttttgctggatcagaaagaacttagtggcacacccacagttgattcctctgaccatactcagatggtcactgtctacggactggcacttcatcagggattcggttattccggtggaaccttccacgatgtttccggaagtcatataccggttgccattacctttgaaattgtcggcgggaaatatgttctgaaggagtattggactccgcgtgacggctcctactatgttcaggatgtccgagataagttccctgacgaagttgaggacgaggctctggatacgcaaaaatatattctcgcacagaagcagacctgctacgatcagggtgtgcgttacggcggcgtcgatacctactcagcggtggaacatctctttgaggtgattgagtcctctccggctacatcttccagacctgccgattatattgacgcacactccatcgaatatcgggaactcatgtattacggagactatacgctacaatatattttctccaagttccatctggagggcaatcagaccggacttcgtgggcagctcatgcggatcgcactcgatgatctcgcaccggaggctcagctccgactccacgccgagaccggacaggcgtattttgacgagtggagggcaggtgccatccgtgttagtgagcagcacgacatggattggatcaaggcaaaccaaccagccatctggcttctcctccaaatgattgatgaatagtaggcgttatgaaatcaacttcatttggataatgaaaccgctgtatttttcatcctcggaaggatggagattacagcggttttgtattttctgaggaatggtgtcaaactgcatttttacagtttgggtaccattttcgagggaaatatgcgggtgtccagagggatgcaatcccttggctctgggtttccaataggggcgagaagcatccctgttggcacacgattttgcttgcaaagtctagtgtgttataccttttgcgaccgctgacgctggaaaggggctgttccacgccagacagtcaatttcaagtggcagcagaacagacggattttgtgggctgaaaggaacacaaaacgaaggatttagcatgagcagaatccgactgttcgggtgtagttggcataggaaatcttgtagctgtgcggaaagattttctgtgtcaacgggggcgcaagaggtatataaaaacccgccgcagcgatcagctcccgttagtgaaaccaccacggtagctccagccatacgttatccaatgccagcttctccgtggatttcgctctgctctccgacaagaagaaatgctctgctgtctctgtcaaaggatgctctatatcgtcctcaaatccaaaacggtacaacagatattctcgctctcggttgctgattgcatcaagggcggcgtgaagttcttcgtgcgtttctttggcaatataaatctgtgcgggattggtcatgttggaatcgggaacaaaggcatgacgatcccgattttcaaatttcgtcacctcgtccagactgacgatctcgcccatgtgctttgcttcaaaggatgtactctgacttcggatgtagtcgatcatcgaattgcggattgccggagctgcgtatgtcaaaaatttgttgccgccatcgggattgaatttctccacgcatcccatcagtcccagacagccttcctgcacaagatcgtcaaaggtaacgccgagcgcccgattgacttctatctgtgcgctccatatctcatgtgctgtcattcgtataaaccgcatattgttttcaacaagactgttcagcgcatccatgttcccggtctgcgccagcgcacacagtttctcgttatcaactgccgtcatgttcatcttctgttggcttgaccgtgagcagaccgatcaatgcctggttgaattgttttaacgcttcgggggcaacaccatccatgccgctgacgctgcccgtgatcgcttcggcaaccatttcgggtgtgacattcagctttgtcacgtcctgtccctttgtcagctctgcgtacatctgctgtgccgcttctttgctcatggattgtgcatccgagacattggagccgatctctttcttgatttctttcagcatgttcagaaatgtattttgaatagcggtcagatcagcttgatacatcggcatccttgaaacgctgacagtctttgcggtttctgtaatggcttctctatcttcgggatgctgctttgcttctcccatcaacagcgcactcaatgtggcatacatctgattctgtgcggcatatccggcagcaagggtatcatcaaaataatgtgcgatcatattggtcattgcggcgaagtttttgttttccagtaagcgattgacaacctcagcattgacctttcctgtgtagagattttttgccgcctgtaccgacaagccgagttcggctatatcgtaattcatgcggtcgggaatatcggtaacgccgagcaggaagtcggtggatacctcaaattcctttgcgatctttttgatattctcgtcaccgagtttgcctgttgcattgctgataaatctgctgagtgtgctgacatccattccaatttttgcggcaagctcactctgcgtgatcttacgttctttcatcaaatcctgcaaacgctctctgatgttgccggataagtatttgcgctccatgctctgcgccccctttcctattggcatcaatcttttgtttttgacttgatatattttccgctcttgactcttgcatcggcgggcttctctgcattttcggggataatccatcgtccacccgccctctgtgcgccagggatgcggttttcattgcagaggataccgacacggcggtgggaaatgccccatttttctgcaacctcaaaggtagaaagatatttcatcggtattaccctccattcctgtattactttatattatataccacaagtggaataaaatcaatatcataactgtgaacaatcgccgtcctgcgttttgcatttttgcaaaattgcagggcggcttttttgttttcctgcatttgtgcgtgatttttcggtctatagacattttctccgtatattcaagcagacgaacaaaatcgtcgagaaaaatttatggaggaatgcgatgaacatttatgaaagcatcaaggcggcaatcagcgtaaagcaagccgccgaacactacgggctgaaagtgagccgcaacggtatggcttgctgcccgttccacaatgacaggcatccgagcttgaagctgaacgaggaatatttcttctgctttggctgcggagccaagggggatgtgatcgacttcgtggcaaggctctttgatctgagcagctacgaagcggcgcaaagactgcctgcggacttcggtatcagcatcgagccgggacagcctgtggcagttccccacaagttaaagcatccctatatccgtcagttccgggaggacgaaatgctgtgcttccgagtgctgacggattatttgcatctgctggaagattggaaagtgtggtatgcaccgaaaacgccggatgatgctctggatgatcgctttgtggaagcctgccagatgattgattgtatcgaatatctggcagatattttgaccgtaggcgatctggaagaacgtgttgctgtggtggacgagctgatgaagaatggcaagattacgttcctacaggactacaccacaagaaagaaaaaggaggatgtgcgccatgagcgaagaaaagatgcagacctcgccctttgagtgtccagcgtggtttgacggaaagaaaatcaacgaaactgtattctgtgaagaatttctccgggactatccgatggtcacggtgaacgatgcttttttcacggtcaatggcagagtacacgatgaaaaccgcttgaaaaaggtcatctatgaccgcatcaagtattatgtgaccagcggcgttgcaaagaaagtcaccaatctgctggatgtcatgcgtatggagtgctgcaccgcaaagctatctctgtaccaagaccgtatccatgtggcgaacggcacgtactatctgaacggcacattcagtcccgaaaaggatttctgccgcaaccgtctgcccgttgcctataatcccgatgctccgcagcctgtgacatggctgcattttttatcccaacttttagagccggaggacattctgaccttgcaggagtttatgggatattgctttatcccctccaccaagggacagaagatgctcctgctgatcggtaagggcggcgaggggaaaagccgcatcggtatcgtccttcgtgcgctgcttggcagcaacatgaacacaggcagtatcgcaaaggtggagacaagtccctttgctcgtgcagatttggaacatgagcttgtgatgctggacgatgatatgaaactggaagctctcccccagaccaacaacatcaaggcgattatcacagcggagctgccgatggatttggagaaaaagggacaacagagctatcaaggtgatttgtatgtgcgcttcatcggcttgggcaacggtgtcctgcaatccctctatgaccgcagcgttggctttttccgcagacagatcatcctctccaccaaggagaaagatcccaaccgcaaggacgatccgtatatcgctgaaaagatgtgcgccgaagcggagggcatcttcctgtgggcattggaggggctgcgccgtctgatcgacaacgattacaactttacggtcagccagtcggcacaggacaacatggacgctgccgtatcggacggaaacaacatcatcgagtttttaagctccgaaggatatatccgcttcaaggcagataatgaggtcagttccagaaatttgtatgccatatacaagctatggtgtgacgataacgccttgggcagtctttctcaaaagagcttttgctcgttcctcaaacagaatgagagccggtacaacattgagtacaccaacaaggtcaatatcggcggcgggaggtatgccagaggatttgtcggcattgagcttctgcaaagaccgtttctgtaaaaatggtatcgacccgaaaatacgtgtaccatccgtaccaagcgtactggagtacagaatgtatttgccgtacacatggtacggcaagtacacgtacttttcagtccatttcactttcttttttcaagattgcccgcagacaccctgttttcgggcattgaaaatcaatggaagtgaaaacaggaaagattttgaccgcagaacaaaaccatttcacgaaatcgtgcttctctgaacaatgtactctgttcacggaacaataggtattttctctgttccagaccaaatcacacggaacagtaaagtgggatatggtcatatatggacaggacatcacaagcgaaattctgaacggatttcagagattgcagatttttcgccattcggtgtatttgctccgctttgaagtggagagcgttcaccgaaacacaaacaaaatttatggaggattttatcaatatgaatgtacgcaacgaaataaaggcacagatcatccgtaccgggatgaccatgcaggaggtcgttgatcttcttgctgacgagtacggatggagcgacagtgtttccaacctgtccgcaaaattacagagagaaagtatccgatacaaggaagtcgtggagcttgccgatgtgctggtctacgacatcgtatggcagaaaaggagggacaaataatggcaactgcacagtacgctattttgagatttgcgaaatacaagggaccggagatcagcggcattgaagcgcacaacgagcgcaccaaggagaaatacgcaagcaatcccgacattgatccgtcccgtacacacctcaatttccaccttatcaagccggagagaaagtaccgagcagaatccgagcgtcagattgcggaagcaggatgccgcacacgctcggacagcgttcgtgtggtggaagctctcatcaccgctacgccagagttcttcaaggggaagaaacgctccgagttgaaagagttcttcaatgaagcgttggagttcatcaagcaaaatcaagctcccgaaacaattatatccgctgtggtgcatctggacgagaaatcgcctcatatgcacctttgttttgtccctctgaccgaggataaaaggctgtgtgccaaggaaattttaggtaacaagaagaaactgacacaatggcaggacaagtattgggaacacatggtcaagaaataccccgatctggaacgtggtgagagtgccagcgagaccgggcgtgaccatatccccacaagggtattcaagcagatggctcgcctgaacaagcagcatgacaagctggcagaactgctctccgatatgaagttcacgaactacaaagagagttccgcacagattgcggcgtttcttgaaaagtatatccccgatgttgccgccatggaaacgcagatgaagaaatacgaaaagttcttcaaaacggcagacggcaagcagaaagcattggaaaagaaaaacgccgatctgaccgctgctctggaagaaagtgagaaagaaagcaccgtcaagaagttgcaggaaatgagacttcacagcgattatgagcgcatcaagggtattcttgaccgcatcccgccggagatcatcaaggcgtacacccaccgcagtacacaaaaacacgatattcaccgataaaaaaggattttgcctatgaagaaaactatggatgaaattaacaagatgattatggaagatgccccgatggaagaagttaaggatgccatcggatatgttgacattacctcctgctttgacccggtttttgagccgcccatcgactttttggaagaatgccgaaagcgttgggaagctctgacttctccgttccacaccaccattgagcgtaagatcgggaacacatggtatgtcattgaaactgaatgtgcaggaagtgagccgcttgccgataaggtaaaacggctcattttttccgagaaaggggcgatttgttcatgattaagactcaaagttatgatataatacaatcatgcacaccgattctgtcagctgacccaaccgtaaaggaggacgttatgttggatcagcagaaaattaccatcatctattgccgtctgtccgtagaggacattaaagaagatgccaagggcggcaaggctgatgaatcaaattcgatacagaatcaaaaagaatacctgactcgatacgcaaaagatcatgggtacaccaatctgaaaatcttggtggatgacggttataccgggacgaacttcaatcgtcccggcgtacaggaaggctttgagcttgtcaaacaggggcttgtgggctgctggctggtcaaagacctcagccgctttgggcgtgattatctgactgtcgggcaatacacggacattatctttccgagctatgatgtgcggtttattgccgtcaacgatggcgtggacagcgaacggggcgacagcgagggcatggctgctattcgtaatctatttaacgagtggtatccacgagacaccagtaagaaagtccgtgtcagcctgcatcagcgtggtaccagtggcaggcacatgggtaagccgccctatggctaccgatgtgacctggaggacaaggagcattggattctggatgaggaagcggctcccgttgtcaagatgatttttgatatgagcatcgacggcaagggaccggagcagattgcgaggattctggaagaaaagcagattttgaccgcaaaggctctgtacgccaagcagaagaaaaagccgatgcccgaaagaccgtatcattggattggtcaatctgtggttggcattctggaacggcaggagtacaccggctgtaccgtcaacttcaagacctattccaaatcctacaagctgaaaaagcggatacccaatgacccggagaatatgttctatctgccggacacacaggaagcgattgtatcacaggcacagtttgacagggtgcaggaactgaggaaaaacaaacgccgccccgcaaaagcggaacggcagggattcttctccggtcttctgttctgcgccgattgcggcggcaagctccattttgccacaagcaagagttttgagggcaagcaggatcactacgtctgcaatcactacaagagcaaccgtggcacttgtactgcccactatatccgtgaggatacgctacgtgacatcgttctggaacgcatccgggcagtcaatgagtatatccgcaacgacgtagatggtttccaggaggaatatcttcaatgccgaaaagccgaccatgagcaaagcatccgtgatgacaaaaagaaagtggaacaggcgaaaaagcgtctcgcttctctggatgtcatcatttcaaggctgtatgaggacttcgctctcggtgagatcagcaaggacagatacaagaagatgtccgctgactatgagaaagaacaggaacggttaaggctcgaaattgacgttatcgaggaatgggtggaacaacgggaagaaatggatgagggcttgaacgcctttatcgctctgacacacaaatatgtggacgtgaaagaactgacacagactatcgtcaacgagtatatcaagaagatcattgtctttgcgccggacaagtccagcggcaagcggacgcagaaagttaagatttacttcaacttcatggacgatgtagaaattcccgttatttccgaaacgattactacagaaacaacctatggacgcagaaaaacggcgtgaccttcgggtcacaccgttctctgcggcaaatagttacttgtcactattaaacctttgagtgcaagactttcggggttttactatttctataaaaggcgtcttgggcatgattgcgcatctttcttttagtcgtgagatcaagaagtcccctaccgcctgactggccgctgccttggataggcatagatatttagagtggtggatacctgaaaatggcctgaatttgcagctgcggtttgcccatcggcacaggagtttatcagtagaactgcattgagatggcagaaagcacggacgacaagaaaaaagtatagaaaaacgaaggcccgtgagcacgacttgtcgtgcccacgggccctttttctacgggacagagggaagccgggatcagttgttgatgctggtccactgctcggagccgccggccttgatgtggtcgtggctgtttgaagcctccatgatggggtagaaggcccagtggctgctgttcaggtcagagaaactgaccagccggtccaggctgcggtccacgaagctctggtccggggtccgacccagcatgtggttgacgatcacggccacctcggcccgggtgatggagccgctggggcggaaggtgccgtcggggtagccgccgatccagccgtactctgcggcgctggccacataggggtagaaccagtcctgcgcggacacatcggggaagctgcaccgggcactgggagccatatcggcgaaggagagggccgccgccgcgaactcagcccgggtgatggtgctgttggggtggaaggtgccgtcaggatagccggtgaacatgcccagggaggccagcgtctccactgcgtcagcgtaccaggcgccgtcgggtacatcggagaaggagaccgtggcgggcacattctggtcattcagaagggcgtagaacatctgagccacctcggcccgggtcatgttccggtcagggccgaaggtgccgtcgggatagccgctgaggtaggcgatgtggtcccgggtattcagccagcggtccacgccgttcagcttctggctggcggtaaagacagcggtgatggtgtggttcttatgcaccttctcgaaggtgtagcggcccacggctcccacgctcctgccgtccaccagcacgtccgccagctcatagccctcgtccgcctggatgatgaagctcttgttccggtcataggccacctgcacccggccgtccgggctgatggagccgccctcgccggccgtggcggtgatggttagataggtgatgccgccgtcgtcatcgtcgtcatcgtcgtcgtcatcatcgtcaccgccctcgtcggtctccgtaaaggtgacgcggatggtgtggttctccgtcacctcctcaaaggtgtaggagctgcggacacgctcactgtctccgtccacccggacacggtcgatctcatagccgcggtcggggtcaaagtcaaagcgctggtccccgccgtccgggacgaacacatccccctccgggtcgatgccgccgccgcttccggcggaggcttcgatggtccagtaggagggctcgtcgggcacgccgtcttcgtcctcatctgcaccgaaataggccaccacttcgctgtcctcccggatatcctccagggtccagctgccggtaaaggcgttctccgggtcgttgttggagtagaccacatcgccgttgacggtgatgtagtccagggcacagccgtcctcggcgtggatggtgaagggcagatcatctccggcgtctacggtcgcctcggtgggatcgatggagccctgctcctcgttgtccgaggaggcggtgacggtgtactgctcctcctccggctcctccttgtcgtcgggcacgccgttgccattctcgtcctcgccaaaggtgaccacaacttcggccgcttcctgaacattttccagcgtccagatgccctcaaaaggagcggttatatcgtcgttggtgtactcagttttaccgttcacctggatggtgtccagggcatagccgtcctcagcgtcgatggtgaactccacgtcctctccggcgtttacggtcttgctggtcggatcaatggagccgccctcgccctccacgcgggcggtgacggtgtactgggtctcagtgacatcgggctcgccgttgccgtcctcgtcatagccccaggcggcccagaccgccttgtcctcatccatagcgacagaggtcacggtgtcgggggcggtgtcgttgccgctgtaaatggttccctgattgtccttagtcatccagccgatgaagaggacggggacatcctgctgtccgttgtactccacagcgtcgtgggtgggagcagcgatgtcgctcagagtatgcgggcctgccgccacatcgtttaccacatatggatcagtttgaccgtcgaacgcgccgccgttggcgtggtaggtcagggtataggcgtcttccggctcgttggcgtcaggcacaccgttgtcgtcctcgtccagaccgaaggtgacagaaatcgtgtgatcctccgtcacatccttaaaggtgtaggaagtccagctggtgccgggggcgggagccgttccgtcatttttatgcgctgtgctgtcaatggtgatggtgtccacggcgtagccgctgacgggggtgatggtgaaggtggcgcttcctccatcggacacataggcttcttcaggattgatggagccgttgggcccggcggtggcggtgatgtggtggtcatcttcggtgacatccggcgtgctgtcgtcgtcactgtccaggccccacactgcgtagaccgtcatatcgccgctgatggtcaggcgcgtggaggttttgggcggagtatcgccgcgcttatagactttattctgtgcggaagtatctgttgtccagccgatgaacagcaccttatggccgtcctggtcggcgtgggagggatgatactcgtctgtggatttcagagtgtgtctgtccccgtcgttcaggccggtctccgtcttttcggtcgtgccctcactgccgaaatatccgccgttggcgtcataggtcagggtgcggtcgtacttgtccggagtgccgtctttgtccgcatccaccgcaaaggtgacggtgatggcgtagtcggaccggacatcactcaaggtgagggttccgctggtatagccggggatgttgtgctccccgtcgttggggtaggtcttagtttccactgtggaaccaccgacatcctgcttcacaatggtgacggtgtccagggcgtagtttgtatcgggagtgatggtaaattcggcatccgtcccggcgatcacatagcgggtcgggggcgtgatggagccgttgcctccatcaacagaagcggtgatgccataggactcatcctgcacgtcgggtttgccgtcgccgttggtgtcatagccccatacggcgtagacggtcttatcctccgaagagacatccaccgtgtcggcgaggatgctgtcatcatagttgtcatccagtccgtaaatgtcgctgtgctgagtctcagaccagcccacaaaggccacctttgtactgttatcatccgcatgggtgggcttgaattcggcggtggtgttcagcctgtaactgggctgcgccgggaccgtctcggttttggtctcatcactgccgaacgtgccgccgttggcgttataggtcacggtgcgcttgtcctctgtaacgtcgggattgccgtcaccgtcggtgtcgtagccccaggcggcatacaggatggtgtcggcgttgacagtgtaggggctggccacaatggtgggggcggtatcgttggcggacaggatcgtagtggtcttgttagttgcatccgtccagccgatgaaggccactgcgacgctgcccacggcgctgtgtgtggggccgccggccagggttacctgagtgccgcctgtgatgctggactgggcagacgggacattggccacactgccttgaactgcgttgccgttgtaagtgagggtaaagcttcgctgagaggggtcataagcgtgactgacggtaacggacgcggctatattgccagtcgagtcatacacgacccgcccctgtggggtggtttcatatccgggataagaattttcgtaagtatcttcgtagcccgcaattgccgtctcagtcagctgataggcggttcccgccgggataccggaaacggtcgcggtctggccgggctggagctggaaggtcccatcggagttcagcggagtctctgagccatccccgatcttgactgtgacaggggccttctgggtatccagcttcccgtttacagttccctccggcgacacgttgtaaagctccagtttgtaggtgaattccggctcgggactggggacattgctgccagtggtcgtatttaccttcaccgtcagcgtcccggtgggggtcttttcggtgcgcaggccgttgttgcccagatggacggtgactttggtgtcgtccacattatagaccgggtggcggtagtggacggcggtgccggtcccgttgacggtcttggcggcgctgccgtcggacacccggctcagcttggcggagcccttttggatggacaggccgccggcgtcgtccactacatgaccttggagtgcattggggttgagcaccagatggtagtcggtgagcaggtcggcatcaagctcgcccgtgtcccctgtgtcttgcgcctgataataccggtgctcatagaagaaggcggcgccttggcctttatgcgcctcctgagcgcgcacgatattataggtcgttccatcgatcacaacagtccctcgctcgggaataacagtggactggagcaggtgatccagggcctcatcgtgcgtcagcagcttctggttgccgcctgcaacattgtccaccagcacatacaggggggtgtcctcggtgtagtggtagaaggcgttggaggcagcgggggtaaagacggcggtggcggtgccgtactgagtgtcatccttggcggcggcatcccaggcgttgctgtagaagctggtggtgccgtctttggagtgggcgatcaggtagtcgttgtcgtcctgatcgaatgtgacagcatcatcccgggccaccgagtagaacaggcggatgaggtaggcctcctggttctgctggatggaataggtcttgtggccgtctccgtctacatgggtggtagctgtgacggtgcgcagggggatcaggctggccgggaccttccaggtgagggtctgggtgtccccgtctgttgtgacggtcagctccagatcagccaggttggcctctccgtagatctcgttgccctccaccgtgccggtaaaggtgtaagtagcgccattgtcgtttgttgtggccgtgaacgcgtggtctccatagagcacggtgggggcgcccaccaccttcatgtaggggcccagctcatcggtaaaggtgatgaagccgctctctccgccggtgcccggtgcgccctcaggggtctcagtgggggaggtgggggcaatcgtgttgatctcgtctaggatctgctgaaaaattgtgttccagtcttcttggctctggaagttgctggctaaatagaaattatcgttgtacttgtaatcttcgtaagtaatattgtcgcttccggggttatcggttttggaaatagtagtatattggtccgcacctgccggcccttcagcgcggctgagacggacggagccgtttgtctggtagtcggtgtacgcctgttttagttcatctccaaagccggcaccagtctccagacgctctttggggttgagggcagtgatggcaagtccttcgtcaggacctgcctcctcaagaccgacaccaacagtgaagacgtgtacggagcggtcgggatctgctccatagtagtgctctgatactttggccttcatattgccagcagtcatcattgtcacaaaggcctgggctctgtgattcagaggagtattatttccaatatactctggatcaatgtttcgcctggaaggcgtcataaagttggtatcaccattctccggctcgccgcaggataggagcaccatcacaggggcccgggtcagctcgacaccgtccacggtgacagtggtatccgacgtttggagcagaagatccataccggtataaataccaatctgcgtgtttctctcttctccgctgtcaaactcaaattcttcctcgacaattgagatgcccgcatccgtcttgccataggaagcgacataagtggtatctgcccaaataccgttatcatggaccccaacctgcagcaactcctccggggactgatcggaatagttgctgtagtgatccagcggcaacagggggattgccgtattaccgtacgccacaacagcgatccggttgttggggttggcggtcaaaagattttccagtgcgtcgtttgctgccgctaccatatcctctacatatggctccatttccggtgccatatccagcacgatcacggtgtccgtgggcaccttggtctcgtccacaatggtggccgccgagcccaggccggacagggccaccagaaagtcagcgccagcctctttcttcaccgtgttgtccgtcagcccctctatggtggtgccgggcagtttgatatcctgggtggacacggacttgtccgtccagatacgtccgatgtccttggtggtcaggtaggcgcttccgcccacaccgaacaggtcctcccagtcggtgtaggtggtcgtgtccgcgaccggagccgggtccgggtccgccgccagggccgtgccgggcagaagactgaacagcatacagaccgccagcagccagctcagcggctttctcagttttcgcatgtcgcatttctccttttctcatctcgaacagagtgtagtcagcccgcccagggcgggcggtgtgttcaggcgcccctcacctcctgacagccgccccagccgacggcggcctgttccgcctccagcaggcgctcatgggtctgctccaccagctgggccacagtggcctcgatctccgctcgggtggtgtaatacagcttccgcaggcaccgcgggttgcccttttccggggggacctgggcatcccggcagagccggcggatgctgacagagaccccggcccggccgcaggggcggccggtgcgggtgacaaagatggggccggaggagatcccccgcctccgggcgtagtccagcagctccctccggaggcagtcgggcaggcgctggggcatcgcctcccccgggaggagcaggaccccctcgcccgccgcctccaccgtcacctgttccagctcgtggaccggcaatccggtggaggtgaacagcttgatcagcagatagacccgctcctgtctcagagcccgggcggtggacagcaggcgcaggtattcgctccgggtcagctccagctgggcatccctgccgcaggagagccgccccgtcagctggaactccctgcagcccagccactccaggaagctgttggccgcggacacgctggtgttgaccgtgctgggggagtatccctggtccagcagctgctcccgccactggcgcagggtgccccggccgatgcggccgccgggcagggcggcatacagcagctccagcttctttcggtaggaggatactgtgctggggttccgccctcgttcccccaggctggacagataggagccgatctgctcccgggtgaccgtgatcccctgtgtctggggctcctgcaatgcgttctccccttgggagatgcggctctctttcgttaccccatacgactccctcccatttatagacagaattgttcttccgtcatagaaaatatgcgggatagagcggcgttgacagtttcctcctttccaggcagaagaaaaaagtgtctaaaatatcaggattttctgaaaaaaggcacgacaaatcaggccaaaaagacaaaatgttttttggcctgatttgtcatgcctgaatctggaaaaaagattgatttctatttcagaaaatggtaaaatataaactactccaattatgtattttgaaattttggagcaattttaatgacagaagaacaattttgtcataagctaggagatcagccgtagctgatccagggtccgggcatgctcggcgccggtggagatgaggtagatgcgggtggtctcgatgctggagtggcccagcacgtcagccagctttgccacatcccggctcacccggtagaaacaccgggcaaacaggtggcgcaggttgtggggaaagaccttggacggagcgaccccggccgcccggcacacccccttcatctctgcccagatctgcttccgggacatgggcctgccgcttctggtgaggaacagctcgccggaggtgatttttttttgccgggcgtacttctccagcttccggcacagcttccccggcagaaggatggtgcggatcttccccttcagggcgatctccgtccggccctcccgcactgcctccgccgtgatatagcgcacctcgctgacccggatgccggtggcacagatggtctccatcagcagggacagccgaccccgccccaggcggcgggccgtctccaccagccgggcgtactcctcccggctgagctcccgggcggagtcccggaacagctgccgctgcacccgcaggtgcttcacccggcagtcctcccagcccagaaaagccagcaggcggtccagggcagtcagcttgccgttgaccgtggcgggggactggcgggcggacagctcctccctccaggcggcggccagctcccgggtcacctcacggccgcccaggaaggcggcgaactggcggacctcccgcaggtatttttccagggtggcggggctgcgctcctcctctcccagctgtcgggcaaaggccgccagcgtctcctctgtgatcttccgtggttccatatgattcctcctgtgtctaaaggtctttccttagtttaccttgacggaggaggattattgctgtctgcactgcaaaaacatcttccttgtgcggccgcagcaaaacagagaatggaaatcttgacaagcgggggatgcatctatataataaatatgtttcgcatttggacgaaaacactcgaatcggatcataaaggaggcagtcgggttgagtacagaaaaccaggcgcaggaaaacaaaatgggggtcatgccggaaaaccggctgctgctgaccatggcgatccccattgtcatatccatgctggtccaggcgctttacaatgtggtggacagcgtctttgtggcacagctgagcgaggatgcgctgaacgccgtgtcgctggcctttccggtgcagaatctgatgatcgccgtggcggtgggcaccggtgtgggcatcaacgccctgctgtccaagagcctgggcgagggcaaccaggccaaggcggaccgcaccgcgatgaatggactgttcctcagtgccctcagctttctggtgtttgcagtcatcggcctgacctgttcccgcctgtacttcaccatccagacggacatccagcggatcgtggactacggcgagagctacatgatgatctgctgtgtgtgctctttcggcgtgttcttccagatcacactggagcggaccctccaggccaccggccgtacgctctataccatgttcacccaggccaccggcgccatcatcaacatcatcctggaccccatcatgatcttcggcctgttcggcttccccaggatggaggtggccggagcggcgctggctactgttaccggacagatcgtggcggcgatcctgggcctgttcttcaatttaaagaagaatccggacctccatctgtcggtgcggggcttccgacccagccgcaccatcatcggaggtatttacagcgtgggcattccctccatcgtcatgcagtccatcggctcggtgatggtctttgggatgaaccagatcctgatcgccttcacccagacggccaccgccgtctttggcgtgtacttcaagctccagtccttcatcttcatgcccgtctttggattgaacaatgggatggtgcccatcgtggcctataactacggcgcgcggaagcccgcccggatcatgaagaccatcaggctcagcgtctgctacgcagtgggcatcatgctggtggggctgctcatcttccagtttgcctcccccgcgctgctgcggctcttccagtccggggagagtgcctccggcgatttgctgcgcatcggagtgccggcactgcgtatcatttcttacagctttttgtttgcaggctactgtatcgtggccactgccgtattccaggcactggggcacggcgtgctcagtctggtggtctctgttgtccggcagcttttcgtactgcttccagtggctttcctgctctccagggtcggcgggctggactgggtctggtgggccttccccatcgcggagctggtggcggtagtcctgtgtacggtgttcctgaaacatgtgtatcacaaggagatcgcccctccagcaggagaacgggaggccgcctgagcaggggggagtccagaggatcagccccgcttttttctgaaaataaaaacagtccgtaattcttctaagaagaattacggactgtttttgcgttgaagtttagcccagcagatggaaggccacgatgagaccggagaaaacgatggacacggtggaacacagcttgatgaggatgttcagggaggggccggaggtgtccttgaagggatcgcccacggtgtctcccaccacggcggccttgtggcactcggagcccttgcccccgtgatggccggattcgatgtacttcttggcgttgtcccaggcaccgccggcgttggacatgaacacggccatggcaaagccggtgacggagacgccgcccagcaggcccgccacaccgacggggcccaggatcaggccggtgaggatggggacgatgatggccagcagggcgggcttcaccatctcccgcagagcgcccttggtgcacagggccacgcaggaggcgtagtcggggtctgccttgtactccatgatgccggcgatctcccggaactggcggcggacctccagcacgatggactgggcggcggtctgcaccgcgctcatggtgtaggcggagaagacgaaggtgagcatggcgccgatgaacagccccaccagcatcaagggattggtgagggacaggtccagggtctccggggtcttctcctggacgatgctcacataggacaccagcagggccagggcggtgagggaggcggagccgatggcgaagcccttgccggtggctgcggtggtgttgcccaaggagtccagagcgtcggtgcgctcccgaacggcctcaggcaggccggacatctcggcaatgcctccggcgttgtcagccacgggaccgtaggcatcggtggccagggtgatgcccagagtggagagcattcccactgcggcgatgccgatgccgtataggcccaggttgaaggactggctgccgccggcggcgtagaagctgacgatgacggccgcggccacgatgaggatggaggccatggtggacttcaaccccagggagatgccgccgatgatggtggtggcggagccggtctcagaggcgtcggccagctgctgggtgggcttgtaggtgtcagaggtgtaatactcggtgaaatagccgatggtgcagccgcccaccagcccgcagaggatggcgatgtagaccccccagttccccagcatgagataggtcaggggggcggcggccacggcggagagggccgcagccagataagttccggtgcggagggaggtgagcagggacttctgggtggcatcctccttggtcttgacgaagaaagagccgatgatggagcagacgatgccgcagacggccagcatcatgggcaggatcatgcccgcccagccgtacccggcgatggcgcccagggagaaggtggccaggatagagcccacataggactcgtacaggtcggcacccatgccggccacatcgcccacgttgtcgcccacgttgtccgcgatggtggcggggttgcgggggtcatcctccgggatgccagcctccaccttgcccaccagatcggcgcccacgtcggctgccttggtgtagatgcccccgcccacccgggcgaacagggccatgaaggaggcgcccatgccgttcatcaccatgatgttccccagggtgagggggtcgtcgatgccggccacgaagcggaggatgacgaaccagatggagatgtccagcatgcccagacccaccacagtgaaacccatgacagagccggaggagaaggccacccgcaggcccttgttcagactctcgctggcggcctgagcggtgcgggcgttggagctggtggcaattttcatgcccacgaagccggccagcatggaccagatacctccggtgagaaaggcgaagggggtgaactgagagagcatctctcccccagtggcaaaggccatcaccagcaggacgaggaagaccaccagaaagaccttcgccacagtggtgtactggtgcttcagataggcgttggccccctcccgaatggaggcggcgatcttggccattttgtcactgccttcggagaaggtcatgaccctgcggctttggagccaggcaaacgcaatggcaatggccgcgcccacgaaaccgatccagaacagattgtccatcattcaacacactccttcgcgcttggaaaaagggcccccgccagagcggaggcccttccatgcaaccgctgttatggtcatattgtaccatactagacgggctttgcaatagaaaatttatcgttaagtaaaaaacaaaccgcgggaatggagaaaaaacgcagagatctgcctagacccggcgccaagtactgcggctgaacatgactaaaattgggaagatctccaggcggccgatgatcatgcacagggagaggaccagcttgctcaagggggagaaagcggagaaattgccggccggtcccaccgcgcccagtcccgggcctgtgttgctgatgcaggtgatgacggaggtaagggtctcggtaaagggaaaatcgttcagggcgaccaccagggaggcacctagggtgatcatggcataacaggagataaaaaggagcacggaggcgagcgtggactcgtccaccggcttgccgtccagcttcacgatctccacagagcgggggtggatgatgcggtggacctcccggcggatggcccggccagccagcaggatacgggagcatttgatgccgccgccggtggaaccggcacaggcgccgcacagcatcagcaggataaagataatttgagagaactgaggccacaggcagaagtctgccgtggcgaagccggtggtggagatgatggaggagacctgaaaaaaggcatagcgcaggcactggaggggcccctggtacaggtgccggatgttgaaggcgatgacggcggtggacaggcccaccaccaccaggaaaaagcgcagctcatcgctctgaagcacttcccggaagcggcggcacagcagcaggaagtacatggcgaaattgatggagaacagcagggcgaagacggcgatgatcatctccagcacggggtcgccataggcgcctacactggcattgcggttggagaagccgccggtgcccgcagtggagaaggcgtggataaaggagtcgtacagaggcatgccggccagcttcagcagggcgacctcggccagtgtcatggcgcagtagatcccgtagaggatcttggaggtctgggactgcttggggaccagcttggaaaagaccgggcccggggtttccgcttgggtgaggtagtgagaacggatgcccagggaggggagcagagcggtgagcagcaccagcacgcccataccgcccatccagtgggtgaatgccctccagaacaggatgccacggggctgggcctcgatgtcagtgaggatggtggcaccggtggtagtgaagccggacaccgactcaaacaggcagtccacaaaggaggggaaggtgccggagaagtagaaagggagcgcccccatcacgccggtgaccagccagatcaggcccacggcaaagaagccctcccgggcgtagaaatgccgggtggcgggtacagcggacagggccagtcccagaatggccatcagcaggatggtcaacaggaagggggcggggtcctcctggtacagcagggcgaccgccagcggcaggagcatgaagaatgcctcgaccagcaggacgcggcccaccagccgggataccaatttcagattcatgacatgccccccggggcagagaaggtgtgctcgccctcgtcatagatgtcgttgagatcctgaagacgcctgtctcgggagatgaggatgacagagtccccctcttggatggacgtggagccttccgggataatgatctcgcctccccgggccaccacggccaccagaataccgggcttcagggacaggtcccgcaggggcgtgcccagatggcgggtggaggcggtaacggtaaactccatggcctcggcggccccatccgcgatgcggtacagagcgttcatcacgctgccctgggagttctgcatcccccggaccacctggagaatgtgggaggtggccagctgcttgggggagatgatgctgtccagaccaacggcctgggcgatacggttgtagttctgccggttggatttggtgatgactttggaaaggcccagctgggcggcgtacagggagatgatgaggttgtcttcatcccggtcggtgagagccacgaaggcatcacaggaggagaggttctctgagtccagaagctcctgatcggtgccgtcgccgcagatgatagtggaatgggggagcagttcactgagaaaacggcagcgggcctcgctgagttccacgatcttgacctgcatctgcatcttctccagcaggatggccagatacagagagatcttgccgccgcccacgagaaagacccgccgcaccttgggggtgtagcggcccagaaggcggaagaactgatccaggccggtgggacggccgatgaggtagagattatcccctgcctgggggacaaaggagccgttggggatgatgacctcgccgtcccggtctacggcgcagaacaggagggagagctttttgacctggctggacaggtcctggagtggattgcccaccagaaagtcttcctccatcaggcggaagcccatcagctccacccggccccgacagaaggtctcgatattggcggcggaggggaagcgcagcagccgggagatctccacagcggtggcattctccggattgatgaccatgtcgatgcccaggtcccgcttcagctccgccaggccagaggtgtactcctggttccggatccgggcgatggtgtagctggtgcccatttttttggctgtgaggcagcagaccatgttgacctcatcggtgctggtggcagcgatcaacagatcggcgtgctctgccccagcttctcgaaggacggcggcagagacaccatttcccttgacggacatcacatccagcgtgtcagaggcacggcgcagggcggcctcatgggtgtccacgatggtgatgctgtggtcctcactggcgagctggtcggccaggctgaagcccatttttccattgccaacgatgatgatatccaaaacgcagcacatcctggaaaagatttacggcaaaaagcaaaagaatatgaggccccgccgtatccgggcccaagcaaagaaaaatgcgccctcgaccgaaccggagctggagagggcgcgttttaaaagggactagatcgtccactgactgtggatgatgcctaccagctgccagcaggagtcggaaggggagaagaccagcttcagggaacaccagtccagcccggcgttggcgggatccaggccgggaaaatgaaactcaacgaaacggcagccggggtatgcctcggtcaaattttccaaagcgttgccgctctgcagaatacggtccactccgatctcaggggcctgggtgtagtcggtattgaacacataggtggagaaatattcggctggagtcagctcgatcaggctgcccaagccgtcggacacgccccaggtgtacaccgtctgatcagtggagaactgccggacctgagcggcagtgaagcggaggtcgctgtcccggtcaacagtggaatagggcgtaaaggtaacgccctcctccgggtggacgaaagcggccagagtatcataatcccgctcctgaatggcgcggaccactgcacaggcagagctgagcaggggaaagttgtcgctggaattgaacgctggcaaggtatttgcagagctgctgccggaagcggaggcagaccctgcggagacaataatggagttgaccacagacggggtcatggccgtctcccgctctttccagggaaggtactgggcggggcacagggtgcccacaaaaaatccgaggaagagggctaagaagccggttataatggcaacgcgtttgataaaactcatctccttgcggcagaatgaaaagcatatgggatcccctctatccccgctcgagtatctttcagacggggaagaataggataaactgcaaattcaaaatagattctgggaagctattgtagtacaaaattgataagacgtcaagcatggcctgtctgaaagccgcgctttccgaaaaaacgcaaagaaaaaatggaaaaat

SEQ ID NO: 13622 - DNA, 4914 bp, Unknown
  gut microbiota DNA sequence
tccggcggaagcgcctccctttttcaaccgcttttgcactggtccacgtaataccgtcctccagcacaggggaccagaacgccccgctccaccagctggtcaaatttgatgcccagcccctggaagacccccgcctcctccggcgttctggccgtctcctccgagaccgcccccgcctccaggaactgcctgatgatggctctctttcggatggcacccgccggtatcatggcctccccctcctttcagtttttcaccactgcgtggagcagggaccacacggaccagaccaaggaccccgccagcaggaccaccatcagggggaccagatccttcaggaacacaaagccgccgaagagggaatcaccgaatatgaccgccatccagatggcccacaggaaccagcctccttttcctccaaagcgctggatcacgcctccgataatcagccccagcgcaatggcggccaggacgatggctggataccaccaccattccaaatacatatccaccaccagcagggagggcaccgcctccgctgccgccgtgcgccccagctccgggatcacctgtccgctccgctccagcgtcaccgacgccgcgccggaaatggccttccacagcatgggcgccgtggcccgctccacccaggtcaacagggcggccagccccatggagcacagcgcttgtgccccggccatccccatcagcagccccagtgcccggcggcgtgtcaggctgaagcgcaccatttggtcaaaggtgatggccagataggtggcggtaacgaccaggatcatcagccccgccgccgcgggcagagcgatcccggagatggtgacgctgctgtctggatggccccagaagagcacccccgccgtgatcaggtggatggccaggaaaatccccgccaccactccgcagccctgggccagatccacccagttggcccggatcattttcatcatcatatgctcacctcacagaaaaaagggtgatcctacgccacaggaagaactcgctgaccgccaggaccactgccagaacgccccccaggatatagggaagatcgccccacagagggatcttgggccccgccgccatcaccatcaggaaaatcagggctgccgtcattaccattgcggccaaagcaaccacgatccccctccataccctggactctaccatcagcagaccgcagagggtcccaaaggccaggactgtccagcacaccagggggtacacccacaggggccagcctcccagcagtgagagatcccacccccagggatcggtccaccggagcgccttgggcaccgccgacatcagcagctggatggcccagctggtccctacatagagcgccaggaccggctgaagggcccagaagtagtcccgccgccgcccgcccagagtgagggagatgtttaggttgtttgcgcccatggaaaagctcatgataaacaggatgaacgagacggtgatgggcgcggaaatgaaataattgtagaacagatttcgctcgccctccggggccgggaacaggatggctcccaaggtgagcaccgccgcatatcccgccaccagggccagattgatcctcgccgactgaagcaggaagcggaattcctttctcataccttcccctccttactgggcatcgccgtggccgcacagggccacaaacacgttctgaaggttcatgggggacacatccacatcggcctgccgggcctgacggaactgggcgtcgctcccccggacggcagcggtcttgtgccgccccatctgctggacggagaggacctccaggccggcacaggcctggtccaccacgtcctcccggccggagatatagcggaactgctccaccagttcctctgtggggctgttttccaggatgcgcccctggtccaggatgatgacctgctcaaagacggaggcggcctcctctatgatgtgagtagagaccaggaaggtccgccccgtctgggcaaagtcctccagcagcagctgatagaaccgctccctcatcaccacatccagccccgccgccggctcatccagaatggtgatgggtgcccggctggccagggcgatcaggatggtcaccatagacatctgccccttggacagctgactgatcttcttttttggttccagctgaaactcgttcagcaggcggtcggcatactcctggtcccagttggggtagaatatggcggccgacttcaggtagtaccggaccttctggttgttgggacctgagaacagggtgggctggagctcccgggaaaagcagatctgctccagcgccctgcagttctcccacaccggctctccatcgcaggtcacctgcccgctgtccttggtgttctggcctgtgaggatgcccagcagggtggtcttacccgccccgtttcgtccgatcagcccatagatcctgcccggctggatggtcaggtccagcccctccagcacccgcttgctcccataggacttgcacagcccctctgctttcaaaatgcctgtattcatttggcttctccttcctcgatggcccggcgcaccatggccagcagttcttccccggtcacagccagggaggccccctcctttaccaggggccgcacatagctgtcgtaaaacgccgctttccgcttggcccgcacggcctgctccgcccccggggccacgaacatgccgatgccccggcgcttatacaggatcccctccgccgagaggaggttgagccctttggccgccgtggccgggttgatgtgatagacccgggagagctcattggtggagggcacctgctcctcctcccggtagacgccccgcaggatgtcgtcctccagcatctgagcgatctggagatagatcagtgactgatcgctgagggtcccatgcatctcaccgcctcctgtccttcggtttattggttcattacttgtgtaattaaccatatcacctatatccctttttgtcaataaaaaaggcaaaaaaagtcccgccccagcaccaggctggggcgggagccatcaaatcaggtggtagcggaggaggagttcctctatcacggtcccggacacatgcttcagggccttcttctccacgaatccatacaggaagggcaagtccatctccgtcagctttttgccgtccatcattttggatgcggcatccagcagacagcgcacatcgtagcaagacccccacacctcaggcaccccccggtcgatgtccagcagggtgtagacggcctccataccggttcggacggagtactcggtggtgaagatggtgtcccgtgccgtctcggcgaactggccgataaaggcgaagttcacacagccctccggcaccacgtcgggccggtccccccgtgtccggggcatgaagaaggcggtgatgtagggcatcatgcaggggatggtgctggcagactgctccgccagcagggggatctcctcctccggcacccccaggtggtacagccactccatgcagatctcccggccggtacacgcccgcatgggctttttcacatagtccccggggacatcggtgaacaggccgtagatccaccccaccagctgtccctccggctgggccttgaagtggggctggcggttgaaggtatagctcatcatccaggcggagtccttcaccgtgacgataccgccggtgaccaccttcccggagaaggggtcccgcttgcataccttttccagatagggcgggatcttgtcgtccagggtggtgacggtggccgactcccagttggtaaggcccggcttggtgcagtacttgtccgggcggccgaaggccgggtcctgggcagcgatgttccgccacagctgccagcagccccccaccggctcaatgaggaactccggggcgcggtcgttgctgcccagagaggagttctccgtacaggagccgtttgtgacgaacaccaggtcgtcctcagtgagctccctgacctcctcccggccctcccggacccacaccagctgctttgccacctttcggcccggggcgatgtcgaagatcacgttggtgacctgcgtgtcatactgaaactgcacattgtgctccttcaggtagtgcaccatgggcaggatcaaggactcatactggttgtactgggtaaatttcagggccgagaagtcgggcaggccgccgatatggtggatgaaccgctggagatacagcttcatctccagggcagagtgccaagtctcgaaggcgaacatggtccgccagtagagccagaagttggagcggaagaactcctcggtgaacacgtcggtgatggtcctgtcgtacaggtcctcgtcccgggtgaggaaaagcttcatgatctccagggcggccttgtcgctcagagtgaacttcccgtctgtatgggcgtcctttccccgatccaccgtggcccggcacagggaatagttggggtcctccttgttcagccagtagtattcgtccaaaacagaattctccgggtgctccagggatgggatggagcgaaacaggtcccacaggcactcgaagtgattctccatctcccggccgccccggatcacgaagccccgggtggggtcctggatgccgtcgcaggccccgccggggagctttagctcctccaggatgtggatgttctcccccttcatctgcccgtcccgcaccaggaagcaggcggccgccaagctggccaggccggaacccaccagccaggcggatttccgttccacgccctccggcttacgggggcgggcaaatgcctcgtaatttccgctgctgtaatacatatccatgacctccagatcgagtttgtgaggtcagtatagcgcccccggccctgcctgccaatggatagagggggcccgctgtcgcaaattgcgacag

SEQ ID NO: 13623 - DNA, 1734 bp, Unknown
  gut microbiota DNA sequence
gtgttctcctggggcgtgttcttcgtggccctggccaccattctggcccagatctgctcctgggtgttcggcatcttctacatcaaccgaaagtaccccttcctccatatccgcctgttccggatgcggctggaccggcgcctgctggggcaggtgatccgtctgggcataccctccgcgatacaggagtgccagttcgcggtgggcatactcatcatgcaggcgctgatcaacggcttcggcaacgattttgcggccggcttcaccgccgccaacaagatcgacaccttcgccttcatgcccatcgagtccttttccatcgccgccaccacctatgtgggacagaacatgggggcggggaggctggaccgggtacagaccgggacccgccgggccctggtgctgggcactctggtatgcctggccatgtcggcggtggtgctgcccctgcggcggcccctgctgatgctcttcaaccgggagcccggcgtggtggccgccggggaggcatacctgctccgggccctctccctgatgttcattctggccatgatgtttatcatgaacggcgtcctccgcggcgcaggcgccacgacagtgcccatggtagcctccatcatctccctctgggcggcccgcatccctgtggcctatgcgctggcctatttcttcggcccggaggagatctattgggcctatcccatcggctgggccctgggcctgctgatctgcgtggtgtcctattgccgtggaaggtggaaggacaagtgcattgtgagctaggcgccgcaggaatagcacagaggccccgccggtctgtccggcggggcctctcctgctggagtcaggactttgtgtagaaatcgcaccaggggcgcagggtacagttggggcagtcgggcttgcgggccatacacaccgcccggccgtggagcaccatccggtggcagaagtcgttggactcctccggcggcagggtgggccggagctgctcctccaccttggccgggtccttggtgccgtcggtgaggcccagtcggccggtaatgcgtatgcagtgggtgtccgccaccactacgccgggggtgtggtacacgtcgcccaaaatcaggttggcggtcttgcggcccacaccgggcagcttgagcagctcctccatggtgtcgggcacccggccgccgtactgctccaccagcatgcgggaggcggctacaatgtcccgggccttggcccggaagaagccggtggaatggatataggtttccacctcggcggggtcggcctgggccagagactccagggtgggaaagcgggcaaagagggcgggagtgaccatgttgacccgctcatcggtacattgggcggccagacgcacggaaaagagcagctcgtagggcttggggtactggagcgaacagagcccttcggggtatagcttcttcagctcctctacgatagccaggacgtcctcatggtttttcatcgaatcacctcttagacaatatagcatagaatccgccaaaaaacgagagccttttttcaaatagggcgattgtaatttaaagtgggattctgtataataaacggtacagtcaaatttgagaaaggtggagtcggatttggtcaaggatatcatggagtttcttgccggacaagaccccgaggtaggggcggcggttcaggcagagtacgaccgccagcggcgcaacatcgagctgatcgcgtcggagaact

SEQ ID NO: 13624 - DNA, 3485 bp, Unknown
  gut microbiota DNA sequence
caaataaagggcggggccggcgctctgtgaaaaagcggcatggacgttttatgccgtctggtcaggcaggtcctccagggaggcgaaggtgtagcccatgttctcccagcgggtgagcagctcgtccaggatctcggcgttggtccgggaggtggagtggagcagcacgatggccccattgtggatgcgggggatgagtttggagaaggcctcctccgccgtgggctgatcatccacgtaccagtccacataggccaggctccagaacacggtgcggtagcccagggcctgggcctggcgcagattctcctcgctgtattttccctgcggagggcggtagaaccgggggagggtctggccggtggtctcctggtacagctgttccagctcctccagctcctgctgaaatttgctctggtccgagatggcggacatgtccggatggtggaaggtgtggttgcccacgatgtgcccctcctgaaccatacggcggatcaggtcgggggaggactggatcatgtgtcccactacaaagaaggcggccggggcctgatggtccttcagcacgtccaggatctgggcggtgtagccgttctcatatccgcagtcaaaggtgaggtagaggaccttctgggtcgtgtcccccacatagtaggcgtcgtattgggccagggactgggcggtggcgttgcccacagggggctccccctcagtctggaaggacaggccccagttgtcggtggaggcggccactgccgccggggcggcagcggggacgggagtgtcctcccgcacagccagccagaacagccctcccagtaccaggcagagcgcagctgcggacagcagtgcggttcggcgtgtgtggtccatagatgttccctcctgcgtgttttcggtcaggtcagcgctaggatgtgcaggagagaggcaaaatatgtaccgcttatgctggaaaagaaggcggaacggcggccagaaggccgccgttccgcctggagccaagccgcttttttgacagatctgtgcttaccggtcggccactgcggtccgcatccactttccactcttcacccggagcagggagaccgccgcacccacggcccagccggcgggaatggaccaccagatggcgttggcgccgaagggggtcagatagaccagcgcgtaggcgatggccactcgggagaacaggttcgccatagagctgagggtgaacgcccccatgtctccggccccccggagcatcccgttgggaacaaagagaacgcccatgaggatgtaaaagacggagacggtgcgcatgtaggccagcccgtagcccatggcgccggaggtgtctcccgggtccaggaacagggagagcagctggctgccgaacaggaagatgatcaccgtgatgaccagggagaagaccacaaccatgaacaggcaggccttcaggccctccttcacccggtcgtacttgccagcgccgatgttctgggcggtatagctggacatggcgttggagaagttcatgttgggcagcatggccagggtgtcgatcttggtggcggcggtgtagccggcgaccagcaccttgccgaaggagttgaccagtccctgcatcatcatcatggacagggagaccagggactgctggagcatggagggcaggccgatctgggcgatgcgctttaccgccgtcatgtggaacagggggatcttcatgttggcccgctccggctcacagggcagcttcttcatccgttggaacatcaccaccagggaggcgatggcacacattccctgagcgatcagggtggcccaggccacccccgccacccccatgttgaactggatgacgaagagcaggtccagcacgatgttggtcaggctggagatcatgagaaagatcagcggcgttttgctgtccccctgggcgttgtagatgccgttgagggtgttgtacaaaaacaggaacaccgctcctccaaagtagatccgcaggtacagccgggagtcatccataatgtccgggtcggtgcccagcagctggagcgtccgcaaccaacgatgaacacccttcgcaactggtcaggtcaccctcaagcccctcctcgatctcgtccagcagaatgtcatcaattgtgatcggagtgtcgctgccgttcaaaaccaaggtgaaccggtcatcatacaaatataccgcccgaaggaaaatattgatgatcccacgcttgatgttctcgtcgttcttgtctccttgcctgagcgagtagagataggctctaacctggggtgctgtcaatgtcacctgttttgccatctcgacagccaactgtgcttgcagctcctctttctcgtgctggcgtttttcaattcgctcagtgatcatgtcggcggcctgtccccgctccaatgccttccagagattttcaatggcggtgtctgcttcctgaatggcagctttgatgcgtttgatggatgctgtgtcccggttggattcacagacctcggataccgaagctgcgatccgctcaatgttgctgtctgtcagcaacttgcggcactccagcaccacacgatcctcaattctctctttacttatgaccttctttttgcatttgcgccgtttgaaattattacaggcatagtagtgataggtcttgccggattttcctgtaccaccgtaaccggtcatcatctcccggcagtagccacagaatagctttgtggtgagcagatactcttcccgccctctggctcgggcaggtgcttttttgttgcggtcaagaatatagtggacacgctcaaacaactcatcttcgatgatacggggcataccgcccggcgtctcctgacctttgtagaggtaataaccgatgtaacgacggttgttcaaaatgcggtggacgctgtttttattaaacggtttgccgagagaagttgtgagctttctgcggttcaaatcacggataatgtctgcaactgtttctccactggcataccgttcaaaaatctcccgaacgatctttgcttcttcctcatccacatagtaccgacgttcggaatccaccttatagcccaaaccaggattgctgccattggccaaacacttttgcgcattgatctccatgccccggcgaatcttttgggaaagctccgccgagtagtattcagccatactttccagaacaccttccaccagaatgccgctggcatcatcactgatattttcccgtgcggagatcactcgcacaccgttctttttcagttttgctttgttgatggcgctgtcgtagcggttgcgagcaaagcggtcaagctgatatacaagaacgccctcaaaggtatgcttgtcactgtcggcaatcatccgttggaactcgccgcggctatcggtggttccactctgggcgcggtcgatgtactccccaacaacgagatagccgttgtttttagcatactcataacaggtatggagctgtccctcaatggat

SEQ ID NO: 13625 - DNA, 5002 bp, Unknown
  gut microbiota DNA sequence
aaagcccaacggccgctgggagggcagatacacccagggcatcgaccccagcaccggccgcgccattcagaaaagcgtgtccgcccggacgcaggccgagtgcaaggaaaagctggcgaaagccatccgggacaaccggggcatcccggtgaaccacaacgaggactacacggtagcggagtggtgcaggatgtggtttgaaacctacagcaagcctgtgatccgccccaacaccgcaaagacctatgagaacatgatcgaaaaccacatcgtaccggctatcggaggagtcaaactcaagcggctgaccgccattcagatccagcagatgtacaacgattccaaaaccagtgggcgagtgcagcggttcgagaaaaagaccgacacgtccttgtctggaagcacggtgcgccgcatccatatggtgctctcttcggcgctgaagcaggcggtcaaggagcggatcattccgtacaatccctgcgacaactgccgcatcccacccaaggagaaaaaggagatggccatcatcccgccggagaaattgggggtgtacctcagcgaggcggagaagtatggcgtgctgcccatgttcttcctggaactgtccagcggcctgcggcggggagaactgctggcgctccggtgggacgacctgaatgtgaaagatcgcaccctctcagtgagcaagcaggttacccgcatcgacggggagctggtggtgacagagccaaaaaccaagaactccgtccgcaaggtggcgctgtcccagcaggcggtggccttgttggtgcaggagcatgaacagcacccggacagccccctcctgttcccgtcgccccgcaccggcggctattggagcccggatgcggtgtccaggattaaccggaagctgctggcgaaggcgggcattgaggagcatgttcgcttccatgatctgcgccatactttcgccaccatggccctctccagcggcgtggatataaagaccctgtccagtatgctgggccactatagcgccgggtttaccctggacacctatacgcacattaccaacgatatgcagagaggtgcggcggaaaagatcggcggcttcatagaaacggccacggctaaaccggaacctgagccgcctaatccgacggaggagagccggtgcaaggtgataccgttcgagagagtgggataaccggggatctccatatggaaagtcagaatgcatccggaaaggatgtactcacaacttgtcgaaaaagtccagcttatgcttgatctcattgagataagacacccaaatacagccgtctccggttttcatcccggaggcggttttaataaacccatacaccataaaagagggcataacaaaagcgcgtagttgtcccggattatgcgcggtggagccagttcccgctcgcgggtggtcggcttatttatggactcggtcgcttggatataccgtttctcctctgcattagtagcaataaagtccacttccttgtttatcacaggcaagcataaaaagcatgcctgtccatattcaaccagcagttcaatgacaactgatcgagtttggagtatgcttgacccatcgaattgttccgccggggagtgatatgaggaggtatgatccatgaatatgaaagatgcgtttcgatttcagaataagctgaaagctctgatgtgtgaggccactgccattcttgaggatcggcgcaatatcgtcaaggtcaagacaacacatcttcggagcaaggtcatgtccgatacccaggatgctgtagtggaggaagctgctcccagtgagtatgccggccatgccaacggggtagccgccttcctcatgtccctgctggaggagcgggagaaattgtgtcgggctatccatactgccaagaactctttggatttggatatggacagcgaggtgggcctgaaccggcagcgtcaggacctggctgaggtattccgccacatggccatgcttcgcaacagcgaaaagaccattgccggcggaggctccggcttccgattcaacggcgagggaaaccaggtctcctaccgatgtgatgccacgcaggtcaccaccatcgactttgaccggaacaagatccggggcatggctacggcgctcagcaagaaggccgacgagatctccatgtccctggataagtgtctggtcaacaccgaggtatcctatgagccgccatttgacatgaatgatagctttgaggatatcctcagcgacttcatcgaaaagagcacggctgcataaatgccgccaccacaccttcaggtgtggtgggcgtggcagaatggataggcggtgatgatcggttcaggcgcagatgaattatgatgctgcgcactccccggcaaagaatggactgcatctgatgaatgcaacatgagctcataactcattgtgaaaggctcgtcagtcgcctccatcctcgtccaccgaaatactgccatttctaacacatatccattgtcaaaagcagaattcgaccttatgcttctctgatacttgccataatggcgtgatattctatttatgaagtcgcttgttcacgcaagggctgcagtcgtccagtaggatcgcggcaggcctatggtcacaggcggataaggatctaagcggttttgaaattctgccatgcccactgtacctgaagaaatttccacataaaaagacctgagcagcaggcgactgcctgctgctccaaagaaacaatatgagaagtggagatgatgatctcgttcatcggcacctggagcaaagcgctcagtgcatagaggttatctacactgggaaggctctggccccgttgccatttgtagatggcttgcggctcctcaaatccgaaatagtgctggagatctcggactgtcaggccgcgatccttccggagtcggcagatattcgccccggtagccacaggatcgatgacaggaaactgaatcatggacatatggatcgcctccattcatcaggatgtctccgcttcagcggagtatcttagcatacctgatgtgctctgaaatagcaagtgatctttgccatttgtaatgaaatcgttatagaggagtctactatgggaacattcacggtgccatcagtatatcagccagctattgctgcgctatgccctctggggtgatcacaccaagacaaaaagaaggagatgatcagctgtgacgcagttgattccattggacaaacgcagtaagaaagcccggcgggaataccacgcgaaacagcgtggctcctggcacggggtcaaccctatcacccggaccgtacagagcaggaagatttatgacagagcaagagttaaacaagcggatcaccgagatcttggaatctactaaaaacgagcctggatgcggccgacgttccggtcgccaatatcgccgcacccagtgtgtcaggcactcagaccatcttctgtttctcattcaacacagcaggtatgcaccaaacatggggtatatcatgggagactatgagagattaagaacgttacttcattccggactgcatattcagtatatgaagtccagcgatcgtcaacagtatctgaagcgaagatccaatcgaaaggtccgtaagtatttcggcctatcaaagaagggcaaccagtatcgcaaagtgttcgaatactggtggacgctctattgaatttaagataggtcaaagattgacttatagcaggagggatcctgcttcacgacctacacagcgtagacatacgatcaggagtcgccgacaacggcgctgatagaaacggcgaaaatgcggaaattttcctgttagggatgagttagggatttgtcagtttcagcggctatccttactcatgctccagtcgcttttcttcccctgaaaccaccgctgaacagcaatcgccttaaacacaaaaaccagaacaaaaaacgaagaaaaaccgcctaaacaggcggtttttctaagaaaggtggtcccccgaccgattgtaaatccgaactttcaatgtcagtaaaatcaagcctttcctcgccctccttatagttaaaggtaatcaaaatgtaatcgtcaaagacggtcacggagtttacaaagctgtcaataagcctccgccgttcttccagcttggacacatccagggtacggaaacggcaaatccagtatgtcacatcctcacgggtcagcatggggtgtttcatttcctcctggatgatttgcagctctatatccgctttcctgtcctccaactcgtcaagccgctgtttggtggaggcgtttataatccccatctggatagcgttcagcatattggtgatacctcgctctgtttcctccaactggtgccggagtgccgggaggacgctgctctctctggtctgaatgtccatcacggtgtcggctatgtactccacaaaattatcgtccattacctttgccataacagcgttgacaacagcgttttcaatgggcgttttccgtatgctcttgtgcttggcgttgcagcttttttgtttcttggtgtttacacagcgataataatggtatttccggcccttgctggcgctggtgccgctctcgccaaccatcatggccccgcaggtgccacaaaacagctttgtggtcagcagataatcgtcctcggccttgtggcgggccggggcttttctgtttgccgcaagccgtttttgcaccctgtcaaacaggtcttgggggacaatggcggggataccgctgggggtgacaatttcccgatagctgtattccccgatatacttccggtttttcagcagacgggccataaagttcaggtcaatctttttacctcgtaccgttgtaacgcccttttgccgcatttcctccatgatttccttcatggtggctccctggtcataccgggtgaatatttccagcaccacgggggcggtgcgagggtcaagctggtactgcatatccttgtctataacatagccgaaggtgggcgtatcgccgtta

SEQ ID NO: 13626 - DNA, 56406 bp, Unknown
  gut microbiota DNA sequence
gtgaaccagaccatcacccgccaggagatggcggtgatggcgtccaagtttgcggcgcagtataaggatgcggcggtcagcgcctctgccaacctggccggctatgccgatgccggggagctggacagctgggccagcgaggccatgtcctgggcactgtccagcggtgtgatgcaggcggtggacggcaagctgtcccccaagagcacggtgagccgggccaacacggcgggtgtggccgtgcggctgtatgagctgggcggcgtggatctggacacgatcacggcgctggagaaggactggacccaggcggcccagctgccgctgaccggctggttcacgaagaacatcgatgtggagggtgaccgccaggtgacggtgtacatctccgaggaggcgtccatccgctcctacttcaccgtgatcgcggtgcccaatggtgtggatacccagcagtttctggaggacgaggggtggatcgacctgatggaccagaagggcgaggccctgttcgtactggagcccggcgcggagggctggggcagcgcggcggaggagaaggcctacatggacgccgccattgccttcctgaagagcggcaacaacgaagccggcatcaacgtgttctccaccttcggagagttttatctggcaggctacggcgagggtgccgctcccctggaggcctgggccgctgagaatcccatctttgtcatcagccaggctttcgtggacggcgagagtgccggagacgactatctggccagcgtgagcagcaaaacgtatgacgggaagagcgccaatggcgacatcaccgatgtgctggataagaccctgaagcaggtgggcattgccggggagatcgccccgaaggacgtgcctgtgcctacctggctggctgcctataccggcagcgacgcccactggaagacggcaaacgactgtgaggccgcagctgagggagatacctattaccagaagctggattctgccgcctatcagaccgactatgccaacagccgtctggaggccgccggggccgaccacggcatctctcaggtgaaggtgaccggcagtgccgatgtgagcgccgcagagctgtacgcctggatggcccagtacacccggtatgatacgaccttcgcatattccaatgccatcgcccagcgcctggactacacctccgcccgagtggccgcccagaagcaggccaaggccggacaggtgcagaagaccctcagtgacgggacccagatcctggcccaggaggatgtggccattgacggccacggcaccgtccaggtgggcgtgatcgccttcagtgacaacagcggagatgggctgtgggacccccgggagtatatcatctacgtgcctgagggcttcgagggcaaggaactgccagtgctgatgatttatcccggcaacacccagaccgactccatcttcctggactccactctgtggtggcagatcgccgaggacgaggggatcgtgctggcctttgtgtgcgagacctataatgccagtccgtgcagcgtgtcccatgccgactccgacaagttctaccactccctgatcaccatcctggaggagcagatcgacggcagctatgcagatctggacttcacccggatctatggctccggccagtctgcggggtctatcgcgactcagggctttgcgatgacgaatccggagttctttgctgctgtaggctccacctctgcgattcctgtcccgagtgatgtccctaattacgatagctatgacgtaaatatgaagctgacagcggaagaagcagacgaaatgataccggttatgctgattagtggacagatggatgtcagcgatttggcaaacggttttgattccgaaaatctcaagggatggggtggctacatgctgagagtgaacggaatcggtgaagaactgactagggaaaatgccaataaagtgaccaacattgattcccgccatccagaactgtatacttggagcaaaacaattgatggcaatgagattcccatggttcagtgggcgcagtgcctcctgcgtccccacaactgctatccctctgatatgcctatgctgtgggacttcatggagcacttcagctttgagaaggccgcggacggcactgtgacccgttactatagcccctccgcctttgaaaaggacgatgcggtggcgctgaactgagagcagcaaattttaaaaagacaacggttcgcttccatccgtcagagaacaaaaaggaaagcgcagggcttctccccacacggggagaagccctgcgctcgtttgcacagaaagaactcaaggggtcaggtccgcctgacggcgcaggatggagagggggggcaccgactggggcagctgcatgcggaagcgcatctggggcttgcggacctgggtaaggggcaggccgtcctcgtcccacagcgccgtgacctccagaggctgggggcggacgccggggcccaccagctccagccggtcgcccagggaaaacttgttgttcagggtgagcagggcgcggccctcctggtcacagctgaccacctttgcggtgatctgccagtcccggatgtagcgggaatcctctgtgaactggcctggctggccgtaaaagaaaccggtggagtagtgccggtggctgatgtgctctacctcatcccgccagacggggtccagaggcacgccgctccaggcggcgtcgatggcgtggcggtaagctccggtgacgatggcggcgtagtaagctgatttggcccgcccctcgatcttgagggagtccaggccggcgtccatcagctcgcccacgtggtcgatcatgcacatatcccgggagttcatgatgtaggtctccccattctcctcatagacggggaagtattctcccggccgcttctcctccatcagggcgtactgatagcggcagggctgggcgcaggccccccggttggagtcccggcccgtcatgtagttggacagcaggcaccggccggagtagctgacgcacatggcgccgtgggcaaagacctccagctccagctcggggggcgtcttgtcccggatctcccggatctcgtccaggctgagctcccgggccaggatgacccgcttggcccccagttggtgccatgcccgggcggactggtagttgaccacactggcctgggtggagatgtgccgctccacatggggggcgtgggcggcggccagagccagggtgcccacatcggccaggatgatggcgtccacccccaggctgtccagatattccagccactccggcaggcgggccacctcattgtttcggggcatggtgttgcaggtaacatggacccggataccccggcggtggcagagctccaccgcctccttcagtgcttccggcgtaaagttgccggcaaaggagcgcatgccgaaagtagtaccggccagatagaccgcgtctgccccataggcggcggccatctgaaggcgctccatgtcgccggccggagccagcagttcgatcttctttcgttccatcaggatcagcctcccatcagagcggcataggagccgcgccttttcaacaggtcgagcgggccccggaagtcgttccggggcccgctgtaaatcgtcagccgccgctgtaaagcgcctgggtggacatgaaggaggtcatctctccgtaagtgttgaagaaatggtgcttgtcgtcgtcgcccagggtatagtaatagtaggaggtgctctccggctccatagcggccttgatggattccaggccggggttggcgatggggccggggggcaggccgggatacagataggtattgtagggggagtcgatggacttgtccgcctcggtgggcaccttgcccccgttgaggtaggccagggtggcgtcgatctgaaggtagccgttggtgccggcggaggcaccggggttgttcaggcggttgtagatgacggaggcgatcttcccccggtcctcaccgtcagtctccttttcaatcatggaggccacagtgagtacctcgtggatggtgcgtccgctgtccgccacctcctggcgcatctcatcggtgaactgggcgtcgaaggtctgaagcatcttgttgatggcgtacaggggattgtggggcgtgtagaactcgtaggtggcggggaacaggtaaccctccagccgctcggggtcacccaggggaatgtcctggaggaaggagaaggcgtagtcgtgggtggccgccgtctcgttcaggtcctccaccgtggccacccccttctcctccaggagctggaagatctgggctaccgtgtagccctccgggatggtgacatccaccactgcccgggaggcggaattggcgctgatgccggagatcagggcgcggtagtccatgtcggagttcagggtaaaggtgccggaagaggcgatcttgtccttgccgccggtgatggcggagaagagcttgaagagagatttgtactcgatcaggccgttgtccttgagcatatccaccacgtcgtcatagctgtcctccggggtgatggtgacggtgacggagtgctcctccttgttcagggccagcacgtcgctggcggcgatccagcccacacaggccagcagagcggatacgccgatgacggccacagcgtagagcacagcaaagctggcggagcgggcggcgctgcgccggcgccggggggcgggggaggaggaccggctgcgccggccggcctcccggtagtctgagtttctgcgttcctgaggcatagggtcagctcctaacaaaatttccttccccgtggaaccggggacaggggtgggccatagaatggtacagaggcgagagaccggcgacggtctcggccgactttgagtgaggtgaatgtttcatgtgctttggaaacaacggttgcggcggtaacagctgtctgtggatcatcctgatcctgatcatcatctggggctgcggcggaaacagctggggctgcaacagtaactgcggctgcaacagctgcggctgcgggaacaactgcggcaacagcggctgcggctgcggcgacagctgctgctgaggcggactacatccgctggagacaggcggggccctccggccctgcctttttcctgcggggccggcggacaggcaggggctcagaagcggaggacccgtcggtccgtcaccaaaacatggacccccaggtcgtggggctctaccggcagactccgctggaggacgcactcccggcacaggccaacggtggtcccggagaagctctccagccagcggtcgtagtagcctcccccgaagcccaggcggcgtccgccctcatcatagcacagagcggggacaagggcaaggccgatctcctcagggcggattagaggggcctgctccgtgggctcctggatgccgaagtcggagatggccatgggcagctccgggcggtagacccggcactccatcccgaagccggggactacccgggggagacagaccgtcttccccagcttggtcagcgaggcggccagagagccggtgtccggctccaggccggcgatgccccagaagaggaaaaaagtgccagtctgccggacctccggcagggaaagaaatgcctggaacatggcccggtctccggccgtccgctcctccggggagagggcggtgagcaggctgcggacggacttacgcagttgtttcttctgttccgcggtagtggatggcatgttggacctcctttgctttttcggcgccggcgaggatctcgatgagcttgagggcaaagtcaaaggcgcagccggcggagcgggcggtgatgatgcgtccgtccactaccacaggacactccggccgaaccacggcggagcccatctctccctccatgccggggtagcagaccgcgctgcggcggtccagcagcccaaggtgggccagcagggtgggggctgcgcagatggcggccagataacagcccacagtgtgggctttctggatcagggccagggcgaacaggtccatctgcatggactccacgccccccttccctccgggcaggagcagcatgtcctgggaggagaggacgacctgctccagcgtcaggtcggcggcaacagcgatgccatgcccgccagccacggtggcggcgttcagccccaccagggaaacaggcagtccggcccggcggagcaggtcggcggggatcagggcctcggcctcttcaaagccttcggccaggagaatataaaccatggggagctccttcttaattcagattcaacaggggggagaccagggaccacacctcccggtggatctcctccaccgtgcgcagacggccgtcccccgtgacgcaggggatgacctgccagcccaggagccgggcagcctggagggcgctgtcccggcaggcggccagatagtcggggtccacctcgtggatgtccccctgagtgtgggtggctgcctcccggctgcggagcagctccagggagcagcgggtaggcatatccagatagaggaccaggtcggcccggggcaggcccagcttgtcgtgctcaaagtcgtccagccagcccagaaaggcggggcgctcctggggggcgcacttggccccctggtggacggcattggaggtagtgtagcggtcggtgaggatcagccccccctgggaatagtattccccccatacttttttcaaagaggcgtaccggtccaccgcatagaaagcggaggcggcgtagggattcacatcccctgggcgggagccgaattccccgcccagatacatgcggatgagggcggatgagggctcttggtactgggggaagaccaggcggcggaagggggtgcccgtctgttccacccgggcgcacagcgcctgaaactgggtggacttgccagagccgtccgtcccctcaaagacgatcagctttcccggcatcagctccggccccccttgccccggaggcgggcccccagagatctggtcagtaccagaggcagcttggccatccggccgatgcgcttgggctcccggctcaggcggtaggcccactccagccccattctgcgccacttctccggtgcccggtccacgttgccggcaaagacgtccagggcgccgcccaggccgatggccagcttggcgccggtgagcgcgccccaccgggccatccacttctcctgcttgggcgcgcccaggcagacgaacagaaggtcgggagcggcctgagacaccgcccggaccacgggggcctcgttatcaaagtagccgtcatgggtgccgcagaggaccagattggggtactgggcacagatgcggctgcctgcctcctccgccacgccgggcttggcacccagcaggaagaggcggccccccatctcgttgagctgggccagcatgtcagcggcaaagtcgatgccgggtacccgctccttcaaaggtgtgcccaaaattttggcggaataaaccacgccgatgccgtctggcaggaccagatcggcctcgttcaggatgcggcggaactctgggtccttctctgaggccaggataaattcagggttgggggtcaccacatagtgaaagctgccagagcggagcaggccggcgcccgcctgggcggcctcctcccgggtgaggtcatcgaaatggatgcccaaaatatctgttttcaaagtgcttcctccagaacttgaacagaatacagcccggccgggcagcgggcccgggggcgggatcatgcagcataaacagccctgcccgcaggccaggaccggaaaaatatcggggatctccgcgattctccgggtattatatcatgggaaaacggaaaagtctatgaaaaagcacgggaaaggcaaagcgtggttgacgccggggcggagaaggggcataatggagaaaaaatgggcagaggcccgaggaaaaggaggacaggcatgaaacaggtactgtggatcaacagctgtatgaggggggcgggacagtcccggacgctggagctgtgccgcacatttttggaagaactgagggtccgccgcccggggctgaaggtggcggagcgggacctgaccagggcggagctgcccgtgatgacggcggagctgtcccggcgcagggaggagctggccgcggaggggcgggaggacccgctgctcctccccgcccgggagatggcccgggcggatctggtggtggtgggagccccctattgggatctgggattcccggcggcgctgaaggtctatctggagtgggcctgcacactggggatcacatttggatacacacaggcgggggagcagcgggggctgtgccgggcagagcggctgatttatattaccaccgccggcgggccgctggaggatcggaatttcggatatgagtatgtcagaggggtggccgggatgctggggatcatcaatacccactgcgtcgctgcccagggactggatatccggggcaatgacccggaggccattttgcgggaggcccaggagcgggccgcccggctggccgcagagatttaagaaaacacagccgccagtacgctggcggctgtgttttcttctgtgatgcggcgggagttcatgtctccacaacgagatagccgttgcccagcgcccagcagcgcaggccgcgcgcctccagagcggcggtcccgccccggtccagctctgcccggatggtccgggcctcctccggggtgcggaccgtgtactgcacataggagtttacagagaagggggtgcacagagcagctgcctccgccaagggattgtcaaaggtgacggaggtcaaaacgcccccctcgtagaacttggagaaccccatgttctcatccgtgactgcggtgatctctccgttccggactgtgacgcggcatccggagccgccgtagaccgtggcgccgtccgcctcctgagacaggatatcaagctggccctgctcaaaggcccatagcggtccgtccccctgagtgagaacctccatccgcttggcgtgcaggcacaggtgataaaaggtcagagagaacaccacgatggtcaccagcaccacggccgacagcagggcggccagtcgcccacgggtgaaccggagggaagaagtctttcgctccattactcatcagcctcctgacaataaaagctatgacatattcggggggaactctgtcctcagaataccatacaaggggaaaaactgcaaggagccaggggggcttttatcttgtttgccaggggaaaagctgatatactatacaataaatcattcgatcattcctccggctgtgggccggaaacaggaggacagaccctatgaaaaaactgatggtcctagatgggaattccattgtcaatcgggccttttacggcgtgagccagaacctgaccacccgggacggccagcccaccaatgcggtgttcggctttctggccatcctgaacaagctgctggacgagtgcgaacctcaggcactgtgtgtcacctttgaccggaaggcccccaccttccgtcatctggcctatgagggctataaggccacccgcaaggggatgcccgacgagctggccagtcagatgcccatcctgaaggaggtcctcgcggccctgaacatccccatgtacgagctggacggatgggaggcggacgacctcatcggcaccatctcggtgaaggatactgctgccgggtgggagaccgtggtggtcacaggggacaaggactccctccagttggtgacagagaccaccaccgtcaagctggtgtccacccgcatgggccgtaccgccacccgggatatgaccccggagacctttcaggaggagtacggcttcgggcccatccacattatcgatctgaaagccctcatgggggatgccagcgacaacatccccggggtgaaaggggtgggggagaagacggccatggccctggtccagcggtatggatccatcgacctgctgtacgcggccatgccggagatcgagatggccgccggcaccccagccaagccgggagtggtcaaaaagctggccgagggggaggagatggcccgcatgtcctatgatctggccaccatccgcaccgacgctcccatcgagttcacaccggaggcaaacctgcgccgggagccggaccgggccgccctgtaccagctcttcctccggctggagtttgccaagctcatcgataaatacggactcaccgcaccccagggagagggggatacagagacggccccggtcaccggaacctgtgagagcgaggtggtggagagccgggagaggatggaggagctgcttgccctgtggcgggggctggaccaggtggatgtgctggctctgcccgggctggacaccgtgtgcgtggagtggcaggagagtgagagcctctcccgggcggcgctgtttttcgccggccggctggactgccacaaccagttcttgagggagctcttcgccccaggcatccgcaaggcggcccatggggtcaaggagctttggaaagccctgctggacgaggggatcgagcccggggacttcatctttgacaccgaagtggcggcctatctcctggcccctactgacggcagctacgagctggagaagctggggatgacctactacaaccaggagttccccaaggccgccgcctatctggaggagggggccttcggccccctggccgacccggtggccccaatgggcgccctgatatcccactgcgcccttatcggggccctccaccaaacgctgagaaagcggctggaggagctggacctgtggacgctgtaccagcagatcgagctgcccctctgcccagtgctggcggagatggagcgggaagggatgctggtggaccggggggcgctgatccgcttcggagagatgctctcccaggggatacagggggcccaggcagccatctttgcgctggcgggggaggagttcaacatcaactccacccagcagctgggccgcatcctctttgaccagctgggcctgcccccggtgaaaaagaccaagactggctactccaccaacgccgacgtgctggagaagctgcggggccagcaccctatcatcgagaccatcctggagtaccggcagctgaccaagctgaaatccacctatgtggacgggctctccaaggtgatcggggcggatgggcggatccacacctgcttccagaacacagtgaccgccaccgggcggctcagctcggcggagcccaacctccagaatatccccgtccgcaccgagctgggggcgcagctgcggaagatgttcgtggcgggaccgggcaaggtgctggtggacgcggactactcccagatcgagctgcgcctgctggctcacatggcggaggacgagcacatgatcggcgccttccgtaccggggaggacatccacacgatcaccgcctcccaggtgttcggagtggagccggaccaagtgaccggagagatgcgccgccgggccaaggcggtaaacttcggcatcgtgtacggcatctcccccttctccctgtcccaggacatcggggtgtcggtggcggaagccaaggagtatatggatcgatatttcctgaagtatgccggggtgcgggcctatatggaccgggtagtggagcgggctaaggaggagggctatgtctccacactgttcggccggcggcgctggctgccggagctgaagtcctccaacttcaatacccgctccttcggggagcgggtggccctgaacatgcctattcagggaacggcggccgacatcatcaagctggccatgctccgggtgcgggaccggctgagtacggaggggatggagggccggctggtcctccaggtccacgacgagctgatcgtggaatgcccggaggaggaacaggggcgggtgtgcgccctggtggaggaggagatggagcgggtgatctccctgtctgtccctctgctggcggagacttcggcgggcaagagctgggcggatgcccactgaggggaaaacagaaaaaacaggggagcccggacggaccgttcaagtccgtccgggctccttgttttgaaaagctcagtccttctcacgctcaaaggagaggatggcaccgtcagaggcggcaatgtcgtagctgtactccatgccgccggccttgaactccacctggtactccagatggtcgtcctcccactcccgctctgcctccagcccatagacctgggactgggagagcccagcatgggccagagcgatggatacggcctggtcctggccgatgtcggcggaggaggcggagggatgtggctccctctcgctcttgcggatgtccccggtggcgccatctaccgtgtactcatactcggtggtatccacccagaacttgacctcatactccagacggccgtcgtcgtactcccgcttgaccgacagggagaccacatccccctccgtcaacccggcgtgggccagggcggcctccttcgctccctgctcaccgatgtcggcgccggagggagcgccgccggagggggcggagccccggctctcctgctgggatttcaccacagccccggtgagggcgtcgatgtcgtactcatactcgctgccattggcatagaactccagctcatagaccatccttccatcctcatagtcgaagtctatctccagtacagtggcctgggcggcggagacgccggcgtgagagaaggcggcagcctgggcggcttccacgccgatgtaggcgctgtcgctggcctggccggaggtctggatcatgccgctgctgggtagtgtctgaacggaagaggagccgtcgctgccgccgatgacgccaatgtcctcggggtcggcggggcggaaggagaagagggaggtatagagcaggttcaggtcgttgatgggcagacccaccagctcctcaaaggtgtaaaggccggaactgctgtctgcgatggtctggatcagggccgccttgccggcggagatgccgtactcgtccgccttctgctggagggcatcattgtgctggaaggtctgggagaggatggcaccgttcacctgggcactggccaggacggcgtccgcctggctggtcagctcctgctggagccgggcgccccgggcggtgtcctcatcttccaccgtaatgaggatggagttggccagctcgtccacatagccgtttttgaccagggagcccacgatggcgttcatggccacatccaagggggtccccttcagctccatgccatccaggatatccaccgcatcctcgttggtgggggcggcggacagcaccttttcctgccggttcaccgtcagctccacaccggggttcacgtccagggagatgatggaggctacagtgttggactggaggtagtaaccgacgccacctcccgtcacagccagcacaaggcaggcggcagcggccagagggcgccagcggtgcttcttgggtctggcccgggccgccgtgatggggatcgcaccgccctgacggggggcacagcgggagaggaccccctccacatcgttgggggccgcgtgttccagagcggcgcgcaggcgctcttccaactggcgttctgtcatcaggcgtcatctccttccagaagcaggttcagtttcttcagggcccggcggtatttggacaggactgtggcaagggggagctccagcagctgggcgatctcccggtgcttcaggccggtgaccgcatggagcatgaccacctgccgctcctgctcggacaggagggaaagggcggcgcggaggacgtggcggtcctccgtggtgacatcgggggcccgggcgggcagggcggaccactcctcgtcggtcagctcctgggtcttcccccgctcccgcagcctcatcagagccagattccgggccacggtgagcagccaggccataggcttgccctgggggcggtagctggcggcggtgtcccagatgcggacaaaggcgtcctgtgtcacgtcctcggcgtcctgggggtgcttcaagtaggagagcaccagaccgtagactgcggtccgggtccggtgatagagttcctccagactgtgggaatcctcggctgccacccccagcagcagcgattccaggtcctcccgggcggagggggccccatatgtggttgtcaaaagtccaagcactgtcatggacacattctcctgtcatccttaaaatgcttgagacgggcgttttattgcatgcggaacaaaaaaatctgaaagcgtccgtacccataggatatctgtattatagcgggaaaacctcctccccgcaaggggcgaaaatcttcggagccccgctccagccgtccaggcaaaatgggaccgcccccttgtctcggggggaaaagcgtgatatgctggacacatctgagacagaaaaggggcgtacacacatgcagaccattggatttatcggcaccggcatcatgggacaggggatgatccgcaatttgatgaaggcgggctacccggtccagatctacaaccgcacccggagcaaggcagaggcgctggagcgggagggagcggtctggaaggacagcgccgcccagtgcgccgccggctgtggggtagtcatcaccatcgtgggctatccccaggacgtggaggaggtctattttggccccgggggactgctggagtccgcacagcccgggacggtgctcatcgacatgaccaccaccagccccaagctggcccagcgcatctatgaccaggcccgggagagggggctggacgccctggacgccccggtgtccgggggaaataccggcgcggccaacgggacgctggccatcatggccggcggcgatgaggccgtgttccaaaaggtgctgcccgtgctggagaccatgggggagaacatcgtgctggagggaggcccgggcgcgggccagcacaccaagatggccaaccagatcgccatcgccggggcgctggcaggggtgtgcgaggcgctgacctacgccaagcgggcaggcctggacccggcgcgggtctatgagaccatccgtaccggagcggcccggagcggccagctggacatcattgcccccaaggtgctcaacggggacttttccgccgccttctatctgcggcattttgtaaaggatatggggatcgccagccaggagtgccgggaccggggcctggagctggaggtgctggagcaggtcctggccgactgccggcagatcgaggcggagggccatgggggtgaggggacccaggccctgatccgccactacccctgggccgactgaggtgggcgtgccggtgacagggcgctttgctcccagccccagcgggcggatgcacctgggcaatttgtggtcctctcttctggcctggctggccgcccgcagcgcggggggaaggatggtgctccggctggaggacctggacccggaccgctgcacccaggcgtggtgtgaccaggtgatgcgggacctggagtggctggggctggactgggacaacgagccggtgtaccagagccggcggaccccggcctatgaggcggccttccggcagctggaggagaagaggctggtctatccctgcttctgcacccgggcggagcggatggcggcttccgccccccaccgctcggatggacaggcggtgtatgacgggcggtgccggcggctgacggcggaacagcgggaggatctggccaggcagcggaaccccgcctggcgcttggcggtgcctgaccgtgccagctccttccgggacctgctccaggggatgtatgaggaaaacctgctccgggactgtggagacttcattctgcgccggtccgacggggtgtacgcctaccagctggcagtggtggtggacgacgcctggatgggggtgacccaggtggtgcggggcagcgatctgctctcctccaccccgcggcagcggtatctgctggagctgctgggctgtcccgcgccggagtacggccatgtgcccctgctgctggcccccgacggccgccgcctggccaagcgggaccgggaccaggagctgggagcccttcagcagcggtttaccgcccgggagctggtgggccggctggcccatctggcggggctgatcccggaggcggcccctgtatccccggaggagctggtacccctgttcgcctgggagaagctgccccggcgggatatcgccatggagccctggtaaaagaggcggcggtctcgtttcgagaccgccgccgtgctctctgcttacagcaggaagaagcggacaaaggcaaatccaatgagaccgatgaggccgatcaggacgtagaggagaaaacgctccgccgtcccggtcccggcaccccagctctgatcgatctccgggtcctcatactcctgcgtgatgtcctccccctcctggtccagcaggagaaaagagtcggggaggcggacatgctcatccgggcctgtccccaggtccagctcgtccttggggacagccaggaggaaggtgtcctcctgcaccggaaaggtgactgggaccacccggtccagcccctgggagtcgtagacctcaaactgggcggtgaagccatagatctcccggcagcccaccccggcgaagagccagaggccctcgctgctatggaggaagacccctccggtataggggaagggggagtagcttgcggaaacgaactgatattttccgttgaggccccggtccagctccgccacaccgtggacgttgtcctcgctgtcggaggtgaaggacacatagagggtgccgtccacctctgtggcggccagggcctctatggcgcagccctccagatgatcggtccagcccagatagtcctggagcccctgggtgagggaggggaggtccccacgccagtggtactcgctgtcgtacaccagaaagatgaggagcagggccaccactgccgacaggacggcggcgatcagccgggtgcgcttcaccttttttagaaaggccagagcccgcttgggggcccgcaccaccggcaggctggcctgcatagcctcccggtgccgacggcactccggacactcctccaggtgggcctccacctgccgggtggtctcctcctctgtcagcccctccaggtaggcgggcagcaggtcccgtaccacgcagcagtccagtttatgttccatccctgtcacctcccatgatccgagccagctcctcttttccccggtagaaccggaccctggcccatacctcgctccggtccaggatgtccccgatgtctcggaaggagaagtcaccggccagccgcagatggatgacctcccgggtgtccgggtccagctgctgcatggcccggtacagggccagccggccctcccgctgctccgtctcctgcgctggatcgtcgggggcggcctgaccggccaggtgctcctcctccaggggaacgttccgcttccgccgctccagctccttgtaccacagccgcttggcgatggcgcacagccatacctgaggcgtgcagtccccgcggaaggagcccagctgtcggagggactggcagaaggtctcctggcacagctcctccgccaggtcagcgtcccggcacagggagaagagatagcggtataccagctgggcgtgctgttcgtacaggtcttcaccccggtgggccatggcggtcgcctccttccgtgtccttctgtctattggtcccagggacgggacattcgttacaggatctgagcggaaaattttgggacgcgcccaggctcctgatgggggacggccttttagatatcagagagggggccggcgtccgccggccccctccgtctgctatgtgtcgccgtagatctcccgggcctgacggagaaattcggcgtctttgtcatccagggcgtgaaggccggccgtctcctccatgtggtgggtgaactcgtgagccaccgtggcgaagagctcatccttccacccctcctcgtcctcctccgggagcagggcggcaaaggagccgtagtataggacgatgtaccggcccagcatatcatggcagtattcccccatgatgtacatctcaccggggggaaaatcagggtcaggcagggcctcctcctccagctggatgccgccgtccagctcctcaaagaaggcgtcggggaattccccggcgatctcctccagccagtcccccatctgctcgtaagtcggtatcataggccgctcctgtccccggggaggggctgcccagcccggtagatttgggaccatgataccacgggcgccggggaaaaacaagggtcagacttccagggcgagggagatgagcaggtcctggagccatacaggggctgcagcggcggcctggcggatggcggccgtcaccgcggcggggtcggcccccgggccgaaagtgagagcgccggaggcggcctggctcccgatggccaggggagcggaggcggagccgccgatggcgatctgggtgcccaccgccccgccgcccactgcgtaggcaccgaaggaaccgcctcccacggacagcaggccgatggccccgccgcccagggcggccagtcccaccgcacaggccccaatggcgatgcctcccacggacatcccgcccagggccagcagcaggcccagggagaccccgcccaggctgaacagtcccagggagatgccgcccagggcgaagagcccaaccgccacgttgcccacggcgaagatccccttggccacgccgaagccccgatcccccaggcggacgtggaccagaggcaggccgaacagggtgcgctggctcttatactcatagtgccagcgagggtaatagttgtggttgataatggtggtggggacttcctgggcatagggctccggctcccggccggtgaccagatagtccagcgtgacattgaaatatcgggccagggcggccaggttgtccatgtccggccggctgctgccggcctcccatttctggaccgcctgccgggtcacccccagcagatcggccagcccctcctgactcagccctgcttttttccgcagctcatagagacggttttgaaattccatagggactcctcctggatcaagtgataagaccggccggcacgccccggcggcaagaagaccttagcaaaaagaggcggacagggcaaccaaaagaggcatacaatttgacaactaacagttgcatccgggattttttcaactttttggtccaaaaacgggaaaagagacaggcgtccgccggggcttatcttaccacagcacaccgggcttgacaagcgcggtgggcggacagagcacggggaaaggattgacaaacacgatgcggaccgctagactggggaagatgaagtcccgggtgctggcggccccgtggcgtgagatcgggaggagagcgcggatggaagtgagctggctgctggtgcagcagatcgccagcatggtgctgatgggtctggccggctatggtgtgggaaaactgaagctgatcacaggggagcagagccgggtgctctcctgcatgtgtatctatctggcggtgccgtgcagcctgatgacctccttcaacacggccatggaggcggacaagctgaccggcctgctgctggccctgggggcggcagtgctgctccacctgctctacctggcgctcaatggcttgatgaaccggagcgggcacggacttgccccggaggagcaggcgtccgtgatctacaacaatgcaggcaacctgatcctgcccatggtaatggccattctggggcaggagtatgtgatctacaccagcgtctatatcctggtgcagaacatcctgatgtggacccatggccagaagctgatggggggtgcccagcagtttgattggaaaaagatcgtgaccacacccgccatcgccgccatcctggcgggactggcgctgttcatcaccgggctgcgcctgccggggcctctggtcaccgccatggaggggctgggcagctgcatggcacccttgagcatgctggtgattgggatcttgttttctgagctggacctgaagcgggtgctctgtcaggggcgcatctactgggtggcggggctgcgtctgctggtctaccccctgctctccatggcggtgctcctggccctgcgggtgctgtggccccacagcgacggggacaacgtgctgctggtcagccttctgtgcgccattgggccggcggcctccgccatcactcagatggcccagctctaccacaaccccaacagtgggtatgtctcttccatcaatgtgttcaccaccctgctgtgcgcggtgaccatgccggtgatggtactgctgtttcagctgggactggacctgctgtgagcagagggccggggcttttccggagacctgagatcagaaaaaagcgcctggacctcctttctcagaggtccaggcgtatctttttggttcagtccagctcctttgccagacggtcccgcagctggagcagggagtcgaagcgcccccagaggaggggctccagctcaggcgtggggggcagcaggtcggggaccatggccacccgcatccccgcccgggaggcagagaggatgccgtttcgggagtcctccaccgccacagtgcgctccggggtggtccccagggccctgcaggccataaggtagatctccgggtcaggcttgctgtgcgccacctgatccccggtgatgatggcggaaaaacagggacccaagccggtcatctccatccgccgctctgtccgggggcggccggtggaggtggccagggcggtggggacgccccggctccgcagcagctccagcacctcccccacgccgggcttcatagggacgccctccgtctccatccgggcctgggagcgggcggaacaggccgccataaatgcgtccttgggaaactccgccccaaagagatcttccattttctgaaaaatgtcggcacggttctggcccacgaactccagataggcttctcccacctggggccagcccatttcccggctgacggccagccaggtctgctgggtgagacgctcggtgtcgaacagcaccccgtctacatcaaagacgacgccttctatcttcaagctggtcataccttcccaatgtccgtgcggaagtgcatgtcctggaaggagatgggtttgcaggcggcgtaggccttttcgatggcttcctccaggtctccgcccacggcagtcactcccagcacccggccgccggcggtgaggacggtcccgtcctcacccagcttggtgccggcgtggaacaccgtggccagctttccggctgcctccagaccggagatggggtagccgctctggtacttcaccgggtagccgcctgaggccagcacgatgcagcaggaggcgccgggcttccagcggatgtccatctggtccagggtgccgtccacacaggcttggaaaatgtccatcagatcggtgtccagcatggacaagaggggctgggtctccgggtcgccgaagcgggcgttgtactccaccaccttggggccgtcctgagtgagcatcaggccgaagtagatgactcccttgaagggcctgccctccgccttcatggcggccactgtgggcaggaagatctccttcatgcagcgctcggcgatctccggggtgtacttgggggaggggcagaaggcgcccatgccgccggtgttggggccctgattgccgtcgtaggcccgcttgtggtcctggctggacagcatagggaccaggtgctccccgtcgcagaaggccagcacagtcacctcgggacccaccatgcactcctcgatgaccacggtggagccggaggcaccgaatttgtggtcctgcatcatggaacgcacggcctcctcggcctcctccacagtggcggccaccaccacgcccttgcccagggcaaggccgtccgccttcaccacgatgggggccccctgcgcccggacataggccagggctccatccatatcggtgaaagtttcgtatttggcggtggggatgtggtacttcttcatcagctctttggagaaagccttgctggcctcaatgacagcggcgttggcccgggggccgaaggcggggatccccgccgcctccagggcgtccaccatgcccagggccagggggtcgtccggggccaccatgacgaagtccatcgcgtgctccttggcccaggccaccatggcctccacgtccgtggccttgatgggcacgcactgggccacctgggcgatgcccccgttgccaggggcgcagtacagctcggtcaccttgggactctgagccagcttccagcagatggcgtgctcacggccgcctccgccgacgactaataccttcataaaaacacgacctttcagcaagttaggaattaggagttaggaattaggaattgttccgtcacggacagactttgtgatggaggagagcagttttctcaattcttcgcagtccgaatggagagagtcatattcagtgcgggaaatgtagtcgcaggaatagagcagttccagccagtagagagtctccacacattccttcaaggcaatgtacagtttatttaagaagtccttccggctgcttccgtactgagcctctgcgatattagcgccaatgctggtgccgctgcgcagcatctgcttggagaggacatattccttcttctcctccgataaatatcggtaagcaaagacaatgcgcttggcaaaagcaaggcttttgggcatcaggatacgttcgctgctcataaattcctaactcctcattcctaattgaattagtgatggaacagccgaatcccggtaaacgccatgaccatgccgtacttgttggcggtggcgatgacctgatcgtcccggatggagccgccgggctgggcgatgtactgcacgccggacttccgggcccgctctacgttgtccccaaaggggaagaaggcatcggagcccacagtgaccccggacatctgggcgatccaggcggccttctcctcggcggtgagcacctcgggcttcacctggaaggtgttctgccatacgccctcggccagcacgtcctcgtactcgtcggagatatacaggtcgatggcgttgtcccggtcggggcggcggatgttgtccacgaactggaggcccaggaccttgggatgctggcgcagccaccagatgtccgccttgctgcccgccagtcgggtgcagtggatgcggctctgctggccggcgcccacgccgatagtcatgccgtccttcacatagcacacggagttggactgggtgtacttcagggtgatgagggagaggagcatgtcgtgcttggcctgctggggcaggtctttgttctcggtgacgatgttctggagcatctcctcgctgatatccaggctgttgtatccctgttcgaaggtgatgccgaagatattgcggcgctcgatgggggcgggctcataattggggtcgatctcaaccacattatagcctcccttgcgcttggctttcaagatatccagggcctcgtcggtatagcccggggcgatgacgccgtcggatacctcagcggccaggaagcgggcggtatccccgtcgcacacatcggacagggcggcccagtctccgaaggagcacagccggtcggccccccgggcccggatataggcgcaggcgatgggggacagctctccctccggggcaaagtagatgcgccgttctacatcgctaaggggcaggcccaaggcggccccggcgggggagacgtgcttgaaggaggcggcggcgggcaggccggtggcctttttgagggccttcaccagctgccaggagttcagggcgtccatgaagttgatataccccggacggccgttgagcaccttcaggggcagatcgccctcctccatgaagatgcgggcgggcttctggttggggttacatccgtatttcagttccagttctgtcatgatctgcacctctttttctcagtttgggactttggaggcggcgtgggcctgctctccgtgcttgttgaggatgacggtctcacgctccccggtggccaggtggatatactgcacaaacagggacaccttgttgtcctcattcaggctggcccatacctgactggccagggtctcagcgtcaggggcggagacagacacccggcggggctccccctcaaaggaagggagaggttcggcattctcctggtaggtgtggatgaagcggccctccccagccaggggggcgtcgtactcatagaagtagcggtggctgcaggcggggtcaccgtcggcggatttcaggatggacaggcagaaggagccgtcctggtccaccacgccggagatgcggggggtatagttggggccgtcgggctcatagcaccgggtgcgcagggcgtcgatgtagctcttgcccgccagcaggctgtcccggatggtgtcggtctggtctccgttggtgaccaccgtcacctcccccacccggcgcaccgggtggtagatgataagggaggggtccaccatcttgctctcgtcataggcccgggtgcggataccgtccccggtggcctcaaagatgcggttacggctgttcccgctgcggcccatgatgaagtagatgatgaccgccttctggccatcggcggagcggcccaggacgatgccacggccggggtaggggtgagcttgcaggagttcatttatatcaagaattttcatggggatcctccttgttgtcctcatttgtggatgatgggggagacttgtgataccatgtgagatagcgggaccccaggtggatgagcagggggaccgctcctgccagcgtgaacagcaggccaaaaagactgtagaaatcactgtaatccaggctgctgacgaccagaagcagggctccgcccagaagcagaaagccggaggcgagaatggtcttggcggacatgagatgctcctttctttctcatttggggtcctgatcttgtgtaaatgtgtgggtcctgcgataccaggaccaaaaatcacgccacaggcagagtagcagcggaatcacccccagcaggacaaaaatcaggctgagcaaagggatgaagtagctcagccagccgggcgcagccgcccaatagggcaggaagatcccgcccaggagcagaaagccggaggcaagaatggtctggatggacatgagggtgctcctttctttctcatacagcggcaaaaagggcgcaccgcgtttcggaaaacgggtgcgcccagacggtcggcatggtccacaacgatgctccctgtggtccattccacttccgtcagttacaccgcgtgtttgatctttgtgtggaggcgtattacaggcagtccaggatgcggaccgcccggccctccaccttcagccggtcctggcagaagagggagacggcctggggcagcagcttccactcgcactgctccatgatgcgccgctggaggacctccggcgtgtcgccgggcagcacctcagctgccttttgcaggatgatggggccggcgtcacactcctccgtgacaaagtggacggtggcaccagagatctttaccccgtattccagagccttctcgtggacatggaggccatagcagcccactccgcagaaggaggggatgagggaggggtggatattgatgacggcgttggggtaggcctggaacagctcctccgtgaggatggtcataaagccggccatgaccaccagatcggcccccaccgtctcccgcagcaggcgggtcagggcggcagtgtagccgcggctgtcggagaagtcccgccgggggagcacatagccggggatgccggcgttcttggcacgctccagggcgaaggcgtccggagtggaggagatgacggcggagatccggccattcaccagctctccccgcccctgggcgtcgatcagggcctgcagattggtcccgccgccggagaccaggacggcgatacgtttggacatagcgaacctccgagtgagttaggaattaggaagttagggattaagaatttggaatggatggagtgcgcctggggcgcacggtttgaaatcggtccggcggagccggagacacaattcccaactcctcatttctcattcctaatgtgatcagaccagctccacgccggcctcgccggggatgacgcggccgatttgataggcggtctcaccggcccccttcagaacggacagagcctgctcggcctgctctgcgggcagggccaggatcatgccgatgcccatattgtaggtgttgtacatgtcacgctccgggatgcccccggtcttctggatcagatcgaagatgggcaggcgggggaaggtgctcaggtcgatctgggcggtgagcccctgggtcatcatccggggcacattctcatagaagccgccgccggtgatgtgactgacggcatggatgtccaccccggccctcagcagggccttcaccgatcttacatagatgcgggtgggggccagcagggcctcgcccaggctcttgccgcccagatcctcacggggcgtcttcaggtcggcgtgctccacgtcaaacaccttccgcacaagggagaagccgttggagtggaccccagaggaggccaggccgatgagcacatccgcctcgctcaggcgtctgccgtcaatgatcttttcctcatctaccagcccgacggagaagccggccaggtcgtactcctccttggggtagaagccgggcatctctgcggtctcgccacccaccagggcacactccgcctggcggcagccctcggtgatgccggagacgatgtccgcgatgcgcccggggtagttcttgccgcaggcgatgtagtccaggaagaagaggggggcagcgccgccgcagatgatatcgttgacacacatggccacgcagtcgatgcccacggtgtcatgcttatccatcaggaaggccagcttcagcttggtacccacgccatcggtgccggacaccagcacaggcttcttcatgccggtcagatcaggggcaaacatgccgccgaagccgcccagggtgcccatcaccccggggatataggtggactccaccatgggcttgatgcgctccaccgcctcatatccggcggtgacgtccaccccggcggcggcgtaggactccgaatgggagtttttcatcttaaaaacctccaaatcactgtgttaaagcctcgcagactttccgccgaaagcggaaaggacaacaaagagtccgcaggcgaatccatttcgccgcaggacatcatgacccctggccgtggcggccagggccgcctttcctgtggaaaggcgaggggatatcgacggggaagcgacgttgcctccaggggggacatcgcccccccctggaggggccttattccctgccgttccagcagtaggtgcaaaccttgtcccggtccaggccgatggactccagcagcccctccagggactggtagcccagggagtcgaagcccagcttctcgcagatggccttcagcatgcactggccccgctcagtatgtacgtcggcgtactcatccagatgctgctgcccctcatccccctccagctcctggatggtgcggcgggccagcaggtccatgtcggagttgccccgggagaagttcagatacttgcagctgtgcatgatgggggggcaggcggagcgcatatggacctcctccgcgccggactcatagaggaattccacggtctcccgcagctgggtgccccggacgatggagtcgtccacaaagaggagctttttgccctcgatgagctcaggcaccgggatctgcttcatcttggccacctgcttgcggacatcctgattggtgggcatgaaggagcggggccaggtcggggtgtacttgacgaaggggcgggcaaagggcttgccgctgcggttggcaaagccgatggcgtgggggacgccggagtcaggcaccccggccacatagtccaccttgggcagctggccccgggccacctcgtcccgggccatgatctccccgttgcggtagcgcatgacctctacattgatcccttcgtagttggagttgggatagccgtagtaggtccacaggaagccgcagatcttcatctcctggccggcgggggagagggtctcgaagccgtcagcggtgatgcggacgatctcacgggggcccagctcgtaggcgtcgtggtagtccagcttgtggtaggcaaaggactcgaaggagacacagcagccgctgtcgttctgccccaccaggaccggcagacggccgagccggtcccgggcggcgatgatctcaccctgctctgtaaggagcagcagggtgagggagccatcgatctcctcctgggcgtgcaggatgccggagaccaggtcatccttctggttgatgagggcagcggccagctcggtggagttgacctttccggagctcatggccataaactgatggccgtggtcggaaaaataccgctggatcagctcctcggcgttgttgatgatgcccaccgtggtgatggcgtacagtcccaggtgggaccgtaccagcaggggctgtgggtcagtgtcgctgatgcagccgatgccgctgcacccgtggaaatcggacagatccttctcaaacttggtgcggaagggggtgttctcaatggagtggatctgccgctggaacccatctttggcgtcatggatgatcatgccgccccgccgggtgcccaggtgggagtgatagtccactccaaagaagatatccagggtcacatcctggtgtgaaactgcgccaaaaaagccgcccatgtggtcctcctaaaaagtttagagtgaagagttgcgcgtggagaaaagggaaagaggagaacatactccctcgctccccacccccctgcgcctgcccagggagatctatttcctgtgtttgcggatcaaaagccaggccagggtccccgcgcccaggatcagcagcgccaggagcagaaggactggccccggagagccggtcacgattacggcagtgggaccgtccgctgagccgatgatccccaaggcttatttccccatcaggcggcgggccatctcctggtaagcgccctccacgttgcccaggtcccggcggaagcggtccttgtccagcttctccccggtcttggagtcccagaagcggcaggtgtcggggctgatctcgtcggccagcacgatggttccgtcagaggtcttgccaaattccagcttgaagtccaccagggtgacaccgcactcggccagggtcttcttcaggaagtcgttgacctggaaggcgtacttcttgatggtgtcgatctcgtcccaggtggccagcttcagggctacggcgtggtagtcgttgatgaggggatcgtgcaggtcgtcgttcttataggagaactcgatggtgggggcgtcgaacacgatgccctcctccacgccgtagcgcttggcgaaggaaccagcggagatgttgcggatgatgacctccagggggacgatggtcaccttcttcaccacggtctcccgctcgctcagctcctccacaaagtgggtgggcacgccggccttctccagctggcccatcaggtagttggtcatctggttgttgatggcccccttgccggtgatggtgccctttttcagaccgtcaaaggcggtggcgtcatccttgtaggacacgatgaccagacccgggtcctcggtggaatagaccttcttggccttgccctcatacagctgctcgactttcttcatagtagaccgtcctttctttttctcaaaaatctagttgatcgggaagcagaaacctgcttgagataggagttgaaaagcggtgctggggtgcctaaaatgcgcgcgcagcgcgctccatcactccgatttcctgtctggatcaaagctctgcctggagcttggcctccttggcggcgatctgctccgccatcttctcccgggcggcgtccagcttggcggccagcacatcgtcggagacggaaaggatctgggcggccagcacagcggcgttcttagccccgttgatggccacagtggccacggggatgccgctgggcatctgcacggtggccagcagggcatccaggccgtccatggcgccccccttcatggggataccgatgacgggcagggtggagttcccagcgaaggcccccgccaggtgggcggccatgccggcggcgcagatgagcacgccgaagccgttggcccgggcaccccgggcgaactcggcggcagcggcgggggtgcggtgggcactgaggatgtgggcctcataggggatgccgaactccttcagctgggcgcaggccccctggaccaccggccagtcagaatcagagcccataatgacagcgactttcttcataaaaaactctcctttcaggatcccggccgggggacaagcgaaaaggagcggcccgggccgctctccccggggaaaagattcaggccgcccgcctggaacggacagcctgggatcgcttacctgttatttttgggcgcacaaatccccccgcaggatgctgtgctgccgacagatggaagacaggcacacaaacataggaggacctccttgcccaacaatgaatggactttcattttatcgaaaaatcccgatatttgcaagggggcagggcatttttgtcagcttccacaaggagcgggagaaaaaatgacagggaagtcgtcaggacggcgggggcgggctcacagcaggcccgccgtgaccaggatgcgcttgacctcgtcggcccgccgtgaccaggcggcggccgcaccgtagtcccggcggcgctgatccacccagcccgggtcctccgccagcgcctgctggcacagatggaggaactcctccggggagtgggcgccgtagaccacatcggggaagagctccacctgttccggccacagcatggatacgatgggcttgccggtggagagatactcatagagccggggcgggaccacgtcgttatagggctggctgtcccgcagcaggtccagcagaacctggcagcggcccaaatagtcggggacctccaccagcgggcaggggccggccagcatcacattggacaggcgggagagacggcgcagcagagggttttcttcccggcgccccagcagcaggaaggtccaggcgggccgggcctgggcggcatagaggatgggggtcaaatccaggtcggcatggatggtgcctgcccagcccagcaggggcccgggcaggtggtccagctccccccgacgcccggcggagcccgcggcggcgaagagagggtaattcaccccgttgggaagcagcgcgatgttgccgctgcacggggagaggcggtcggccagccctggggaagcggcaaagaccacgtccgccgcaccagccagactgccctcccaccggtcgggcagctcgtcccacacctggtcgcagtcgtagaccagaccgtcgtactccagagcatccagggcgtggatatggacaggggaggtggtccacagaaggggacggcggaagcggtgccgggccagcttgtcggcgagaaagcggatctggcgctgccgggagagccggaacagccggtcgtggcgctcatccacagggagggcggggggcatggtatagacggtgacgttggggcggaccttcctgcccggctggcgccagcgttgatccaacagtccgccgccggggcagaagtagaggacctgggcgtccttgagccgggtgatcaggtgctgggtccggccgggggtggggctccagggctcggtggagagacagacgacttgcttcaaaagggaggacctcccgtgttctcatgatctaacaaaaacggcttgcctcggggccgggagcagggtataatatccctgccggccggtcgggctttgaccggtcatatctcactttattatagtcccggggccccggcgggtcaagggaaggaaaggcaggaagtttttccatgttatccgtgcttcagacattggatggaggggccttgctctggatccaggagaacctgcggggactgttggaccccatcgtggagggatatactacactgggcaacaccggcctgatgtggatcgtgctctctctagccatgctgtgctggaagcctacccggaaagcgggggtggcggccctggcggccatggtgctggggctgctgtgtaccaacgtggtcctcaagcatgtggtggcccgcccccgcccctggctggatgtggcggggctggtgccgctgatccaggagccggaccccaactcctttccctcagggcatacctgtgctgcctttgcggcagcatccgcctggtggcgggcgctgcccaggagatggatgaggtggaccgggctggtgctggcggtgtgcatgggcctgtcccgcctgtatgtgggggtccactaccccagcgatgtgatcgcaggggcactggtaggcctgttctgcggctgggcggcctggaagctgctgcagctgtgggaggagcggcggggatctaggctccgctgaattgccatagaggagcgcagaagcgccgcccggcatctaaacagatgccggacggcgcttttctcttgggagttcatccccgctttcgcagcaggaaggtgaccagaaagatgccggccagatacagggtgatggaggcgccggcggaggaaccgatgtagtaggaggtcatcagcccggcgatcccggcgcccaccgcaaagagcagggagcacaggtggtattggaacatgttccgggagatgttccgtgccgcggcggcggggaggaccaggagggagttgatgaccagcaggcccacccaggtcatggacaccgtgaccaccacggcgatggcggcggagaacagggcctcctgccagaagacgcggaccccgcggctgtccgccagggcgggatggaccgcggagagcatcaggtggttgaaggacagaccccacagggccaggaccagcagcaggatcagggccagcaggccgatcttgccgggctccaccgagaggatgtcgccgatgagcagactgttgaatttggtaaaggagcggctgcccagggtggagatgaagatgcccagtgccaccgcagtggaggagaagacgccgatgaccgtgtcgctggccagccgggtgcggcggcggacaaagttgaaaagcagggcaaagaccagggagaagaggacggcggcccaggtgggctcggagaagccgcaaagggcaccgatggccatgccggtgaaggcggagtggcccagggcgtcggagaaaaaggacatccggctgtggaccaccatggtggacaggatgccgaacagaggggagatgactagcaccgccagcagggcgtttttcatgaagtacatggaaccgggctgggcccactcaaagggcagcaggtccaccagtgcgtaccagagctccatcatgcctgtcccccttttcccacccgcaggtggaaggtctcataaaattccggggaggagagcacctcgtccggcgggcctgacttgagcacccggcggttgaggaggataaccttgtcggcgaactggcccagggtggcgaagtcgtgggtggacaggaagatggacaggtcatagctggtgcggatctcatccagcatctccagcagctggtgctccccctcgatatccacaccggacaggggctcgtccaggatcaaaatatggggcagcggctccagggccatggccagaagcacccgctggagctggccgccggacaggcctcccatgggcttgtccagcaggtcctccccatggactcgggccagacagcgggccaccagctcccggtggcgcctgggcacgggcaggcagacaggccagcgggtgacggcggcggcgaagaagtccagtacgctcaccgggtccccccggtcaaagctgggggactggggcacatagccgatgagggggcgggtcccccgggcggcgaggggagcgttggccccgtcggacagccggacggcgggcccgccggcaggggagaaggtgatggtgccggagtatggcatctgccccaggatgctgcggaacagggaggacttgcccgccccgttggggccgatgagggcggcgatctctccgcagtggaggtggaaggacacatcctccaggatgtcctccccttggatgtggaccgacaggccctccagcttcaggcagcaggcgtcggagcagcccccggccagcctgccgtgcttgatctttctcacagctgatccaactcctctcccccaaagaaggatacgatggtgttcacgttgctccgcacgccttccagataggtggacaggtccccctcctccgggccgtccatgagcatggtgagctgggccacctgacagccggtttcccgggagatggcgttggcggtggcgtcagagccgttgacctcggtgaagatgacgggcagctggtgctccttcaccagctgggtgatctcattgatctccatggcgctggcctcgctgccctcctcctcctcgatggaggccagcaggggcaggcccagggcctgggcaaagtagcggaagccgtcgtggaaggtgatgagggccgcgccttctgcccccgccagggcctgggtgcagtcgccggcaaagctgggcagctggccggcggcctcctccccattgcgggcgtaggcgtctccgtggtccgggtccgccagggcgaagccctcctggagattgcgcaccatgacggcggcgtttcctgggtccatccagtagtgggggtcccagtggccgtggtcgtggccaccgtctccctcctcgtggatgtggtccgcgttttcaagcagcgccaccccctgagagcagtcgatgaccgccgcgctggaggcggccagggcgtcatccataaagtcctccagcccggcgccgttcatggcgatgacatccgcaccctcgatctttttcatgtcgtccaccgacagggtatagtcgtggaggcagctcacagagccggtgttcagccgctccacggtgacgccctccacgccctgggcaacggtccgggcgaagagatagaccggataggtggtggccaggacggtcagcccctcctcctgggaggagcccgagggggcctgggtgcagccgggaagcaggagcaggacggacaggagcatggataaaatgggtcgtttcatgggatacctcaaatttcatcagagtggatcgaatcacattattatagcgcgatggcggggatttgtaaacggatagcggggaaagtctctttttgccccggcagaagggagaagaacactccgcccgtcagggctcagaaggcgccggcttcgtcgccgaaccaggtcaccagcaggtccacgcaggcaccgtaggactggatgcccagatcttggccgttgctcttcagaaaggtgtcaaaggtctgggcagcggcctcctccacgggggactccagagcacgccaataggcgttgttgtcctcccaatcggtggacagctccggtgtaaaggaggccgccgcgatctgataccacagatccggggagacggcgtagagggcgttgcacagctggatcaggcccatcagccatccggagtactggaacaccggatcgccgcaggacaccgccgcggcgatgcccacaaaattggcctccagctcggagaagaccatccgctggtgggacatctcgtgggcgatggtggccggcaccaggcaggcgggagcgtccacgttgacattggcctcgccggtgaaagggaagtagacgccggtgaagcccatcatgctctgcagccgggagaagaacatgggcttgcaggtcacggagggcatagccagacaggggagcttctgctccagctcctcatagacggagactccccggcggaaacagtcgtccagatcctcagcgaagtggccctcactgtctcggaccatctgggtggagaggtctgcggcctggcaggcaaagtacagcgtgacctgagccagggtggacacggtgtagggccgggtctccagaccgctcttttctgcgaaggaggcggagtagtagcccgcagaccaaagccagcagtagccggtccatacccaaagcagggcacagagcaggcagaccagccgccggcccagctcatgcggagcgtggagccggacggccagcaccgtgccgcggatgaggcagagagcgcaggcggtgagaaagaccgtgaccagcacctccgccagggagaaggggagcggggcagacaggcggcccagaagctgctccgccggtgccatgacatggatgacccagccgtccatcagggcctgacggccccgaaacaggtagaagagaagagagagcaggacaggggggagcaggggtaggagcggacgcaggcggcgggtggctttttccttggtttccatgggacctcctgggacgggtcagatcaggacggggccggtggtccactccagtccgccggggcggggagtggagaaacacaggccgtacaggtcggtgcagcgggcctccagctggaagagtctgcggcccggcctgtccagggaccgggcgtgggccggcttggtgagggtggggagggaggccgctcccttcatggcccgcaggagctcctgcccccgtggggtgaagcccagaacccggaggtagggcggggcagccgggcggtcggcggcggtcaggcccaggaaggcccacagcaggagacggcgcaggcgggcgtgggagtaccgcttggtcttggacagggtgagaaattcctccacagacagggccctgcttcccgcctggacgagccgggcgggaagcccctcctccacaccggagtccgggaggagggcccactccgcctggggcagagagcggacacgggccaggagggcacgctccaggtgggacagggaggcgggctccagctcctccggccagggggcgggcaggaaacagtctgccaggtcccgccggccggcggcgatccactcccggaggatggaggcggaggcgaagccctccgcggggcgcggggcgtcgtggcccgctccctggcgggggaccgccagcacctggggggaccagcccagggcggaggcggcccgcaggtactccacccccaggttgtcattgggacgggagaggaccttcgcccgctccgatcccagcagggccgccaccacagcctggcggcaggcggcgaagggcatcccttcgtccagaaagcggctcaggcccgcccggtatgcctcgctgtccaggcaggcggccgccgcggccagggcggccgggtccccgctctcgctgccgaaggagaggacgtccaccacgccgcaggcccggagcagggcgacggcgcccgtagcaaaggactcggcggaggaggccgcccacactgtgggcagctccagcaccaggtccgcccccccggccagggcccagcccgcccgggtccacttgtccgctgcggcgcaggcgccccgctggacccagttgccgctcatgacagcgacgacggcgcagtccgcacccaggagcccccgggtgcgggcgatctgataggcgtggccagtgtggaagggattgtattcggctacgataccggcagttttcaagcggaacgccccctgtctgataggatgtctgtatggagatgcttgaaaaaatgtatgatgaaatccaaaaaaatggttgtcctccaggggaaaaagcagtagaatgattccatcaggtacagatacagtttagtacattccgcccagataggcaacaaaaactgtgaaaaggagatcgtttcccatgaatattctggtcatcaacgccggcagctcctccctgaagtatcagctgctcaaccccgagacccagcaggtgctggccaagggcctttgcgagcgcatcggcatcgacggcaagttcacctataagccccagatggagggcaagcaggtgctggacgctatcgacattgccatgcccacccactctgaggccatccaggctgtgctggacgccctggtggacaaggacaacggcgtgatcggctccatgaaggagatcgacgcggtgggtcaccgggtggtccacggcggcgaggctttcaaccagtctgtcctcatcaccgacgaggtgatgaaggctctggaggactgcatccccctggcgcctctccacaaccccgccaacatcaccggcatcaacgcctgcaccgccgtcatgggcaaggacgtgcctcaggtggccgtgttcgacaccgccttccaccagaccatgcccgccaaggcttacatgtacgcgctgccctacgagtactatgagaaggacaaggtccgccgctacggcttccacggcaccagccacaagtacgtagccggccgcgccgccgccatgctgggcaagcccatcgaggagctcaagctgatctcctgccacctgggcaatggctcctccgtcaccgctatcgatgggggcaagagcgtggacaccaccatgggcttcacccctctggccggactccccatgggcacccgctccggcgacctggacgccggcatcctggagtatatcatgggcaagtacggctatgacatcaaggagatggtgtctatcctgaacaagaagtccggcgtgcagggcgtgtccggcgtgtcctccgacttccgtgacctggagaacgcccacaaggaaggcaacgagcgggctggcctggcggtggatatgttcaactacggggtgaagaagtacattggcgcatatgccgccgccatgggcggcgtggatgccatcatcttcaccgccggcgtgggcgagaactccgcctcccagcgcctggccatcgcttccgacctggagttcatgggggtcaagatggacgccgaggccaacagtgtccgggggaaggagaccgtcatctccgccgccgactccaaggtgaaggtgctgctgatccccaccaatgaggagcttatgatcgctatggataccgccgccatcgccaagggctgagcgcggtcctgaaaacaaaaaacgcccggcagtcacagactgccgggcgttttttgatgtcgttccgggcccctttttgtgtccacacgctcttggggagaaagatggcggcggcagcgccgccagagggacgcaaaaggacttagggatctttacagggcggacaggaccagctgctcgccgtcggaggaggcatccagccgggcgaccgggtgctgccagctgtcgatgatgcgggaggcgatggcatcctccagctccttctggatcaggcggcgcaggttgcgggcgccgtaggcggcggaataggactttttcaccagatagtccagcaggctgtcctgccaggtgaagacgatgcccttctcggccagggagtcctggagctcctggagcatcagggcggcgatggccttgaagttgtcctctgtgagctggttgaagtagacgatctcgtctacccggttgatgaactcgggccgcaggaactcctgaagagccttcatggcccgctccctgccctgttcattggcggtgcgggcgaagcccacagagcccgatttggtgttgctgccggcgttggaggtcatgacgatgactgtattttcaaagttcaccgtccggccgtgggcgtcggtgatccggccgtcatccaggatctggagcaggatgttgagcacgtcagggtgggccttctcgatctcatcgaagagaatgacggagtagggcttgcggcggatcttctctgtcagctggcccgcctcgtcatagcccacataccccgggggggagccgatgatgcgggagaccgcgtgcttctccatgaactccgacatgtccagccggatcagggactccggcgtgttgaacaggtcgtgggccagctgcttcaccagctcggtcttgcccacgccggtggagcccacaaagatgaaggacaccggcttgcgcttggggctgatgcccacacggccccgccggatggcggaggagacggcgtggaccgcctcatcctgaccgatgatgtgctgcttcagccgctcctccagccgggccaggcgctggtactcacgttcctggatctggctggcggggatcttggtccacagctcgatgacgttggccagatgctccagcgtcagggcgggggtgggggcggcgtccagctgtcccttctcctgctccagccgaagctcctggctgcggatggcggcaagccgggcataggactcctcggtggcggcggccatcatgacctctttctccttgtccaggtcggccagctccttatccacctcggcccggcgggccagagtgcggttctccaggttcacattggagcaggcctcgtcgatgaggtcgatggccttgtcgggcagatagcggtcggtgatataccgctcgctcatggtgacggccaggcggcacatctcaggggagatgacgacctggtggtaggcctcgtagtagggggcaatgccctcgatgatctgcacgctgtcctcgatggagggctcctccacgatgacgggctggaagcgccgttccagggcggtgtccttctcaatgtgcttgcggtactcattgagggtggtggcgccgatgacctggagctccccccggctcagggcgggcttgaggatattggcggcgttcatggagccctcggcatcgccggcgcccacgatgttgtggacctcgtcgatgacaaggatgatattgcccagctttttgatctcctcaatgaggcccttcatccggctctcgaactggccgcggaactgggtgcccgccaccagggcggtgaggtccagcagatagacctccttgtccagcagcttatagggcacgtcgcccttggcgatcttcatggccagcccctcggcgatggcggtcttgcccacgccgggctcgccgatgaggcaggggttgttcttctggcggcggttgaggatctggatgacccgctccagctcccgctcccggccgatgagccggtccagcttgccctcctgggcgcgctgggtcagggagatgcagtagttctccagaaacttccgcttcacggggcgctcctgccccttgccgccgttcttgtccggccggggggcggcgtccttcttgggctcggcgtccccgccggcggcggcgccgaaaagctggttcaggaaggggaaagtggcggtgcgtccgtcgtcctcgtccccgtcctcccggtcctggggcatcagtccctccatcccctcggccccgccgaaggcggacatcatctcactggtgaggttttccaggtcctcgtcggtgatgcccatcttctggatcatgtcgtcgatgggcttgatgcccagctccttggcgcacttgaggcacagtccctcattcttggactggccgccttccaatttggtgataaagaccaccgccacatgcttgtggcagcggctgcacatggtgggctgcatctatgcaaacactccttccgggagagagaaattttttggaacaaagacaggataaccccgaaatgtgaacttgtcgtgaattcgcaagaaaaggctgggaacacagagagaaactcaacgaaagagcagaggcgccagcagggagagaggggtgtgggtgcagaaaaagcggaggagcaccgtcccctccaccgcctcctgggagatcagggagcccctcagaagccagcagaggatgaacacgatcagtccccccttcaccagcccgagggcggcgccgctccagtggttcagggtggacaggacaggcaacttgcaggccaggtccagcacccggctcagcagcagccagagaagcaggaccagggcaaaggagaccaggaagaggaacatccgggtcagctccagggccagataatccgccaccgcccgggcggcggaggtagtgacctccatcaccccatcctggatggcgtcctggatgggctggataaagtgctggtacaggctggaggcctgaagggcgtccaggacctcgtccagggggagctgggcgagccagtcctcctcgccttcctggccctcttccccgctgaaggcgtccgaaagggcggggggctgagaggcctcggaggtctcaggcggggggagcaccgcatgggtctgttcctccagcacctgagtgatgctccgttccagagcgggctggatcaggcggctcatgggccgggccagctggctggagatgacggtggcgccgatgaaggccacaaagacggccagcagggagcacagcgtcagcacaaagccgcggcggtagcccttccaggcggtgaggaggagcaggatgaggatgacaacatcaaaaatcacaaaagacatcaaaatacctcgcttggatcaggagaaaagggaactcaggaggggatatagagccaggcctgctggctgtcggccagcagggcgctgccgttgggggagagggcggtgaagcgggcgtcctgggtgtcctccagggcgcggtagagggacatgtcccgggtgtagatctccaggccgctgccggtgagcagggacaggtagcgcccggcggcggagaaggagagcacctgcccccggaggggggcctgggcgatgagctggcactgggggtcgatggtgagcacctgctcggcgccgccggcctggtagcggcccagcaggagcactgcgaagccgtccccgcccaggtggcagcccttgaggtagctgcggccaaaggagtaggtctcataatcggagccgtcggcggccaccgagagcaggcggtcctcccccagaacccacagctgctccgcctcatagtccaggtccagcaccgccaggttgcccagggagagggtggcggagggctcaatgctgtccaccggatagaggaggagctgactgaaaaaggagccgttctcctgcccgatggtgatcacggccaccgtcttgctgtccggagagacagcggcgtcggccacgaacacactggaaaagttcagctggatgatctccttccggctggtgctgttgacgttgtacaccgtgaccgagcccttatagccgctctgctgggcggtaacagccagccagccgctgtcgttgacccgggcggagaggagggtgccgtccacgtccagggaaaaggcctcctgaccgtcctgaaagagaaacaggctctctccgccggcgtcatagaccacgcctgcggaggaggaggcggacaggacgggctggctgaggggggtgacctcctcggcgtactggtcgccggagaaggagtagtagtgggcgccggcggcggagcactgaaggatgccccccttcagataggcgaaggagatgctgtccccgcccgcgtgggtgaagggggcggcggcgccggaggcgtcggtctccacagagcgcagggcgagccagcgcttcaccgcgtccaggttgaactggtcccggtagaccaccagggtcagggctcccagggccaaagcggcggtgaccagcagagccagcagccggaccagaatattcggtttttgggaggcggatgcctgctttgttgtctgatccttcatgttacctctctccccggggcgggagggggcgccaggcccccttacacaacgtcctcgtcataccacagcctggtcatatacagcccgccgggtgggacggtggggccggcgagggtgcggttgcccgagtccaggatggcggggatgtcctccggggccagcttgccctcggcggcatagaccacagtgcccaccatggcccggaccatgttgtagaggaagccgtcggcgcacacccggcactcgatcagctcccccttccgctccacctggaagtagtggacggtgcgcacagtggtgcgggtctcggtgcccacggagcgcaccgcccgaaagtcgtgggtgcccacgaactggctggcggcccgctgcatcaccgactcgtccagatgcttggggtagaaccaggcccggtccacatagaaagcgttgcccaggcgggagttataaatgcggtaggtgtattcctttttccggcaggagccgatggcgttgaattccatgggcacctggacggcccggaccaccacgatgtcgtcgggcaggcgggtgttgaccgccaggggcaggcggtcgcaggggatggtggaggtggtgcggaagttggccacatagacctgggcgtggacgccggcgtcggtgcgcccggcgccggtgcatttgaccgggtggcacaccacggtggacagggcccgctccagcgtctcggccacggtgacggcgtttttctggacctgccagccgtggtaggcggtgcccacatacatcagttttaaagcaatgtttcgttccattttatcaccaaaggggggcggatcttgtctttttcgggggcggtcagcggctgatctcccgcttgtcgctgcggcccatgagatagtccaggctgacgccgaagaagtccgccagggccaccagacccgggacttccgggtagctttcgttatattcgtactgctgataaccgcgcagcttcaaaccgcagatctcagccatttcccgctgcttcaagccgcgttcttttcgcaattcccgaagtctttctgaaaattttgccataaatacctcattcctcttgacatgcgcgtaaaacgcgtttattatatgattaataaacgcgttttacacgcattttttgggagggcaaatcatggagcagatgttgaaaataatgttttctgacaatccgaacttgccagaggaactatatacattctgtaattccatccccgattatgtcagggcggagcgggaatatctccagatcgcccggcaggtggcggaccggctggggtacgacctctataacgaatttgaggagaagctgaacgactatatggcccagcagctcgacgcctgctacctcttcgggctggggctgcggcgggagctggccgccgggctgatgctggaggagtgagggctcacagcccgaagcggcccagcacccctacccccgccgtgaggaccaggaagagcaggatgacggccgcgtcattgcgccggtatttcagctggcgcaggcgggtgcgcccctcgccgccgtggtagcagcggcactccatggcgatggccagctcgtctgcccggcggaaggcggagatgaacagagggacaagcagggggaccagcgccttggcccgctggatcaggttgcccgactcaaaatccgcccccctggcccgctgggcggacatgatcttgtccgtctcctcgatcagcagggggatgaagcgcagggcgatggacatcatcatggccagctcatggaccggcacatggatctttttcagcgggcccagcaggttctccagcccgtcggtgagcaggatgggggaggtggtgtaggtcagcaggaaggtgccggcaatgagcatcaggatgcggaccaccatgaagaaagcgttgaacacgccctccagcgtgatggtgaagatccagaagcggaccagcaccgtgtcccccggcgtgtagaacaggttgaggatggcggtgaagatgacgatgaacaccaccggcttcatgccccggaaaatggacttcaccggcaccttggagacggcgatggacacggccagcagcaggaacatgatgccgtaagtgacaaaggacttggccaggaacagggccacgatatacagcaccaccgcgatcagcttggtgcgggggtccaggcggtggacgatggaattgccggggaagtactgccccagcgtgatatccttcaaagccatttactccacccccttttcccgaagcctgcgcagaatggtctccttggcctgggggatggtgtagacggaggcgtcgatgtccacgcccatggcccgcagacggctgaacacccgggtcatctggggcacgcccagccccatgcgctccagttccgcaccgtggcggaacacctcccggggcgggccctgaaaggggatgcggccgtcgttgaccaccaccagccggtccaccgtgcgggccacctcctccatggagtgggagaccaggatgatggtggcattgttggactggtgatagtcccggatgttgcccaggatggactccactcccaccgggtccagcccggcggtgggctcgtccagaatgagcaccctgggctccatggcgatgacccccgcgatggccacccgccgcttctggccgccggagagctcaaagggggacttttccagctggtcgtcccgcagtcccacgaagcgggcggcctcccgcacccggcggtccacctccccctcgtccagccccatgtttttcgggccgaaggagatgtccttgtagacggtctcctcaaagagctggtactccgggtattggaacaccagccccacctggaaccgggtctgacgagtgcgcttggcatccgcccagatgtcctccccctggaagagaacctggccggaggtgggcttgagcaggccgttgagatgctggatcagggtggacttgcccgagccggtgtggccgatgatgcccaggtattccccggcgtaggcggtgaagtccacttccagcagcgccccccgctcgaagggggtgccggcgctgtaaatgtgggagagctttttggtctccagaattgcttccatccgttgtgttccatcctttttcagtgaagtggtgcacgccccgcggggtcgcgcccgaaaatatcacagttacggcaggacgccggtctgttttgccagatcatccagctgggcctggagatggcgggcctgcatctccagccgcttgacccgctgccggagggagaccagacacacgaccgcccacgcggcggccagagcggtcagtcccagcagtaccgtgggaaagctgtcatcaaacatctccagcagcagcctgggggcagaaaagaccaccagaaatgcggcgatgcccgcaaagacccgggtgcttctctctgtacagttcatggctggcttcctttctttgatgcagcgttcagcagctgacagagagcctgggcgcactcctcgtcgctgagggcgtccagggggacgtccagcccctcctgccgcagttcccacagcagctgagtggtgtcagggacagtgagccccacggagcgcaggccctccacgtcctggaacacctgccgcggggggccgtcggcaatgaccctgcccttggtcatgaccaccagccggtcggcctgggcggcctcatccatgtggtgggtgatcaggaccacggtgacccccttcttccggttcagatcccggatggtgcgcagcacctcggagcggccgatggggtccagcatggcggtgggctcgtccagcacaatgcaccggggctgcatggcgatgaccccggcgatggccacccgctgcttctgaccgccggagaggagatggggagcgtgctcccggaactcatacatccccaccgcacgcagggcgtcgtccacccgctcccggatctcggcgggggggacccccaggttctccggtgcgaaggctacatcctcctccaccacattggcgacgatctggttgtccgggttctggaacaccatgcccaccgtgcgccggatgtccagcaggcggtcctcatccacagtgtcgatgccatccacatacactttgccgccgctgggcaggaggatggcgttcatgtgcttggcgagggtggatttgccgctgccgttgtggcccagaacagccacaaaagtgccctcctggatggacaggtccaccccgtccagcacaacgggggcgacgccctcggcggaggtgtaggagaagcggagagcttccgcgcggatgatcgcgtctttcaatcaaaacaccccttgttttgagtcaggaatgagaagttggcaattgagaatttttttcgggagctggagagggcggcagtaaacggccgcgcccataactcctaactggtcaagatctgatccagcgcccggtggcgccgcaggggaggaccaggccgctctcggtgacggggaggcccagctcctggctgtcggtgcggccgccgaatttccgggagagcagggtctccaggatataggtgactacgctgggggccagaccggtggtataggagttgaggatcacaaacaggggctggtcggacagcaccccccgcaccagctccacaaaggggtagaggttctcctccagccgccacacctcgccggtggggccccgtccgtagctgggggggtccatgataatagcatcgtactgccggccccggcggatctcacgttccacgaatttggcgcagtcatccacgatccagcggataggagcgtcctccagtccagagctcctggcattctcccgggcccaggacaccatgccccgggcggcgtctacatggcacacgctggccccggcggcggcgcaggccaccgtggctccgccggtgtaggcgaacagattgagcacccggatgggccgtcccgcccgccggatctgctcttgggcaaagtcccagttggccgcctgctccgggaagaggccggtgtgcttgaaattcatgggcttgatgttgaaggtgaggctgccgtagcggatggtccagcgctccggcatgtccttcttctcccactgccccccgccggaggaggagcgggcataccgcccgtggggatgcttccagccccgatgggtccggggcgtgttccagatggcctgggggtctggccgcaccagcagctggtccccccagcgctccagcttctccccacggccgcagtcgatgagctcatagtccgtccaccggtcggaaacccacataacaggcacacacctctctggataagatcatttcaaaataaaactataatagtatatcatccgcctccccctccgtcaatgaaaagggaggggaaattcccccgtttttgtggagaaaaggggaggagaggagtggcttttttccaaaacagagggccagggttgtgtttttcctccgcctgtgatagaatcagacaaagtcagacaaaaccatccgctcccgtccggggacggagaaaacgaggtgccccatggaccatcagttcagaaacgccgtcttcggcggctttaaccggcaggatgtgctggattatttggagaccctggcccgggaaaatgcccagaagcgccaggagctggagcagagcatcggccgggccgaaggggagcgggacgagctctgcgcccagaagcaggcgctggaggagcagaagcgggccctggagggggagaaggaagagctgctgcgtagcgtgcagcgcagtcaaagcgaactggccgccctccgcacccagctgggcgagcgggagcagaccgcccgacagacgcagcaggccctggaggagagccgccgggaggcggaggcgctgcgggagcaggtggcccggctggagccggacgcggctgcctacgccgcggtgaaggaccgctccgccggggtggagctggaggcccaccgcagggcccagggggtgctggaccaggccaacagccaggcccggcatctgcgccagcagatggagcagtggatgacccgggtgggccgggagtacgacgccctgcgcaccgaggtggaggccactatctcccacgccgccgatcagctggacaaggcgggaaagtgcctggagcaggtgtccgccctgctctccgaccaggacgtggctctggaggagctctcccgtgcctatgacagcaccgccccggacaaggtgcccgccccggttccgctggaagaggagccctgagctctctgtcgtgtgacgctgcgcccggcactccagccttcccctgggggaaggtggcgcggcgtatgccgagacggatgagggggcgtcttttcgccgggccgatcaatataggacgggagagtctgagatttgcacctgtccgccccggtcactgaatgatctcatgtgggaaaaaacagaccgcgggagccgtattccctgatcggctcgctttctgcgctcctcatttgacaaagggggagggctgtgctatactgtcaccgattttaagaaaagggtggtggcttgatgtcggcgatccgctgaaaacaggacaagaaagacctggttctcatcttttgctgggatgggccgtcttgctgtgcctattttgcggatcgatcatcaagctgtctccgaagggagggggagctttgccgcgcctgtcaggcggcagggtcccctaagcagccggagggatggctgctgccgcaatatgggaaaacggatggcccgggaccagcggggccatccattttttgttgtcctgaacagaagacgtgccggccggccgtgccggcactgtcatgatatttgatgagatgagggaccaaaccatgaatcgggaacataaaagacagaaatacgaaaaaggatattataagacccacccctgtacagacagcttcacctgcaaggcgtgcggccgcctggtggtatcggatggggccgggagcggccaccggaaccactgccccaactgcctgtccagcctccacctggacaacgaaccgggagaccgggcatcagactgcggcagcgtcatggatgcggtggcggtgtgggtgaggaagaacggggaatgggcagtgatccaccgctgccggcgctgcggcgcactgagttccaaccgcgtggcggcggacgacagccccatgaagctcatgtccattgccatgaagcccctgtgcctcccgccctttccgctagagaggatcgaggagctgactgagctgatgggtgaaacgatttgaggaaaacgcgaaggacgccgcgggctcagcccacggcgtcctcttttttcatcaggcgtagagaaagttggccagcatgacggacagctccccccgggtgacggccccctcggggtccagccgcccgtctggctgtccggccaggatgccctgctccagggcccaggccacggcgggagccccctccccggagagctctccgccgtccggataggccatcagtgccccggtgtccgtcagggcctcggcacccagagtgagggcaaagcggtagaggaccagggccacgtcctcccgggtcatgtcctgctggggcaggagcacatcctcacggaccagcccggcggagagggcgaagttggccccgccggcataccacgccccgtcccagggaccggacagctggggggcgccggccacctgccagagcacggtgagcagctccgcccaggtcacaccgctgtccgggcggaagttgccggcctcatccccggaaaagaggccggaggaggcgcaggtcagggcgtagcgggcagaccagtggcccgtcaggtcgggaaaggacagaccgcagatctcccgatagaaatactgctccaccgcctccaggacatcctgagcggcaccgggctggagcatgtctgtgagacccgcctgggcgacggcgtcccggtagccggctgtgtctgtctgggccaccagggccagataggtgtcggcggcggcatcgaagtcctccgcggagtccacaaggagctccagggaattgagaacagaagtcacatagctgatggtgtagcagggctgttcaaacagctgggagttggcggcccagtcataggcctcctccccgccgatggagtagaggaagccgtaggactccgagatagagcggtagagccggttcatcccggacaccgtgaggccgtccgcctgatagaccgcctgctcaaactcgtcgtacatgcagaagtacagcatccccagcaggtcggagagaatggccgcccggtaggcgtccccgcccgcctggcccgccaagctgtcagcaaaggtgaggtacagggcctccagcccctgagagtgggtctcggccacgtcgtagcagaactgctcatcctcagccaggcagtggttggcgaagtggccgaactcgtggatcagggtctttacatccagatagctgccctgggcggagctgaggatataggcagagcgataggcgggcaggctgacagtgacgcccagcgtgctggagctggccagtatgtccagatcgtagagaccgttgtcccgcatatagccgtacagttccctgtattcgctggagactgcatccatatagggctccacagcgtccagcacctcctcctgggtcatgtcctccagggaggagagccggacgggggacagggagctgaggcgggactgggcgatcagcagttcggactccagacggggcagaagggccttgaccgcgcgatggaggagggcggcctcctccggcgtatagtcccggccgtagacagtctgataggcgtactggacatagtcatcatagcccttggaggcggcgtactgattgcgcacctttaccagctccaggtagataggggcgaggaccccattgcggacggcggccagctcccccaccagggtcagataggcatcctcctccagtgagcccaccagataggcggcgtccgcctgggcacgggtccaggtcctgccgccggactggacagagggctcctggaccaccgcctcccagtattcgttgaccagagcagtctcacgctccagcagggccagctcctcccgcgtattgggggaggtggacaggagggactgagcctgcccctcccccagcagcccggccagaacggagccgtaggcgctgttcagcacctcctggacggcggagaggtagtcgctctccgcctgaccgcagacggagctgtaacggacatactcctgggtgcaggaggcgggggagcgcatatagtccagggagcagaagtagtactcggtgagcagctcgttgaagcggtccgtcatcctggacagcagagagaggaccgagcgctctgaggcatcctcctcccgaacggcggtcagaagtgcctgccgggccgcatcaaagctgctggggtcggcggggctccagtcctgggccgaggcggggaccggctccgggaagtccgggaagaactcggtctcccgggccagggccgccggagcgagcagcgagacagacagaaggagggagagcaggagtggcagaagacggccgcacttcatagagatgcctccaatacagacgattttgggcccggaagcctgtctccatcctatcatatccggggtggaaagacaagcgccaggccaaggggcagagctgaaaaatacgccgcggaaggggaaaacagcgtcaaaaaggcccgctcccgtatgagagatgtcacacgggagcggtccgggggctgatggtccgggggcggctcagacggagaccggatccatctcaacggtcagctgctccatcaggtccaccacgtcggcgccggcggggggctgggtctggggctgggtgctggaggcggagtaggtgccgtccatcgtcacggtgtaggtgaagccgggaatggagacgccggaggcctcgtcgatgacggcgggcgtgctcatctccatggtcatagccagctctttgcccttcatggaggcgtccacggacacaatggccccctcctggtccgccttcatggtcatggaatagccggtgaccttggagtcggaggtgaacagagtaaaggtgatgtccatgtcctccgcctgggtggtggagatataagtggtccccttctgctccagggcactgtcggagaacatgctgttataaagagccaggagatcacgagtggtcatggaggcggaggtgagggggacctcccgcaggataagggccagagagtcggcaaagctcatgtcctgagcggcccgggccatgagcaggaggtcggtgtagtccaggccggtctggagggagagctggtccatcatggacttcagatccatcttaaaccacaggccggtgacgctgggatcggacatctgggtcagtgcatcggaggaaaagtagaacaggccctcctccaggtcgccccgcagttccaggtcgatgggatcgatctgggcggatacctcagcatcaggagcggacagttccatatccagctctgtgctgaactggaaggcggagctgtcgctctggagcatggagtaatctccctggatgccgccggtcatgagggaggagagctccatctccactgccagactgccctccaccttgcaggtgccgccggtcagatcccgggtgtactccagataccggtccatcatggcgtaggtctcggagttggcggccaggatggcatctacgtcgtcgatgatgacagtagaagtctgggcatcccagcctacgttgtaccccagggcaccggccaccagtcccacggggacgtaggtgcgggaggaggcggcgtcgatgaagggagcggcatcggtggtgatggtgtccgtctcagcggcgttctcctgcccacgggtcacagtgagctccttctggtcgatggtcagggtgatggaggtgtcatccttggccgcggtgacactgcgggtggcggcgtcccaggtgatatccccctgggcgaagcccagggcgtcaaaggtctccaccatgggcaggaaagaacggccgtccttcagcaggggggcggcgtcggtaaaggtgacggcctccccattgaccaggacggagaaatccccctcctgggccgcggaggcgggcaggcagagcgccagaagcagggcgccggcgcacagggcggtgcggaacgcgcggtttaacatgacagatccactccttaaaattgacatgggccgccaggcggcccgaaagccgagcttttttccggtctcaatatagcatatccggggggaaaagacaaggagcgagagggagaaggaagaaaaaatccggcgcgggcccgcaggtccgcgccgaaaaaaggaggaataggggagaaatcaggcgtcgatgacctcgccggtgagcacctcccggctgtccacggtgagctgtccatcccggcagtccacggtgatgcgggagccgggctccacctggtcggcaatgatcttcttgctgataagggtctccaccgtatgctggagatagcggcgcaggggccgggcgccgtagatggggtcgtaggcgctggcaatgatctcctccttggccgcgggggtgaggaccacggtgagctgtttgtcctccagccggcggttcaggtcggcggccatcagatcgatgatatgggtcacgttgtcctttgtcaggggcttgtaaaacacgatctcatccagccggttgagaaactccgggcggaaggaccgcttgagcagatcgctgacctgctcccgggcctcctggctgatctccccccggctgtcgatgccgtccagcaggaactggctgcccaggttggaggtaagaatgatgatagtgttcttgaaatccacggtgcggccttgactatctgtaatacggccgtcgtccaatacttgaagtaatatattgaatacgtccgggtgggccttttccacctcatcaaagaggataacggagtagggtttccgccgcaccgcttcagtgagctggccgccttcctcatagcccacatatccgggaggagccccgatgagccgggacacggagaatttctccatatactcgctcatgtcgatgcgaaccaggttcttctcgctgtcgaacagggcctcagccaaggtcttggccagttcggtcttaccaacgccggtggggcccaggaacaggaaggagccaatgggcttgttggggtcagcgatgccggcccggctgcggaggatggcctcggacaccaggcgtaccgcctcgtcctggcccaccacccgctggtggaggatgtcctccaggtgaagcagcttctcacgctccccctccatgagccgggagacggggattccggtccaccgctcgatgatgcgggcgatctcctcctcggtgaccttgtcccgcagcagggaacgctgccgcccctcattggcgatctgctcctccgcctccagggcctttttcagctcggggatgcggccgtactggagctgggcggcccgctccaggtcgtactcccgctgggccttctccagctgggcgttggcctcctccagctcctccctgagcttctggaccttgccaatggcattcttctcgttctcccactgggctttcttggcgttgaactcatcccgcatgtcggagagctccttctggatctccgacagatgctcctgggacagcttatctgtctcttttttcagagcggcctcctcgatctcgtgctggatgatcttccgctggatgacgtccagctcggtgggcatggagtcgatctcggtgcg

SEQ ID NO: 13627 - DNA, 16399 bp, Unknown
  gut microbiota DNA sequence
ccaggaacaggaaggagccgatgggacggtcgggatcggcgatgcccgcccgggagcggagaatggcctcgctcaccaggcgcacagcctcgtcctggcccaccacccgctggtggaggatgtcctccaggtggagcagcttttcccgctccccctccatcagcttggccacggggatgcccgtccagcgctcgatgatgcgggcgatctcctcctcggtgaccttgtcccgcagcagggaacgggccctgccctcgttggcgatggcctcctcggcctccagctgtttccgcagctcggggatgcggccgtactggagctcggcggcgcggttcagatcgtactgccgctgggcggcctccagctcggcgttggcgctctccagctcctcccggagcttctgcaccttgccgatggcgttcttctcgttttcccactgggccttcttggcgttgaactcgtcccgcatctcggccagctccttctggatctcggccagatgctccctggacaaggcgtcgtcctccttcttgagggcggcctcctcaatctcgtgctggatgatcttccgctggatgacgtccagctcggtgggcatggagtcgatctcggtgcggatcatggcgcaggcctcatccaccagatcgatagccttgtcggggaggaagcggtcagtgatatagcggttggagagagtggcggcggcgatgatggccccgtcggtgatcttgacgccgtgatagacctcgtaccgctccttcaggccgcggaggatggcgatggcatcctccaccgtgggctcattcaccatgacaggctggaagcggcgctccagagcggcgtccttttcaatatactgccggtactcgttgagggtcgtggcgccgatacagtgcagctctccccgagccagcatgggcttgaggagattgcccgcatccatggagccctccgtcttgcccgcccctacgatggtgtgcagctcgtcgataaagaggatgatacgcccctcggacttcttcacctcgttgaggacggccttcagccgctcctcaaactcgccccggtacttggccccggcgatgaggctgcccatatccagggagaagatggtcttgtccttcaaactgttgggcacgtctcccttcacgatccgctgggccagtccctcggcaatggcggtcttacccacgccgggctccccgataaggacgggattgtttttgctcttgcgggagaggatgcggatgacattgcggatctcgtcgtcccggccgatgaccgggtccagcttgttctggcgggcccgctccaccaagtcggtgccgtacttcttcagggcgtcataggtctcctcagggttgtcactggtgacccgctggttgccccggacagaggtcagggcctgcatcactttttcccgggtgacgttgtaggtgcggaacagctccttcagggcgctgttggcactgtccagcaggcccagcaggatgtgctccacagagatatactcatccttcatggacgccgcggcggactcggcggatttcagggcacggtccacgtcctgagccacatagaccttgtccgcctcccggcctccaccggagacccggggcagcttctccacctcgtgctggacggcggcctggaagctggggagggtcaggcccatattggtgagcagctgggggatcagcccctcgccgtcctggaccagcgccatgagcagatgggcctgctcgatctgctggtgcccgtactccagggcgatgtcttgggcgccctgaatggcggccagcgatttctgggtaaattgattcatattcataaaaggaacacctcctagatccgatctatattgattcttaaactttagcactcaataaacttaactgctaaaattagtatagagccattggacaagatttgcaagtcttttttcaagtttccatacttttgtgtgctgcgtcctacaggggcacacaaactgaaaattgagtttgggaagaaacgcgatttggaaaagagtcaggcggagccggcgtaccggctccgcctgaccgcggctggggagacctcactggatctggatcttgtggcactggggaaggacctcctgccgcttgggcagaatgagctccagcaccccgtcctgataggaggcccggatggcgtcctcctggatgccgtccagggtgaaggaccgggagaagctgccggtgcggcgctcccggcagatgtagttgtcggcggcggtgcggtcatcggcctggtgcttggcagagatggtgagcacgccgtcctttacatccagatcgatgtcctccttgcggaagccgggcaggtcggcctggagcaggtagtgggcgccctcgtcccggatatcagtgctgaagaccggcgtgcggcggccgctctcgccgaacatgctgcgctccaactcgtcaaacagatccatcatgctgctgttgctgcggcgggtgtaggggatcatatacataagtcaaaactcctttcggtcccgggcggagcatcctccggcccgggcctctctgaactttggctttattatagtgagggattatgaattttttgttacacagatgtgtcacaagtgtaaatattagcactcaataaataagagtgctaatattttgcagaaaggctccccttgtattggcgaaaaccgggtggtataattgtcatacaattaaaataaggagggcaccccatgaaaatattagtttttggccccagagaccgctatgacgtgtaccggcccccatttgcggatgagatgccggtggagctggtgttccgccgcccggaccagacctatgtccaggcggcccaggaaaatgcggacgcgaggatcatttttgtggatgccatcacggatgtgggtcccgatgtgatggaccagcttccagagctgaagatgatccactctgagggtgtagggtacaactgcatcgactgccaggccgcccgggagcgggggatctatgtgtgcaacaataaggggtgcaacgcggaatcggtggcggagcacaccatcatgctgatgctgatggctctgcgcttcggcatccctggacacaacgcggtcatccaggggcagcagatccagatgaagcagaaggccatcgccgcccacgcccccggcctgttccagtgtgcggtggggttggtgggctttggagacaccgcccaggccaccgcccggcggctggccagcttcggctgcaagctatactattacacccgccaccgccgtccgcctcaggtggaggaggactttggggtgacctatctgcctctggaggagctgaccgcccagtgcgacatcatctcgctccactgcgcggtcaccgacgagacccgggagatggtggatggggccttcctggcccggatgaagcccaactccatcttggtcaactgcggccggggcgacctggtggacaaccaggccctgcggaaggcactcatagacgggaccatccggggcgcggcgctggatactattttcccggagcccacccccggcgaccaccctctggtggacctgccgccggaggtcagagatcgggtggtttacagctcccacctggggggcagctccgggggggcttttgctaaggcgcatctgaccatgtggaccaacgcccggcatattttgaacggagagcggcccaccaacgtggtcaacgggctgtaagagggggggcggcattatgatccgggctctccgtccggaggatctggaccaggtgatgcagatctggctggacgccaacctggaagcccactgctttcttcctgagagctattggtgcgaccatatggaggaggtgcgggcggcgctgcccgccgcccaggtgttcgtctatcaggactgggaggggctccagggctttgcgggactgaccggcgactatctggcggggctcttcgtccggcgtgccgcccggtccaggggaatcgggcgggcgctgctggagcgggccaaggaggggcgggagagcctgacactccacgtgtaccgggagaacagcccggcggtccgcttttaccagcgggagggctttgccatccgggccgcggagcgggaggagaacaccggccgggaagagtaccatatggagtggcacaggggaggacagcaccttccaccgaggcgcggggagccttgatccgctaagaccccgctgccccgggagcaggtacgtagctccgcttgacaccgggcgtccggggatggtaagatggggaaaagctggcatgggacgggaggagagcttatggcagaggagctgtttggcggacaggatgtgggggccacgccctcttataaagaacaggcataccgcctgatcaaggaggcgatcctcttcaaccggtttcgggtaggggccatctactcccaggacgacatctgcaaggagctgggcatcagccgaaccccggtgcgggaggctctgctggagctccagaaggacggctatgtctccttctcccggggcaagggggtgcaggtggtgccggtgtctgaccgggacgcccgggacatcctggagacccggatgtatatcgagtgcatcaacgcgaagctggcggcgaaccgtgctgcccagcgggaccttcaggccatgcgggagagcctggaccgcctccgggaccagctctccaccagggatgggcagcacctgtaccgcctggaccacatcttccaccgggcagtggcggcggccactcagaaccgcctgctctaccgggagtgcgagctgctcctggaccactatctccggtttgaggtcaagtcggtgtataacaactccatcgacgccaagatcgtctttgatgagcatgtggccatctgcgatgccatcgcggaagggagcgccgagcgggcagagcaggccatggcccgacacctgaccaactcctaccgccgcaccgtcagccgtttctgggcggaatagtggaagaaaacatggacggccgtgtcccgggaggatgcggccgtttgacttgtctgaatatgtaaatatatcccatataaaatgttttcaaccagagctcgaaaaagttcttgacattgcccctaaaatatcttatgataaggccataaaacaagtgtattggagagcgaacagaatagcggttctgcgcgctctccttttttagaactcaagtaatatattacatatttaataaaaaaggaaaaatgtaatatgttgcaaagggagggcacaggcaggtttgagcagctgcggtgggcggtatctgttccgcatccggaggcggggcggcgccggcatccgctgcaaataaacaaaagggagagagaaccgtatgttaatcgcaacatggatcgtgacctttgtcattatcgtggggatcggtgtctggtccggcaccaagatcaaaagtgccaaccagtggtcgggcggtgacaagaccatgggccccctgactctgggctgtgtctttgccgcctggcagattggcggcatggccgtggtaggggcggctcagaacggctacaccctgggcatctccggggcctggtactccatcgccggctccttctacttcatcgcgctggccctgttcgccaagctgatccgcaacaacatgcccggcgactcggtgcccatctatctgcaaaagcgcttcgacaccaagaccagccgcctgtactcctacgcctggatcgtctacggcttcctgtacatcccctatcagctcaagaccgtggcttccatcatccagatcgccatccccggtctgaacatcacgctggccatgctcatcggcctgaccatcgccgtgatctacaccagcttctccggcatgcggggcatgtccgctgtggggcgcatcgtatgcttcggcatctacatcctgctcattgccttcgtgctcatgacgctgcccaagttcggcggcttcaccgtgatgctctctgaacttcccgcagagtactcctccatgggcaatatgcccacccagcgcatcatcgcctggatcctgggcggctgcctgtccaccgcagtgatgcagtccgtgctccagcccctgctggccgcaaagagcgcttccgccgcccgcaccggctctatcctgggctatgtgctggctgcccccatctgcctgctcaccgccacctgcggcatctttgccaaggcgtccggtgcggacctgggcgacggtgccaccgcatttgcctactccatcaagaccttcagcaatccggctttcgctgggatcatttttgcctttgccaccatgatcatcgcggctaccatggccaccatgatgctggccacaggcaccatcattaccaatgtctataaaaacgacatcaatcccaacgtggacgacgccaagctgctgaagctgtccaagatcatcaccttcgtctttgcctacctgactctgatccctgcggtcatcatgcccagcgccgccctcaccaacctgttcctcaccctgcagcacgtggccgccgccccggtgagcttcgccatcctggtgggcctgacctggaagcgctgcacccggcagggggccttctgggccatggccagcggcatggtggtaggtgtggcctggatgctgctgggcctgaccgacacactggaggcggtctaccccacagtgctggtcagctatacagtgggtgttgtggtatctctggcgaccagtaaaaagatgcatggtttggcgaaggaataatggaatccgaacaagactcgatgaaaacactgtccggcgcggccgggaagggaagcggatcaagtatgagtgaagcaaagaagcagcagtacatgtggccctcgcggtggagcaagccctccgcccacggggactgcggagcggtcagctgcaacaatatctatgccacccgggcggggttggagatgctgcgggccggagggaacgcctttgacgccgccgtggcggtctctctgaccctctctgtggtggagccccaccactccggcatcgggggcggctgtttcagcctgctgtactcccagcgggatcagaaggtcttggcgctggacgcccggggcgtggctcccgccaaggcgggggaggacctgttcctcaaggatggagaggtccaggacgagtggaaggacctggggggccagtcggtagccattccggggctgctgagagccatggaaaccatgctgcgggagtacggcactatgacgctggcgcaggcggcggctcccgccatccgctgtgcccgggagggcttcggcaccagttataccggagagctcaccatggaggacgactcggtccggcggaagctggatctttcaccccagttccggcggctgtatctgaagccggacgggagccgctaccgcttcggtgagaagcaggtgaactctgagctggccggcctgctggagctggtggcggcggagggggcggacgccttttacaccgggccggtggcccggaaaatggtggagcagatcaaccagcggggcgggtgctttaccctggaggacctgagccgatatcagcccaagtaccgtaccccggtgaagaccacctaccgggggctggaggtggcggccttcgcgccgcccagcggcggatgcgccgtggtggagatgctgaacattctggagcacagcgatctggccgccatgggacacaacaccgccgcctccatccatgccatcgcggaggccatgaagctgggctttgcggaccgaagcgtggctctgggcgatcccgacttcgtccaggtggacgtggagcggctgaccagcaaggcccacgcggcggagcggtatgccctctcatcaccggagacggcgggggaatacgctccggcggaggggatcgaggccaaggagtacccaggaaacacctctcactttgcagtgatggaccgctttgggaacgcggtctcccagacccagactgtacgggactggttcggctgcgggatcgtggtggacggctgcggctttgtgctcaacaacgccatgtccgacttcagcgccaagccgggcgcactcaccagccagggactgacctatgggagcgccaacagcatccagggggggaagacgcctctgtcctccatggcccccagcatggtgttcaaggacggacggccctatctggccatcggcgcggcgggcggtccccggatcatcaccggaaccctccaggggatcgtcaatgcggtggactttgggatgctgccggagcagctggtccgccagccctacctcaactgcctgacccgggagcaggggctggagctggagttcgggatctcagaggacaccatccggcttctggaacagaaggggcaccggccggtgcgggtcccggtggaccaggccatgagcaccatgctcaacagcgtcatgtatgtggacggggagtaccacgctgccggcacccagcgggtggacggctgcggcggagcccttctctctgacgggcatatggtgctggacgggatcagtcaggaggattgagcggcctgcctgaagcatcaaaaagcgaaaagagaaaaatggtcagcagaatttctgctgaccattttttgatattgggaaccaataaagagaagggacggtgcgtaccggggccagaacctggcacaggggactcactgtgcagagggctctccgatctggacatggggcagggccagacagggattttgcagcgtagtccacacctcgcggtcctctaccacgcagagggtggtggaaacggtggtggcggggacgccctcgtggggatgacggcagatacagttcggctcgttggtgtggtctgacataatgcggtagagatcctggaaccggagggagccgtagcgctcttccaccatctgggcaatgcggtcatagcgcttgtgagtggaggggtagttctcctccgggggattgaaatggctgagctggtcactgaccacgtggttggtgcggaagaggacccccctgccctcatccttttccacatagatctcgtcggaggtcatctcgatgacataggcctctgtggggtcggcggcaatgacgttcaggccgttcatacggggggcggtgcggcagaactccaccgcttgggcggcggtcctgcaggaggagaggaggacccgcacattgaggaagatatcggcctcctctacccggtcgatgcgggtggggtccttctctgtccagaagccggtggtggtcacagccagaccatggctgttgatgcctacagcgggataggtgaggataccggccccgcccacctcgatgatctcctggccgtcggggtagatgtggcggaccagagcctgctccatgggcatgcccatgtcccggttcttgatgatgtaggtgcatccgtcagcggcagcctgtccccggacacagagcatgctgcattcctgcgtgatgtgacggaaggactcacagaggaaataggcggggatgttcagcagcaggatgtcgtcaaggggcagaccgctgccttgggcgatgccctggagctcctcgtacatctcaggccgctgctcctggaagaaacggaggttttggttcacaaaggcctgataggcctggaggtccaccttctcctgctccagcttccggtggacggaagccaggttgcggcggatggcatcagagagctcctgcccctgctggacgccctgctcgaagggcgtgccgctcacttggcaataggcgtgctgatattgggaattcatacagaaatacctccttaagactgagactgtccgcacagcaggcagctgcagatatgtccgttctgcgtgatgtccctggcttccgggacggcagaggcacactctgccatggcggcaaagcatctggggtggaaggggcagccgctggggacggcgatggggctgggcaggtcgccctgaaggatgatgcgttccggctgccgtgtggggtctggcagggggacggcggagaggagagcctgggtataggggtgggtggggtgggcaaagagctcctgcttctccgcatattccaccactttgcccaggtacatgaccgccacatgggtggagatgtgctgtaccacacgcagatcatgggagacgaagaccagcgcgatgcccagcttctgctgcaggtgcatgagcaggttgatgatctgggcctggatcgacacatccagggcggagacgcactcgtcacagacgatcagcttgggactgacggacagggcgcgggcaatacaaagccgctggcgctggcctccggaaaactcatgggggaatttccgcatgctgtcctgggacagtcccaccagatcaagcagctcctccgcgcgcttcatggcggcctcccggctgcccagcttgtggatcagaaaaggctcagcgaggatatcggagacccgctggcggggattgagggaggcatagggatcttgaaagatgatctggatatcccggcgcatccggcgcaggctctccttgtcggcactggtcagatcctgaccctgaaaaaggaccgtgccctcggtgggctcgatgagccgcatcatggtgcgggccagggtagatttcccgcagccggactccccaacgatgcccagggtctccccctcccgaatgaccagggagacgtcgtctacggctttgacgtactgggcggccttggagaagacccctttgcgtaccggaaaccattttttcaggtggtcggcctggagcaggatcgggcgttcagacatgatcgctccccccttcctcgtcccactggggcgtatatttccagcactggacggtgtgttccccatccagggtcaggaggggaggctgtttctgggtgcagatcttccggcagcaggcacagcggttgtgaaaggcacagccctccggcatgtaatagatactggggaccgacccttcgatggtggccaggtccccctggctgtcatccatgtgcgggatggagcggagcagtccctccgtataggggtgaagagggtgctggaagatggtgcgcacatcagctttttccacgatgtggccgcagtacatcactgccacagtatccaccatagaggccacgacgcccaggtcgtgggtgataagaatgatggaggtgcccagcttttcgtttatggaccggagcaggtccaggatctgggcctggatagtcacatccagggcggtggtgggctcatccgcgatgagcagctccgggtcgcacagaagagcgatggcgatcatgacgcgctggcgcatgccgccggacagctcaaagggatattgcttcagtcgggtctccgggctggggatgcccacggtgcgcagcatctcgatagacatctcgttggcctgggcttgggagaccttcttgtggaggcggaccacctctccaagctggtctccaatgggaaacagggggtccaggctgaccatgggctcctgaaagatcatggagatctggttgccccggaccctgcacatctggcgctcggtcttggtgagcagctcttccccgttgaggcggatgctcccggtgatctgagcgggcggggtgggcagcaggcgtatgatgctcttggaagtgacacttttgcccgagccggactcccccaccagacccagtttctccccttttttcaaggagaagctgacgtggttcaccgcagcggcggagccgtatttggtcttgaatctgacgctgagatcttgtacgcaaagcataggttcattctgcataactgagctccccccttatacatccagtttgggatccaggtaatcccgcagccagtcgcccagcagattgacgcccagcacggtcagcgtgatgcacagaccggggaagatacactgccaggggtcggtgagaatgttgtcacgggcttcgctgagcatccgcccccaggtggggatggtgatagggacaccgtagcccaggaagctgagggaggcctcgatcagtacgatcttggccatctccagggtggcgataacgatgacagggctgatgatattgggcaggatatgtttgaaaatgatgcgggcatcggtgccgccggcagcgcgtatggcctcaatatactccatctccttgatgcccaggatctcgccgcggaccaggcgggcgtatcgcacccagctggtgatgccggcgatcaaaatgacattgcccaggctggagcccagcactgccgcgataaacagggccagcagcgtgaaggggaagcagagctggatgtccaccaggcgcatgatgaccgcgtccacccatttgccgtagtagccggccaggctgcccaggaccacgcccacgatgccgcctactacggtgccggccagagctacgatcagggtgacgcgggcgccgtacagcagacgggagagaatgtcgcggcccagctggtcagtgcccagcagatggccggccacagggtcagagccccagatggggtccttcagcttgatcatgacgtcctgagccagcgggtcataaggcgccaggagcggggcaaagatggcacagatgatgatgagcagcaccaggatcagcccaaacatgccggtcttgctgttcttcaggctggaccaggcgcttttaaatccttttttcactgatcctacctcctcattgcagccggacgcggggattgatcacgcaatacagcacgtccacgatgaagttgatcaccacgaagatcaccgccatcagaaagacgatgcactccaccaccgcaaagtcgctggtggtgatgctctggatgaccagacgtcccacgcccggccaggcgaagacctgctcggtgatgaccgagccgcccagcagagaggcgaactgcatgcccaggatggtgatgatggagctcatcgcgtttttcagggcatgcttgccgatgatcttgcttttgggaagacccttggcctttgccacatcgatatactccttgcccagcacctcgatgaggttgctgcgcaggagccggcagatggtggccgctgagaagacccccagcgtgaaggcgggcaggatcagggaacgcaggccatcctctgcgccgccagtgggcatccagcccagcttgacagcaaagagcatgatgagcatgatgcccagccagaaggcgggcatgcattggcccagcagggccagcacccggatcacggcatcggagacgctgttgcgcttcacagccgccacaatgcctgccgggatgcccagtaccacggagatgagcagggccgcacaggccagcgtcagggtggcaggcgcccgctccagcaccacggacatggccggttcattgtagtagtaggaggtgccgaaatcccccaccagcgcccccttcagaaagcggacatattggacgggcagggggtcattgaagcccatctcttcactgaggatctccatttcctctttggaggtggtgggggagaccatcagctccaccgggttcccggtgaggtgcaggataaaaaatacgactacggtaatgcccaagattgcgatgatggactgcccgagccgcttgagtaagtatttccccatgcttttcaacctttcatagcgagccaggatagtgagaaacggcgcacccgttccagatcacgggtgcgccgcctgtttctctgccattgaaataccgcaccagctgcggatattcagttaagggagcaaatcgctcagccggccacggagacgccgtccatgaggacgacttcgtcggtgcgggcagtccaattctggaccttcttggagttgtaggcatacagggtgtcctgctgatacagccacagggcgggggcctcgtccaccatcatctgctgcatctggctgtaaagcgccacgcgcttctcagcgtccatctcagaggcggcctgggaggccagatccataaactcgggggagacccaggtgcagtaccgggcaccctcagtaaagccaatggaggcgatcaggttgatatcgcagtaggggccgcccagaccctggaggaacaggggggccacagtgcccgcgccgatctcgtcccgctgcgtggcggagtcctcctgcttgatggtgacgttgatgccgatctgagccagctgggaggcgatggcctggaccacgtcggtgctgttgagcaggccgggagagacggagcactcgatgtcaaagccgtcggcatagccggcgtcggccatcagctgcttggccttctccacatcgtaggtgtagccctgcacattgggatcatagccctcgtactcgggggtggagatggaggcgaccttgacggcgtagccgtccagcacgccggcgatcagcgcgtcccggtccaccgcatagttgatggcctgacgcacccgcacatcgtccaggggggtggggccgcctaccaggttgaactgcagccagaccacacgggtggagggctggcccaccacagagatgccgtcaaggctctccagatactcggcctgggtggtggggatattgcagatgatgtccacctcgccggcctgaagagcggctacccggtcggcggcctcggggatgacccggaagaccagctgatcgatctggggcacctcgccatagtagtcgggattcttctccagcaccaccttctggtccttctcccaggagacgaacttgaaggggccggagccgatgggggcggcggcaaagccctcgtctcccacttcctccacataggcactggggacgatcttgatatagttcaagcgcagggggagagaggggaaagcgtagtcagtgatgatgttgaactcgaagtcgcccagtacctccacctgcatgaaggagaaatcgccggacagagcgtagtgcttctccgagtcacgcaggctgttgatggtgtaggccacatcgtcagcagtcatctgggtgccgttggtaaagtacacgtcctgccgcagagtgaagtgccaggtagtgtcatccacctgctcatagctctcagcagcgtcgcacacgatctgcccctgggggtccgtcttgaccagggtgctgtaaagggaggccagaatgctggcggtgatggtggagttgccgtttctggggtccaggccggtgatgtcgctggtgctggcccacgtcaccgtcttaacagtttccccgctgctttgcgcgggctggctggtgctgttggagccggtttcagtgccgcagccgctgaacagccccatacagagcgccagtgcaagggcaagagagagtgcttttttcatgttggcgttcctccttttttagtggggtaagcatattcagaccaccctcggtgcgaggggagatcccataagagaagatcagcgcttgttccgctcgaagtaagggttcaaaagatccaggcgcttggtggcggtctcgtccatctggtctgcgaccagagagacaagaagctccagaagaaaagtggcggatacattggagttgaaaaagctgacgctgtatatgtccgccaacagcagcacatcagtaaaatcggagaagggagtggagggcttatcagtgagcaggatgattttcgccccgcggctgtgggcaagatcgatccagcgccggacttccccaccatagggattgaaatcgatgacgaacaggcagtcctctggagagatatccagcagctgttcaaaggtgacgctccctgtggccgatacgacaccggggacaaccatgcgcatcaaaaagctgaatttctcagcaataggtgcggtgggccggcgcccggcaatatatttgatgcggcaggagcaaagcagatccgccgccgcatggatggattcttcggagtttttttccaaaacgctctgtaggttcttgtaggtaagggtggaaaactgtgctacgatattctccttggcatccaggctctgatgggtatgaagacgctcaatgggagggaagaagccacgctgtgcataatccgctttctgagagacaaaggattgtatctccttctgaaggtccagaaaggagcggtagcccagcactttgctggtacgggagaccgtggcgtcgctgacgcccaagatgcgggccagttcactggtggacacatagcatacggagagaaaattgttcaggatgtattccgccaccaaggcttcctttgcggtaagaggagtggacttgatccgctgggaaaaggcggcgggaagctccatgtcgaaataccatccttttttgcagtttctttggttagacctatgataacatgaaatgttgaaaagtcaatacttcaaatcgaaaatatcgaatactcgatatttttgacgattgagtaaacggagggaacatctgaacaaggaaagagatgaagggggtggacagcacaacaggcaagagaatagagaagggtg

SEQ ID NO: 13628 - DNA, 40762 bp, Unknown
  gut microbiota DNA sequence
atagaggacagcagcccctccagctcctcctttgagaagtggtagaccttgtcgcagaactgacaggacaggtcggcctgtccctgctccgcgatgagggaggagagctcctcacgtcccatgctgatcagcgctcgggacacccgctcccggctgcagctgcaccggtactccaccgggtgggtctccaggacctccagctgaaagtcagagagcacctcttccagcaggccctgggcgtccagcccgcgggagagggcgtggctcacagagcccacccggcgaacgccggcctcgatcttgtcgatcaggccctcctctgcgccgggcagcagctggatcagatagccgccggcggccaggacgctctggtcccggtccaccagaactcccagggcgcaggcggtggggatctgctcgctttccacaaagtacatggcgatgtcgtcggcgatctccccggagaacaggccgatagagccgatatagggttccttcagtcccaggtccttgatgacggtgagactgccgtcggtgcccacggcggcccccacatccagcttaccggggaccttctccatcagctctacatggggatcctgcacatagccccgcacgttcccgccgcagtcggagacagccagaatggtgcccaggggcccgccgcccttgatctggagggtgagggcgccgttgtcctctttcagcatatcccccatcatggaggcggccagcagggtgcggcccagggcggcggtggccacggggagcagggtgtggatggtgcgggcacgctccaccaggtcccggccggtgatggcgacagctttgaccgagccgtcggcggtgatggcgcggatgatatggtcggacatgatcagacttcctttcgtgcggtgaagaagatgcggtcctccccaggcttggggggacggtgcttcagatttccatattgcttgatctgggtgaacccggcgtcgcggagatagctggtcagctcctccggcgtgtaggcccgctcctcgtggagctcctctccccgctcccacaggccgctctcctcctccaggcggaagatatccatgaagtaggagcagacccggcggcggcgggaatactctgcccgccagacgcagtaggcgtcctctgtctcgtccagaaagacctggccatccaggccctccagcttggcgggggtgttgacgtcaaagaggaacagcccgccgggcatgaggaacaggtggacccgctgaaaggccctccgcagctttttcgggtcggtgacatagttgatgctgtccagacagcacacgcaggcgtcgatggtgccatacaggtccagctgatccatgctctggcacagaaaaatgggggcgatcccctcagcatcccggttcttttctgcggcctgggccagcatgtcgggggagaggtccaccccgatcatctcatatccccgcagggacagctcgcgggtgagggagccggtgccgcaggccagatccagcacagtggagccgggcaggcccgcccgttcaaagtggcgctggatgtattcggcccaggcggcgtagtccacatcggtggtgaactcatcgtagcagccggccagaaatccatagctgttcattcctgacgctccttcagacgggggatgacggcctgatagccatcggcgccgtagtgaagacagcggttgacgcggctgatggtggcgctggaggcgccggtgcgctccaggatgtcactgtatatcagcccctggtccagcagcatggctacctccatccgctgctccatggctttcagctcggacacggtgcacagatcctgaaaaaagcggcggcactcatccacgtcctgtaaagacacgatggctcggtacagagtgtcgctggattccttctctaaaaatttagacatattgggtgctccttctccagagaaaatcttgcctcccggcggcccaacaaggtcccgccgcgctcttttatattttaacaggctaatctatgaaagtaaacggggagtgaagaaaaaaatcaaaaaccggccgctcaaatgcggcctgcggaggttttgacatgagcgaacgggaatataaagcgctgcgcagtgtaccggcttccacctggatggagggcttttgtgtgaccaagcagatggaaaaagcctgcatgtgcctcatgagcggcgaagtgtcggtgaccgcccaaagtcaaaccgtcagccgagcgcataggttccctctgtcagtggcaagctagcgggacagtatcggaacgcccacagaggtatttgccgctgtgggcgttgctttacccgtaaaatagccatatagaaccatcaaggaggagtaccatgagcgaacacagaccagcattggaacacatccaggcgtatgcggaccatcttcggctggaagaaaaaagcgccgccaccgtagagaaatatctgcgggacgtccgggccttcgcccgctggctggaggggcgggagatcaccaaggaacggacggcggcgtggaagacccatctggtggagcggggctacgcccccgccagcgtcaatgccatgctctccgccctgaacagtctgctggactttctgggcttcggggactgccgggtgaagtttctcaaggtccagcggcggatgttccgggatgacagccgggacctgacccggtccgactacaacgccctcaccgctgcggcaaaggcgcagaacaaaacgcggctggctctgctgatggaggccatctgcgccaccggcatccgggtcagcgaggtgcagtatattaccgtggaggcggccagagcgggccgggcggaggtcgccctgaaaggcaagagccgcaccatcctcatccccagcaagctgtgccgcaagctgctgaaatacgccaaacagcaaaaaaccgcttccggcgagatctttctcaccagaaacgggacgcccctcagccgccgtcagatctgggcggagatgaaggggctgtgcaagacggcgggggtcgcggccagcaaggtctttccacacaaccttcgccatctgttcgccgcggccttttaccgggccagccgtgacatcgtgaagctggcggatgtgctgggccattccagcctcgagaccacccgcatctacctcctgacctccggggcggaacaccagcggcagctggaccgactgggacttgtatcgtaaagtcgaaattctcattctgtctcatttgctgtaaatataaaactgccagaattacatattccatgtaaatattaccactttcttttcaaaagagcaagagcgggacctgcttttgagcacaaaaatatgagccgcaaaatggaatatttttgcggctttccttgctatggctttttacctgtttttagaacaggaaaagacgcttttcattcgctctatctctctttgtatggcctatacagcaaatgatgggacagaatgagaattctgaaaagattggaggcgataaatattgcgaatgactctctacgactactgcgcggagcgggatgagctggtcctgctgacccagtgggcaccggtcaaaaacaggacgctgacgccaagagaggggtcctatggcaggagacagaagaactggcgtacttactggcccgagaggtggccgcccagtggtgcgtcccccgacctaaccccggagcacgtgacagcgggaagccgccggatggcttggcgggagtgtcccaacggtcatatctggaaggccgccatttattccagggcggggccgcagaagtgcggctgttcccgtctgcgccgggaaagtcagcccaaaacggctggaacgctgtcggcgggcgctggaagaatgggaataaaatggggccggtcagctctaattcccggtctggaaaatcgtaacaggaggaacgagaaatgaaaaaacggatattgtcaagtttcttatcgctggtactggtattatcgctgatgcctgtgagcgcgctggcggcggagggaccgcagaatgtggctcctgccgtggtcacagaggagcctggagaggtccacggtgagcctccggtggaggaggcggccgggccggaagagccggcctgcatctgcgagtccctttgtaccggggagaccgtgaacacggactgccccatctgcacggcggactataccgcctgcacctatgaggctcctgctgatgagcagcaggagccggcgggtgaacagggagaacctgtcggccccacggcggaggaacagcttacggcgctgatcgcggctctgcctgacccagctgatattgatccggaggacgaggagcaggtggagaggatcagcgaccaaatctccgagatctacgcctatgccgaggaacacggccttgatgtggaaaacgatgaaaccatcaattccgtgatcgggcttctctatcctgcggataatatagcgaataacggaatatgggacgatgagacaacactgtctgaaaatctcgttgttaaccaaggtgagaccttgactatcggtgcaaaagtgaccatctctggtaatgtaaccatctctggcggcggcaccatcaagcgcgatcaaagctatcagggagaactaatttctgtgccggctggagcagaactgaccttaaaggatattactattgacggtggcgcaacgtggactggtgaagctgctggtgggctgtccgcggatgaggctgcaattcggattgagggcggtcaggtaacgctggataatggtgcagtagtccaaaacaacaaccataccagcactcaggacaatgcttacgatcatacgacctatgaagagagtggacaaacctatgaccttcctcgatactataacatgggtggaggtatcgccgtctatggcggcacactgacaatgaacgagggttcctctgtaaaaaataatgctgtaacaaatacaaattactccaaagtcacaagcggaacaaatcgcacgggcaacagcgattccttggggggcggtgttgctgtttatgaaaatggcacattcattatgaacggaggagagatttctcaaaatgttgccgctgtgagtggcggtgaaggccgcgcctttggcggcggtgtaggtctgatgactcgcggtgcaaatgcccaggtatctgatactccggatgattattatattggattttacatgtatggcggcaccatctgcgataacggagcagcaaatggcggaggtggcatttatggcggggttgatcagggagacgatgaatcccaaagacatactcatctcgatatgaccgttgcatctgctgtctgtgaaaatacctcatctgcaggtggcggtggtattcaagtgggctctggtgacttgaagatcgaagatggggctgatatttcgtccaacaccgcagtcagcggcggtggaattcaggttggctcagccagccactttacaatgagtggtggttctgtgtcctataatgaagctgtcattggtgaaaaaaacctccttggcggtggcatttactttagtaacggttcgaacaatcagcttagcatcaccggcggagagatcaagaacaactgctcaaaggactctggcggcggcatccagatcacaacaggtcttaccgtgtctattgccaactgtaccattcaaggaaattcctgtggggcccaaggaagcggtaccgttgcaaacggcggcggtattcaagcaaatccgggtgttgttctgaacctgttggactgcgttattactgacaataaatcgataaccggtcatggtggaggagtacatataagcggtcccaataaaaatgcgggtggaactgcaacgatttcagggacaactaccattcaggataatcaatcttctttggctggggccaatatgtatgttgcgactgtcacatcaacgacggatttgagtaatttgtcccaatcatcgcaaatcggtttgacctggaatgtaaatgacgtggatgtgaacaatggtactgtggttgcttctggtgtaaccgaagataattactcatgcattaaatacgaacctgctgaaaatgcggattatgtgttgcgaagggcaggaaacactgcggttttacataaagctctgagcctaaccctgaggtctatttctccagatacaaaccagcctatcaacgacatacgctatacggttcttggacttgtcggagaaactgttgattttacagaagtctgcggttttgaactgacaggctatcacattgaccgctgggcaacgaactatgttgggcaagaaggctatctatgggaaaacccctatacattctccgactcctttagcagcgatgcggctaggggcggtcccaatgctatctgggcaccaaacgagtacaaaattatctatgaactgaacggtggcgttgctggtgtgaatgcacctgataaacacacctatggtaccgtgacggatcttgttgctcctacccgcgaaggctgtgttttcggcggctggtttgcggacagcagcttcaccgggccaaaaattacatctttgggcgcagaagactataccagcgacattatgctgtatgccctctggacaaaggagatcggtgaggacagcagttattctgttgatgtgatccaagatcaaacctacactggtacggccatcgagcccgctgttgttgtcagaaacagcactaccggagatgtgatcgcggacagccagtatagagtttcctattccagtaacatcaatgtcggtgaggcaaaggtcaccgttacgatcggaaacgattccgccgaggtcacattccagatcaccagggacaacgcccccactgttgcaatgtccgacgtatctgtgacctatggcactgcatatgcgatgactgctgcggccaagaccagcgcgggcaatgcgattacagatggtaccatcaccatccggtattataccgatgaagattgttccaaggatgagtctgaaaccgctcccactgccgcgggcatctactatgccaaggcgactctggccgaaacggacaactatggcagtgcaagcgcgtctgcaaagatcaccatccgcaacgccgacttctctgtcaccgctcagggctacgacggcacttatgacggccagccgcactccatcactgtaacggcagagggcgcggctgtgacttactccaccacggagaacggcacgtacagcgagacgaatcccacctttaccgacgcaggagaatataccgtctattacagggctgccaaggccaaccacaacgatgtgaccggcaatgtgactgtgaagatcgccaaggctgtccccgccatcaccatttcttccgacaaagccgagcttcgcggcggcggtactgtggaactgacagtcaaggccgcccccgcggacagcactgtggccgtcacccagactgatgaccaaggcagcgaggccaggattttgactctgacggatgggaccgtatctatcaagctggacaacagggatgccaggtacacctttaccgcatcctgtgctgaaacgaacaattacaccgcagggagcagcgaatgcaccgtgaccgtctcccgccgctcctccggcggtggcggcggctccagcagcagtactaccgcggagaccaccaccaacagggacggctccaagaccaccactgtcacagacaagaaaaccggcaccgtcactgagaccaccaagttccaggacggctccatcctggtggtggagacccagaaggacggcactgtgaccaccaccgagacaaccaaaaacggtgtcaagatcaagaccgtggatgagccgggcgaggatgtgactgctgagatcaccgtcccaaagtccgtgggcgaggccgttgtgatcatccctgccgacgtggactgcggcactgtggccgtggacacggacaccggcgaggtggtgaagctgtccgtccccactaaggaggggatgaccgtcaagctggccggctccgctgaactggtgctggtggaccgcagcaggaattttgatgacactcggaaccactgggcgaaggacgccatcaacttcgtcacagcccatgagctgttctctggtaccagtgacaccgccttcacccccgacagccccatgacccgtgccatgctgatgactgttctggcccgctttgacggacaggacaccaccggcggggctgtgtggtatgaaaaggccatggaatgggccagggagaacggcatctctgacggctctgatcccgacggttccatcacccgggagcagcttgccaccatgctgtggcgctatgcgggcagtcccgctgggggcggctccctgtcctccttcggggacagcgccagcgtcagcgcctacgccctggaggctgtgcgctgggccgtgggcgagggcctgatctccggtacagatgccggcctgctggaccctcagggcagcgcaacccgggcgcaggtggccaccatcctcatgcgctttgtggagagcctgaccaagtaaagtaaatcgcccctgcatgaataggagggcgggacggcacagccgccccgccctccttctgtttcgatgctggatcaaggacagccgcagggcaagtcgtcacgacgtttccctgcggcttttattctctcctgtatttctcccacaggcgtggtgcccttttctggtcacgaagttttttgaatgtcagagaaggccggcagagagtccgttccacccggcagcatgagcacagtgccatggcggaagcgactcagaagatgctggcagttggagagcggaatcccgcgttaagtgatgtcatcacggaaatgcagccgggatctggctatgatagagccataaagaaacaagaaggaggatctgaatatgtccgctatcaatatcgatcagaacaacatccagagtgaagtgatgaattccgacaagcccgttatgctggacttctgggctccctggtgcggtccctgccgcatggtcgtccccatcgtggaggagatcgcccgggagcgcaacgatatcaaggtcggcaaggtgaacgtggacgagcagccggagctggcgagccggtttggcgtggtgagcattcctaccttggtcgtcatgaagaacggcaagatcgtcgatcaggctataggtgcaagacccaagaatgcaattcttgggatgctgtagggagggatgacgatgggattcttcgatctcttccagcaagccgatatcgatcagggcgtaaaggaatatttggccacgcctggtgctgtcctgctggatgtccgtacctctgaagaatacagagacggccatatccccggcagcaaaaatgttccgcttcaggctcttgacaaggtggcctctgtcgcagaaaataaaaatatggcactgtatgtctactgccactctggcgcccggagccgtcaggctgccggcttgctgcggcgtatgggatatcgcaatgtaaacaacatcggcggcattgcagcttatgcgggaaaggtggaacgataatatgaaagtcgtgatcgtaggcggtgtggcaggcggagccacagccgcggcaaggctccgcagactggatgagcaggctgagatcgtggtgttcgagcgttcaggctttgtttcctacgctaactgcggtctgccttactacatcggagatgtgatcactgcccctgaagaactgacccttcagacaccggagagctttttcgcccggttccgtgtgaacatgaaggtccgccacgaggtgaaggctatccacccggacaggaaaacggtatcggtaaaaaatctggagaccggagaagaattcgaagagagctatgacaagctgatcctgtcccctggtgcgaagcctgctcaaccccgcctccccggcgttggattggagaatctgttcactctgcgcaccgtggaggataccttccggatcaaagatcacatcaataggcataaccccaagtctgtcgttctggcgggcggcggttttattggtctggaactggcggaaaatctgcgggagctcagcatggatgtcactatcgtccagcgccccaagcagctgatgaatcccttcgatgcggatatggcatcctttatccacgcagaggcacgcaagcacggtgtgaagctggccctgggatataccgtggaaggctttgaggaaaaggacggcggtgtggatgtgctgctgaaggacagcgctccccttcatgcggatatggtggtgctggccatcggcatcacgccggacaccgctctcgcgaaagaggctggtctggaactggggattaagggcagtattgtggtcaacgaccggatggagacatctgtgccggacatctatgccgcgggcgatgcggtacaggtgaagcactatgtcaccggcgaggataccctgatctccctggccggtcccgccaacaagcaggggcgcatcattgcggacaatatctgcggcggcgacagccgctatttgggttctcagggaagcagcgtcatcaaggtatttgatataactgccgccactaccggcatcaacgagaccaatgcaaaaaaggcggggctggatgtggacaaagtgatcctgtcccccatgagccacgcgggttattaccccggcggaaagctgatgaccatgaaggtggtctttgagaaggggacctgccgcctgctgggcgctcagatcgtaggttacgagggtgtggacaagcggatcgatgtgctggctgccgccatccatgcaggcatgagagcaactcagctcaaaaacctggatctggcctatgcacctccttactcctccgccaaggaccctgtgaacatagcgggattcatgatcgacaatattgcaaacggtaccatgaagcagtggtatctggaggacgttgaccatcttccaagggatggaagtgcgatcctgctggatgtcaggaccccggacgaatacgctgggggccatatggaaggattcggtaatattccgctggatgacttgcgggaccggctggatgagatagagccgggtaagcctgtatatgtgacctgccagagcggcttgcgcagctatattgcctgccgcattctggaagccaacggccacgaagcctataacttcgccggagggttccgcttctatgatgcggtaacaaacgaccgggcattggttgaaagagccatgagctgtggaatggacaaataactgcaaactgccaaagccgcgctttccatcaggagagcgtggctttttctatattcaaaaggtgatatcatcacggaagaaagtggatctctccggtataatgatgccgatcaatgacgggagggtgtttatgtctgctatcagaaagaaacgaaaagcctttgttgtgcaggaggactgtgttgcctgtggctgttgcgtgaaagtctgtcctttgggagcgattcagattatgaagggcataatggcgcaggtgaatatggacaactgcgtgggatgcgggaaatgcgcgaaagagtgtcccgccagcgtcgtcgagatccgggaggtggaaagatgaaaagacattggtatgatcatctctgggtcgtttctctgacctatctgatcttgggctttttcaatatcctgtttgcatggttggggctcttctgcttctttatcccgctgatcatctccgctgtgaaaggaacaaaaggctactgcaaccgctactgcggcagagggcagctgtttggcctgctggggggccgcttcggtctctcccgcagaaaggacattccaaagtggatgaaaagcaaaggattccgatatggatttctggtattcttttttgccatgttctttgtgatgctctggaacacctatctggtgtttgcggaagcacaggacttaaagcaggtggtgacgctgctgtggacgttcaagctgccctggcagtggggctatcacggaacattcctccatcccggcgtggcgcagttcgcctttggattttacagcgtgatgctgacctccactgttcttggcctgatcaccatggtgctgttcaaaccccgcagctggtgtgtgtactgccctatggggaccatgacccagctggtctgcaaggcgcggaacagcgaagtgtgatgtcatcacggaacggccggtattctttaggtaaaatatgagcataccctctgtacactgaggggaaaatcaaaacagaaaggagcacttcccatgaggctgaaagataaagtggcgatcatcaccggaggcagccgcggcattggttatgctacggcggataagttcctgggagaaggtgctagggtcatcctgaccgcaagttcacaagcctctgccgaaaaggcggttgaacggctgaaagaaaaatatcctgatgcgatcatcgccggcatcagccctgatctggccagtctggagtctgtgcgggaagcgttcaggtctgccactgagaagtatggatgtgtggatatcctggtcaataacgcaggcgtttccgaaagcaccccatttatggaatacacagaggagacctttgataaggtcatggatctgaacgtaaagggcgtattcaataccacccgcgccgcagcagagtgtatggtggcacgggggacgggcgtgatcctttccacgtcctcaatggtcagcatctccggtcagcccagcggttttgcctatcccgcatccaaatttgcggtgaatggactgaccgtatcgctggcccgcgaattgggacccaagggcatccgtgtgaacgcggttgctcctgggattacggagactgatatgatgaaagcggtgcccaaggaggtcatcgagcctatgatcgccaggatcccgctgcgccgcctgggccagccggaggatattgccaacgcatttgcgttcctggcctccgatgaggcgtcctacatcaccggcgttgtgctgagcgtggacggcatggcaaggacctgacgagtcgtaaggctgtggtaagtggcagcctcagaagcagattgcaatatggatcagtaaatcaaactcatatatgatcctgcaaagggatacagacagaaaaaggggctgctatgcaaagagaacagtttgatattaccggtatgcactggtccaccagagtggagcggtgtgcggcagaactgcccggtattgcggaagagtccgtcagtctggaggacaaaacagcatctgtcaggctggatcgacctgcaacagacgacgccttcaaagccgctgtggaaaaagctgggcgttagctgctgaaaatcagataaaaagctgaaaatgtccgccgagttgaacacaaggcggacattttattattgaccgtttaattcttccagctttttggcattggtgatctcgatgctgctgcgggacagcttgaccatcccctcattctgaaaatatcgaagcattctggtgatcacttcccgatgggaacccaggtgattggcaatggtctcatgggtgattttcagatgactggtcccttcgatagacacttcctccaacaagaatgcggctacacgcttgtcgagactcttccacatgacctgctccatgagccacatgacatcggagaagcgagaggccatcagttcgttggtatagttggaaacaggcgcagatccttccatgatgctctgataaatttcggaaggtattacccaaaggtcagtgtccttttccgcctcaacggtcacttcgaactgaatggaacgcatgatacaggaggcggaaaacaggcacatatcccggtcaaacagacggtagatggtgatctcgcgcccctcgtcggagagaatataggcccgaagctggccggacttcaccaacagaaggccggtgcagtccatgcttccattgtggatcacggtccctttgcttaccctgcgctccatcaggctgccaaggatgcgttcctgctgagccggtgtcagcttgttccaaaccgggaaatagctttgaaagtccataccgaaccctccttctgcctatcagtatattgaaatcatcaagacctgtcaactgactcgttgacaggccgcgttagctgatctgctcggtcagtttccatactttccggaaggagcccgcggcggtggtgaacgccggttcagggctttgctgaccagactggcgagggggctgtcccctgccagcatgagagtatcgatcagcccgccgcctccaacttccggatatccctttgtccgctgcccgctccgccgatgtggtgaaatgggcagtggaggggatcaccgccggaactacggccgccatttttctgctgacaacacctgcacccatggatcttgacattcctatactgcgacttggcgtgacttcgtccgaacactttgtaaaacagcgcaatgtgatatgacccctctaaggtagatggttgcaactgagaatcatttttcggtggcttttttgctgctgggcaggcagttgaagattataactggcaactatcctccagaatcgcttcatctaaagcattgaccaaacggggcaggtcgaaattttccatggagagatttaaaatactctctttacttcaggacaaacgcggctgtccaagagctggtgtcgcctgtaggccgcctgttctctcttccattgttaacaattgataaatacgtgacttgccccaatgctcatatgtcataaagtaacaaacaaaaatttgatagatagcagcccactattccgggttacattttttgttatgtgtttcattttttgaaaatcgtgcgataaatataataaagcagataaaattctttattaaacaagcagaataaatttgtgtttttgtaacgataaaatcttgtgcggatattatatttttgccaaaagtgccgattatatttgtgggggatgtttctgcagcaacggctcgtataactgtaaactatggttatgacagttattcttaaaacagggtttattattatttggaggtgttcttatgacgattacaggaatgacacgatttgtgcaacaaaattataaggttcaaaattcgcacttaacccctaaacttccaaatggctctttgccgccaaagggtcatgttaacccatattgtccggagggaatggatattacaggtcgaacggattttcgccgcattgtccctgttgacgagggcgttgcaaataagataaaatctttggtgtttgagagaatggaaaagaacggcggcatgagtggtggagagattgagagcgaaattataaaggattacgttatgtcattgccacccgaagaacgagctgccgctgggtggacattaaatcagattagtctgcaagaggctgaccggttgggagaatatgtacatcagcgagacccctcatggaattggggaaagccagtcaagcccgatatcttggatgactacaaatcaggcatgaatatactaatatgatgtggttggaatagtaatattacaactttccatttgtaggaggggagcccaaagtgctaccgccctcttttgttatttacaactgaatatccgccgccccgcagtggcacatgaagcagtaaatctgaaaccgatttgctgcttttttgttgtctgtttggcaaatttccaaatgcccagtagtaaggagtgaagcccgaaaaagtggcggtaggaagtgagcggcagtccggcagtttcttagagcaagattctaccgaggtgccaaaattcactttctgctcatttttgcccctgcgggaatcttgttggggagtgacttccccaaaccctgccatgcggcttgtgttgctgaaaatccctcaaaatattttttcggatttttcaaaaatagttccgctccacaccctgtttttctgctattacccgaataccctgccgctgtcaaagagccgttacagagggagaaagcttcaaaaccaccccagtagccaacaccttgcagcgcatggttgatctggaagccaagcgagccgagggcaaaggcatgggctatgaccgctgggcggcaaagcacaacctaaagcagatgcggctaccgttactgcctaccagcagtacggcttttcttccccggagaaattggacgaagcctgttccgcagcctataccgccatgcagaaaagcattacagagctgaaaaatgtggaaaagaggctgaacgggaaaaggggctgcaacggcaggtgcttgcctattccaagacccgccccatccgggacgggctatgacgaaaacaagccccgcagacaagacattgagatttattattcttttgttggcaaggtggacttgcccaaataactgcccgacctatccgacacaatagctaagtgccggataggaacggcaaaattttttacacttctattacttctttatcacacataagaaaaatggtacggcatgaatcactgtagcctataagtggagaactgtttgataaaggcgttatctcctcatgttcttaaagccgcaagcatgaaccagatctggtaactgggacagatcccggacaacaaaatgggcaccagccctccggaatcgctcctccaccttctggcaggccgtctcccgctcctggggagacatggcctcgtactcctgctggctcagccctagctcggagctgccctcgataacgcctgccgtccacacaccggcattgacgccctccttgatgtccgagatggtatcccccaccttgaccacatttcctaccgcagtaagtcccagggcctgcatgttggcaaagatcatgtaggggtaggggcggcccctgccccccactccgtcagggctgatccagaagtcgggggcatagccctgctgggccgccttgggcgccacaatattcatcatggcatcggtgtagccggtggtggagccgatcttcacccccatctcccgcagcttggctgccgtctccacagcaaagggcttgggggcggcgtactggtccagaatggagaacagctttggctcaaactgagcgtacaccgcatccacggcctcctccgtggcctcatggccgtggacccgcttccactcagcggcgatgcgctccatgtgcagcatggtgcggatgtggtcccgcttcagcattcccatgggcttgcgggtctcctccatggtaacgggcactccgtggtgggcaaaagcctccatgaaggccttcaccggagcaaagcagccgtaatccaccgtagtacctgcccagtcaaaaatcaccgcttcaatcatccgatctgctcctttctctccttcaggaaggctgcaatgatgccggtcagcttgtcaatatcctcggggtaaatttccccgatgttgccgatgcggaaggtatccatctcggtgagcttacccgggtagatggcgtatccccgctccttgatgtagcggtaaaactcttcaaaccggaaggataccccggcaggatagaagaaagtggtgataatggggccttgatggctgccgtcaatgtaggtagcaaagcccatggcccgcatcttctcaatgagcaggcggttattttccgtgtagcggcggcttcgggcggggatgccaccctcctgggccagctcatccagagccttggagaaggccagcaccacatgggtgggagaggtaaagcgccacttgccatccttttccattcccttccactggtccagcaggtccagagacagggagcgggccttgccctcgcttgccagcagtttgtcccggcggcacagaatgaaagagaagccgggcacgccctggatgcacttgttggcgctggacaccaggaagtcaatgccccagtcggccacagggatatccaccccgccgaaggaggacatggcgtccacaatgaatgtcctgcccgcgtcccggaccactttgcccaccgactggatatcgttaaggatcccgctggtggtctcactgtggaccatggccacatgggtgatagaggagtcctgggccagcaattgggccatatgggcggcgtcaggcaccttgtcgtagtcctgagcatagtggacaaaggggatgcggctgtgggtgcagatgtcggtcatacgctttccgtaagcgccgttggaacagatgagcaccttgtcttggtcgcccaccacgctggtgagcacgctctccacgccgaaggtgccgctgccctgcatcagcacggcagtgtagtcatcctcggagacatgggccagctccagcagctggcggcggatcttctgggtgacggccttgtagtcgtcatcccaggtgcagcggtccaccaacatctcctgctttacggtatccgtggtggtcagagggccgggggtcagcagtttataggtattcatggtatgaaagctcctttcgatcagcccttagcagactcggacagctgctggtgggcctggaacagttcaaaggtcagaggctcgtcaaagacggaagggttggcggactggttggcaggatcggcggtctcaccctcatagagggggttagggtaggtctggaggagctcctcccggccattctcaatgatacactgggccatctccatggccaggggattggtgctctcccccttgtccaacacggccgcggactcggtgagggagaagttgccctcggcagggtccacatagtcgatgggcaggccctccgccttgtcggccaccgcctggtggcgcaggccgaagccaatggctacctcaccagcccggcacagcttcaggggaccggaaccggaggtttcgatgtgagctccgcagttgtcataaattccggacagaacctcctgagctccgtcgtccccgtaggcatccaccagggcctggatgagcagccatgcggtggaagaggactggatgtccgtgaccgccacctgacccgcgtagatcgggtcagccaggtccttcaggctggtgggagtgggcaggccctcggaggccatcagctcagtgttgaggatgatggcgccctcctgagaggtgatgggggcggtgtagtcgggaacctcagtgagggtattcacttcaaagtccagaggcaggaacatgctgttctgctcctgggcgctctggaggtagaaggtgctcatggtcaccaggtcggcctccagatttgtcccttccgccagcagcttgccccccagctcggaggtgccgtaggtctggaaaatgtacttgccctcataaccgttgccgtccaaggcgttcttcatggcggtgaccgcctcctcatcggcattggagtagatcaccacctgcttttctctgctgtttccggcgctgttgtttcctccgcaggcggtcagcagggagaggctcagggcggcagacagaccaatggacatcatttttttgtaattcatcacagaatcccttccttttttgtcgttttagaactgtgtttggatcgatacccggccagccaggagaacagcgccttggccgccagattggtggctaaaatcaacagggacagtacaaacacctcattgaagcggttgacatactgcagctgtttgatcatggtggtaaggaccatggtcctggccccggctatgaagataagggcgctgatggtgaccatggagttgatgaagtagtagctgaacacctcgatgagactggacagggcgtttggcgtgaccacccgcaaaatggtcttcagccagctgtcccccatgagcatggcggtggtctcccacccggcgttcattttggacagggcgttcttcatcatcaggtagggggtggagaaatagtgcacaatgttgcacaaaaccatcaacagcagggtgttctgcaaactggtgccggagaagaggaacaggtaggacacgcccagcaccataccagggatggcgttggtcaccagggcaatgctctcaatggtccgcttatatctccggcccaggctgcttcgggcggtgatgagggccgctccgtaggcaatcagcgtaccggcggcagcggtcagcagtgccatgagcagggaatgcccataggcggccagcaggctgctgtctgagaggaccgtctggaagtgctccaaggagaattcggtctggtagggccactcctccaccgtgggaaccacaaagattacggcaaaaatggccagaattcccgcggaaattacggtaccggacaggccccatcccacatcccgcagagaatttttccgcagatccgcattggaaatccggctataccggatgttgaaccgctccaggatctgcagaatgcagatgctgccgatggaggggatcagcattaccatggcgatgacagcgccccggttgaagtcggggatcccgcccagcatctggttatagagcagggtggcaatgacctcatagcctccgcccaccgaggcaggaataccaaagtcggtaaagcacaggaagaaggcctggataaaggctccggcaaaggtccccagaagggggcgcagcaccgcgatccagaaagtggacagagccttgtcacccattaccttggagacggtaagggtctttttgtccacaaatcccatggtattgtggatgagcaaaaaggctacgggaatggtgtagatcacatagcccaccatcaggccgaaaaagctgtaaatatcaaacagctgccgccccagaaggcgggtgatgaggccctgcttgccaaaggaatagatgatggcaaagccataggtaatggtgggcaaaaacataggcagggtagccacagaggtgataagccgcttgctccacttgggcagactggtgtagtgcaccccataggccagcagaaaggccagcagcgtggccgctgccgccgaggccccggccaccgcgaagctgttgcccagggccgggagaaatcccttctgcgacagtaccgaggcataaaattctccggtcagtcccccgtcccacagggacttccccaacaagatcagaattgggccggccaggaacacagcaaacagggcaacaatgaccgcgaaaatcagcttcagttcacgattggtccgtgtcatggcttccccttatcctgcctggacggcccatgtgggacagtcgccaaacagggcatagatgttgttgcgcttgatctccaactggttgaggatgaacttacgcacgaagtcgtttttaggctggtgaacaatttcctccggcttggcgtattgggagatggtgccctgctcgatgatcagtacccgatcagagagggtcagggcctcctccgggtcgtgggtgacgatgatggtggtcaggtgatactcccgagcgatggtcttgatccggtccttgatggactccttgatcactccatccagagcggacagcggctcatccagaagcaggattttgggcttcatgaccatagtccgggccagggccacccgctgcttctgaccgccggagagctggtcaatgcgcttgctcaagtgctcccgcaggcccagcaggtcgatgagctcctccacctcttctttggtagagatccccggcttgttgcgcagaccgtaagtgatgttctggaggacgttcagattgggaaacagagcatagtcctgaaagacaatgttgaagccccgcttctccatgggggtatgggttaggtcctgaccgtcgtaacaaatccggccgctgtcagcatccacaatgccaaggatcaaattcagcagcgtggtcttgccgcagccggaggggcccagaatggaaacgatctctccgtctgccacctgcagggagatatccttcagcaccggcacaccgtcaaaggatttctggatgtgttccagttccagcataaaatattgctcctctctcggaaaagtattctgttgttccgtgccgccgtatccttccggcggcggcatcatactaccagttttattgcggaacaaacaagcacttcaaatttaagcttttgtaataaaaaagtaaaaaacgctcaaaaaaacctcccttctgtgtaaggaacttacacggaagggagaacgatttgttattcgtctccgtatccccggtcggcaatcaccgcaccgcttttgtcaagactgcgggaaaatcgctcatagtcgctttggatgatccccatgtacagaagatctaccaccgccagatccgggatacgtgaaaagatggcgctgccgtagatggacagggcacgccctccggtgctcaggcacacatcggcgtatttccccagcaggggctctttgggactggtgatggcaatggtgcctgccccggcctttcgtgcctgcttaagtgccttaacagtatcaatggagcacccggaatgggacactgcaaccgccacatctgctactcccagatgggcggcagagatctgctggagataggtgtcggtgtgcatccggcagttgaggcccaggtaggtgagttttgtgagcagatcgctggcgggtgtgacggagttttccaccccatagatgtcaatggtccgggctgtagccagcatccgaactgctcggctcagggcatcggcggagaggaatttcagcgcgtcctccaacagtctccccgcaatacgcgtctccttgagggggaggtcctccaggcggtcccagggcttgaggtcaaagtcgcccaggtggtcaaagtaggggctctttggagattttccactccggtcccgcagcaggcagtatttgaagctccggtagccgtcaaagccaagcgcctgcacaaaccggaccaccgttggctggctgacctgtacttggtctgccagttctgcgatggtgcaccgggtgcacttctccggatcagccagcacctggtctgccacccgctgctccgaggggcgcagggtagcataagcgcttttcactcggtctaaaacctgtatgtcatgttgcattttcctgctcctcgctttgtaataaatttacatggtccaagttttttaagtgcgtgttattacaaaatattagtggtccatttgtaataaatactgaattttttttgatgcggatcacagctgattaccgtggtcggctactctgtcaatgatgcgggcaaggcgtgcaccttttgcaaccgcacccaataaaaggtacacgcttccccgcagtaatgatggacagcagaccggaggaaagattgggcggcagatagatgtactgtttgaaccatttccttcccagcgccctaatctttgtattgtgttctgagtctcggcccaatctgggccgagactcagagggcattttcgacagaatacagcgggagcacaccgccagacttccaggaaattctggttttgccaggcaagtttcaacagcgtgaccatcagttgaaacctggctgtggtgaggctgctgaaatgcagcatcatggcgatggcctttccatcacccgcaggcttttcgcgcacaagctcagcttgtttttctccttaatgattcttttatgaccgggccagaaacatatcgtatatcagcaaagctttttcagctaccgcactgcggtaaattctttgtaaaatatatcgaaatatttaaaggaaggctctcttcctgatatccatttgcaatgatgcagtaagaactgtagcaaaaggacattgcgcctgcctcaaggaaggcagatacccgctggatgctccctgtgttctttgtggaacgaatcagcggcctgcggaaaggcgaactggccgccctgctctggagcaatctggaggtggagcgcaaagcactgttggtatccaagtgggtcgtccagggcggagggatcaaggtgactcggcccaagacagcgacctatgcccgaaaaatctccatcccccaagaagcggtgaatttgctggtgcaggagcaggcggcggagaagatgggcagttttatgacgcatgtcatgtgagaataggaaaaagcaccggagaaaaggcaaatcccttttctccagtgctttccgcttctttcagcttgtgggccaaggccctgatgtatcccgcaaaagggcgcaaaaacaccccgcaaacgagtatgtttgcggggtgttttggagctggaaacgtgacttgaacacgcgacctgctgattacgaatcagctgctctaccgactgagctattccagcgtatcagaaacgtctgggccctgtctgggatgactggctctggagggcgggcagacggcgcacacggaataaaacataattttgctgcgctgagatatgtgcttaaatattatacgcagaaaaccggagtgcgtcaagaggaaaacgctgatttgtctaaactgtctgatttcgaaaatagcagccgcagttttttctcgccgcaccgcgccccgttccccgggattttaacagaaaacaaatattcaaacggcaaaaaatgtagtatgataggggcggaagaagcgagacaattgcaaggaaacagggaaagaggtaacagttatgcctgaattgagaaagacaaagatcatatgcacactggggccctctgtggacgatgaggagaccctgcgccagctgattctggctggcatgaacgcggcaagattcaacttttcccatggcacgcacgagtcccagctggccacgctgcaaaagctgaagcgggtgcgggatgagctggggcgcccggtggccacgattctggacacgaagggcccggagatccgcatcaaggccttccgggacggcccggtgagcctggaacggggcgcccccttcatcctgaccacggaagaggtagagggcgatgccggacgggtgtcagtgacctatcagaacctggcaaacgaagtggagcccggctgtcacatcctggtggacgacggactggtggatctgctggtcaaagaggtgagagggccggagatccactgtgaggtggagaacgggggcgttctctccaacaacaaaagcatcaacatccccaacgtacatatccatctgccggcgctgacggaaaaggaccgggaggacctccggttcgcggcggagcaggactttgactatgtggcggcctcctttgtccgcaaggcggaggatgtggaggatatccgggaggaactgtgccggcacggtggacaggggatcaggattatctccaagatcgagaacctggagggtgtggacaacctgaacgagatcatcgaggcctcagacgggctgatggtggcccggggagacctgggggtggaggtgcctgcctgccaggtgcccgtgctccagaaagagatgatcgccaagtgtattcaccaggggaagccggtcatcacggccacccagatgctggactccatgatgagaaaccccagacccactcgggcggaggtctccgacgtggcaaatgctgtattcgatgggacctcctgcgtcatgctctctggggagaccgcgtcgggcaaatatcccctggaggctgtgcgcaccatggcggacactgtgctggcggcggagcaggccatcaactactggggcaggttccagaagatggggttctccaagcgggcggaacgccccatcagcgatgccatcagccacagctgctgcaccacggcactggatctggaggcgaaggccatcctagtggccacgcagtcgggaaactctgcccgggtgatctcccgcttccgcccaggctgcaccatcgccgcattcaccactacggagcgggtgcgccgccagctggccattacctggggtgtccacccattcctgttcgggtcagtggactccacagaccgcctgctttccctgtgtgtggagtgtgccagaaaggaagaggtggtgtccgcagaggatacagtggtgatcactgccggtgtgcccatcgggcagagcgggaccaccaacctgatcaaggcccaagtggtaggagagaagatctgagggatgggccccctttttataggaccaccataacaaagcggcacgccatctgggacggcgtgccgctttgctgtagaaaacagctttcaaaggagggagagctccgcagcaatggcgagggcggtctcgtctaccagttcgaagttgacataggggtgatagagggcctccaggtcgtcgtgcatggccttggcctgggagagggaatccacggcctcatccatcagggcgctggtgatcttttgggagaagcgcagccggggcctgctgcggcggagcagatcggcggagacggcgttgtccagaaggaggcgacgataggccttgccggggtaggggtgcgccggggaggaggaaagaaaggccagggagagctgggggatgagcaggtgttccagccggtccggcgccatgggagaggggcaggccaccacatcatagcctgccttcagggcacccgagagcagatgggccagcattcggtgggccaagccataccggtcggagagctcatagatccgctggcactggcactccactgtcccccagaggcacatctgcccgcggtgggtgacggcgccgagaaaacgctgtttcaccgtgccggcgggcgcccccttccggggcttcagctcccgatccaggatgccccgggcgcgtttggacagcttttcctccagcgcgtcggagtccaaggtggagcggacgtcgtacatcagctcggcagccgcatccagacagcggtatgcccgctggtagtgccccttgtagcctcgcatacaggaaataatggcggtgcggagtccctccatcccgttgtggtcatagcacttccccagattgatgtactgctccaccacccctggatatttcggctccaccacatggggggcggtgccgtccaccagagcggcctttttgcctgggaggaggatggcatccagggaatccggatcaccggagcagaggatgcactccacgggctcgcctgcctcctgggccagggcagccacgcggcgcatcagggtggatttcccacagccggggccgcccttcaggatgtagatggcggaggcctgctccggcggaagaagctggtcgtagagagaatagaatcctgtgggggagtttgcccccagaaaatactgtatcgaattgacaggtgacatggccgaccctccgtttttgggcgccggagggaaaatttcccccgtgcctctgattttctatctcagactatgcggcggaggggggagaggtgcggcgggacttgggtgaccaaagagaaaaagaaacatgggtggaaaactgttggaaatttgtattgacagaggtggaagagttgcgataaaatgacataaaaaatgaaagaaaacttgcaaaagttgagggaagaagagaagatgccagcggaaaaaccgggaaaacgggactggcagagagaagagggagacaatgcgtacatttgaaacgaagatccaggaattgaagaccgcggtgcttacagaggtggcccgcctgacctgggaggacaggctccagaccgggactgctattctggacatcccggagaagatcatccccgggcccacggccacgctgcgctgctgtatttataaggagcgggccatcatcaacagccgggtcaagctggctatgggaggggacaagagcaacccctgcctggtggaggtgctgcctatcgcctgtgacgagtgtccggtgaccgagatcaccgtggggccctcctgccggggatgcctggccacgcggtgcgtccatgcctgccccaaggatgccatcactattgtgaatcaccgggcctgtatcgaccatgaaaagtgcatctcctgcggccgatgtgtatccgcctgtcagtacagcgccattctcaagacccagaggccctgtgagaagggctgcccggccaaggccatctccatgggcccggaccggaaagcatccattgacgtgagccagtgcatcgcctgcgggaactgtgtgtatcagtgcccattcggcgccattcaggacaagtctttcatcaccgatgccatccacatgatcatgggtgctgagcactggggctacaagacctatgccgtgctggccccctccatcgtggggcagttcgcccccgcctcctacggccaggtggtggccggattgaagaagctgggcttcaacggagtggccgaggtggctctgggggctgatatggtggcagatcgggagtcggaagagctggtggagaaggggatgctgtgctcctcctgctgtcccggctttgtggggtacatcaagaaaaagcacccggagatggagaatctgatctcccgcaccccgtcccctatggtgatgatcggtctgcacatcaaggagaaggacccggatgccaaggtgatcttcatcggcccctgcgtggcgaaaaagaaggagtttcagctgggccgcaccatgaacgccattgactgcgccctgacctacgaggagctgttcgccatgttcgagtcccgcggcatcgacctggaatccctggaggaggccccgctggacgaggcaagccccttcggccggaacttcgcccgcagcggcggtgtggcccaggcggtggcggaggccctgaaggagaaggggctggataaggagttccagctgaaggcagtgccgtgcagcggcatcgaagcctgcgaggtggccctgctgaaggcgaaacggggcgtgctggacggcaactttatcgaaggcatggcctgtgacggcggctgtgtccagggggccggctgtctggtgcgcagcccccgtaaccggatggatgtggagggtcacgctaagcaggccagcggccgcagcatcaccgacgcggtggccggccgggagctggtcccccaggacagcctgggggagaaggtcgtccctgtgcccaagtctcagcccaaggcggaggcggcggccaaaacagagggcacggcccggaaggcctgagcctcagacagaaagccggacgccggacctggatacaggtccggcgtccggctcttgtttcagggcggagagagggcaggagcagacacagaaacgcggcacggccttttggccgcgccgcgttctggctgcgcccggggtcacagcccctcggcatccaccaggatgttgtcagtgccatgctcctcgaactcggtgatgtaggcgtcgatccggctggtgagctcggcaaagttgctctcgtcgatggggacatcatccatgtcccgacgggccagatcctcggccagaatatcgaagaatacgttgttctcatactccatgatggcctcgtggatgccgccctccgcaaaggcgcgggaggggacgatctccccctcgaacacctcggccagggcgggcataccgctgaccagggccttgccgaagacaaggctttctacctcgtcgtaatccgcgaagcgctggtctccccgtgtggagttgaggatccagttgccgatatagaccaggtccagcaggcgccgaaactgcttgttggtaaattccagagtcatccacaggacctccttttgttggaagctcgggcggggagatccccctctctatattatagtatatgtgccatatttgtcaatcgctgagggagctttccgacagtgcgccgggagggaggactgtggagggataccacacaccgccccgattgggaaagaaagcttctgcgcaggcaggcgaggataggacgtgccgctgcttgaaagaatagacaggaaagaggcgagatatcctgaggagagaaaaattttctctgcttttttaaaaatattctgggctgccccttgcaatccagaactttgtatggtatagtaaaacagtaattatggtagtattggttagagtggggctgcggctccgctctttttgattgagaaaatgggggcacattcagccccggacaggaggaagtccatggcgaaagtgaccgatctggtggcccgactggcgcagccgctggcagaggcagcgggctgctccctttgggatgtggagtatgtcaaggaagcgggcacgtggtatctccggatctacatcgacaaggagacaggtgtgtccatcgacgactgcgaggcggtctcccgccccctgtccgacgcactggatgaggcggaccccatcgagggaagctataccctggaggtgtcctccgccggggccgaccgggtgctgaagaagccggagcacttccagcgcttctgtggagaagaggtggaggtgcgcctctaccggcccaaagacgggaaaaaggactttgtggggcgtttgacaggctgggcggatggggatatcaccctggagctgaacgggatgcccatcacgtttgagaaaaaagaggtcgcccagacgcggctgtacccccgcttttgatacgtttaggaggaattaccgtggctaagagagtaacgaaaaaggtcaacagcaccgagctggacagcaaggagttttttgccgccatcgcccagatcgaggaggagaagggcatcaaaaagggctatatgatggaaaagatcacccaggccctgatctccgcctaccgccgggaccacgagggggtgggtgacaacctgaccgtggaggccaacgaggagaccggagtggtccgcatgttcctgaaaaaagaggtggtggaggaggtggacaatccgggcactgagatcagtctggaggaggcccgcctgtccctgccccgagtggagctgggggacaccatccgcattgaggtcaagcccaagaacttcggccgcatcgccgcccagactgcccgccaggtcatcattcagggaatccgggaggcggagcaggggatgatctatgacgagttcacctccaaggagcacgagatcctcactggcatcatcacccggattgatccccgcagcggtgcagtggccctgcgcatcggcagcggctccgagagcacggaggcctacctcagcgtcaacgagcaggtgcggggcgagacctatcaggagggcagccgcctgagggtctatgtggtggaggtgcgccgggccaccaagggtcctcaggtgctcatctcccgcacccaccccgggctggtcaagcgcctgtttgagctggaggtgcctgagatctatgacgggacggtggaggtcaagtccatcgcccgggaggcgggctcccgcaccaagctggccgtctggtccgctgaccccaatgtggaccccatcggtgcctgtgtcggccccaggggacagcgggtgaacaccatcgtggaagagctgaagggcgaaaagatggacatcatcaagtactctgacgaccccgccgagtacatcgccgccgccctctctcctgccgacgtcatcagcgtggagcccctgcctgacggcaagagctgccgggtggtggttccggatgatcagctctccctggccatcggtaaggagggccagaacgcccgcctggcagccaagctgacgggctacaagatcgatatcaagccggcctcggcccccctggagcccatcgaggctcccgaggaggaactgttcgtcgaggaggccgaggcgcctgcggaggactctgccgggaccggggagaccgctcccgcagaggaagactaaccgtacaagaaccgggaccggggagctggggatcatccccctccccatcattccttacgcctaattcctaattcgtcgaagggtggtgcggaccgtgcccaagaagctccctatgcgccaatgtgtcggctgccgggaaatgagaccgaaaaaagaactgatccgggtggtcaagtccccggaaggggccatctccctggatttccggggaaagctgcccggccgcggggcgtatctgtgcccggacagcgtgtgtctggcccgggcaagaaagtccaaggctctggagcgggctttcgcccaggcgatccctccagaggtctatgagcgcctggaggagcagatgaaggaggtgcccggcgatgccccatgaccccatcctccatctcctgggtttggccaaaaaggccggacggctggagatcggagaggaaccggtgggcgcggccgcccgggcccaccaggcccgcgtgctcctgctggcggcggacgccgcccccaatacggtgcggcgggccgcccacttcggagaggccgggggcgccctgtggctccaaatgcccttcaccaaggcggagctgggggagcagctgggacgcagctcctgcgccatgctcgcggtgaccgacttcgggttcgccgccgccctggcggagaagctggccgctcgggacgaggagcggtacggccccgcagctcagcagctgagggctaaggcggaccgcgccctgatgcgccagagagaaaaacgccagcacgagaaaaatatgagacagggaaagcacaagccctgggcggccccgccctctcgccccagcaagagggaagaggccccgccgacaacgtccaggcgggagcggggcaaaggcggctcaggcagacggccgggcaggccggagaccgggacggggagagcgccccgaacattccccgggaaaccggggccgggcgggcggaagctgactgcgaagcccagatccggcggcaggaaccctgccgggaaaccctaagaaacgaggtggccctatatgatgaacaaataccgtgtccacgaggtggccaaggacttcaagctgaattccaaggacatcgcggagatcatgaccaaatacagccagacccccaagaaccacatgcaggtcctggaggagcgggagctggccgttattttcgactatctgacccagcacaaccaggtggagaacatagagtccatttttgcggacgtctaccatgagcccaagccggcccaggcgaagccagcccagccacagcagagcgcctccaagccggctgccaagggggagagcaggccacagagcgctgcgccccaggccgacaagagcggggagcagccccgcgctcaggggggcaagccggagcaggcccaggcccgccccgccacccgcgtgccggagaagaaggtggtggacacccgcaagggcggagccgtcaacctggagaagtacgacgagcggctggagtccttcaccgaccagcgtcagcaggaccggggcggcaagcagaagttccagggacgcaacgcccagcgccagcgcggccgccagcaggggccgggcaacaagcgcaagcaggaggagcaggagcgcctgcgccgtctccagctggagatcgccaagaaggcaccggtgaaggtgctgatccccgatgagatcggagtgggtgagctggccagccggatgaagaagaccggcgcggaggtggtcaagtgcctcatcaagaacggggtcatggcctccctcagcgacatcatcgactttgacaccgccgccatcatcgccgaggagatgggctgcaaggtggagaaggaggtggtggtcaccatcgaggagaagctgatcgacaccacggaggacaaggaggaggatctgcagccccgcgcccccgtggtggtggtcatgggccacgtggaccacggcaagacctccctgctggactatatccgccacgccaacgtggtctccggagaggcgggcggcatcacccagcacatcggcgcctatcaggtggatgtgaagggcagcccggtcaccttcctggacactcccggccatgaggcattcaccgccatgcgcgcccggggcgccatgatcaccgacgtggccatcctggtggtggccgctgatgacggcatcatgccccagaccgtggagtccatcaaccacgccaaggccgctgagatccccatcatcgtagccatcaacaagatggataagcccaccgccaatcccgaccggatcatgcagcagctcaccgagtatgagctggtgcccgaggagtggggcggcgagaccattatctgccccatctccgccaagacgggcatgggcattgacaacctgctggacatggtggtccttaccgccgagatgcgggagctgaaggccaaccccaaccgttccgcccacggtgccgtcatcgaggccaggctggacaagggccgcggccccgtggccaccctgctggtccagaacggcaccctgcatcagggcgatgtcatcatcgcgggcaccgccgtgggccgtgtccgcgccatgaccaacgcccagggccagaaggtggagtccgccggcccctccgttcctgtggagatcattggcatgagtgaggtgcccggcgcgggcgatgacttccacgccgtggctgacgagcgcatggcccgggagctggtggagcagcgcaagcacgagaacaagatggcctccggcagcgcagtgggcaaggtcaccctggaggatctgttcagccagatccaggccggtgagatgaagaacctgaacatcatcgtcaaggcagacgttcagggctccgctgaggcagtgaaggcatccctggagaagctgtccaatgaggaggtccgggtccgggtcatccactgcgccgtgggcgccatcagcgagagcgacgtgatgctggcctctacctccggtgccatcattgtgggcttcaacgtccgccctgacgccaacgccaaggagaccgccgcccggtccaatgtggatatgcggatgtaccgggtcatctacgacgccatcaacgaggtggaggcggctatgaagggtatgctggcccccaaattccgagaggtggacctgggccgggccgaggtgcgcaatgtgttccgcatcaccggagtgggcatggtggccggctgctatgtgctggatggcaagatgcagcgcaacgcccagatgcgcctcctccgggacaacattgtcatttacgacggggccatcgcctccctccagcgcttcaaggacagcgtgaaagaggtggccgcgggctacgagtgcggcatcaccttcgagaagttccaggatatcaaggagggcgatattgtagaggccttcctgatggagcagatcgaggtctgaccttcctctgtctctaggcagacccgcagttccgagatgggccgcaggagatacggaccctgcggggacgaggcgtgctccccccagcggcggccggagtaccggagtaaaaggaacaaccgaaaacaggcccgttccatccccaattcatttgaggaggggacgggtctgtctgcgtgaaaggagctgtgctgtgagctatgtgatgctggtggcggccgatcaccccctgccactgtacgactccgggatacgccggagttctgcttccacagcgggcggagcgtgcgttcaggtggagactcccggattttccatccagccgcatcagtattaccgggacgcggtggaggcactggggctggagatgaagctctggcagtacgagctgaatgtcgaggccgcagaagcggaggcggagcagctgagggcctacctgaagcgcagctgccgccctggcgagacaatagagctgtggaatttgtgggtgggagacgaccgggaggagaagatcgcccggttccaggggaggctgggcgatctggaccgggaagccctggagcagctgtgcgaccctcccgcacaaaacggctgccccggccagtgccggatggcggtcaccatttgattttcatctgcgggcggttttgcccgggaaggaggaccaactatggcaagcaatcgcatcggacgcatcaacgaggagatccagcgggagctgtccgctctgatccccgcggtcaaggaccctcgggtgtctgggatgatctcggtgacagcggtggagaccaccccggatctgcggtacgccaaggcatatatcagcgtactggacaaggagaacggggagcgggtgctcaagggactgagatccgcctctggctggctgcgccgggagctggggagcgccctgaggctgcgctacaccccagagctggtgttccagctggatgactccatcgacaagggagcccacattctggagctgctgcgcagcgtggaggggcccaaggagtaaacagaggcccggagggcaaaggagacctggatatgaatgagcgacagacagcggagtggctgatggaacgggaggattttctgattctcacccacgtccggccggacggagataccatcggctgcgcagcggggctgtgtctggccctgcgggggcggggaaagacggcctgggtgctggaaaacccggaggccaccagcctcttcaccccctatctggaggggctgaccgccccggagggctggagcccggacaccgtggtatcggtggatatcgccgcccgggggctgttcccggagaacgcccggtgttacctggagcgggtggacctggccatcgaccaccacccctcccaggagttttttgcccgggagacctgcctggacgccgggcgggcggcctgcggggagctgatctatgatattgcgggcctgctgggcccggtcacccgggagatggcggtgcccctctacgtggcggtgtctaccgacaccggctgcttcgtctacggaaacaccacggcggacacccaccggacggcggccgccctgatggagaccggcatccctgcggcggagctgaacaagcgccacttccggaccaagaccctgaagcgcctccggatcgagagccggatcgtggagggcatggagctgtttgacggcggggagaccgccgtggcggcggtggacctggcgatggtggcccagctgggggccgacgagcgggacctggaggatatcgcctcctttgtgggacaggtggagggcgtgaagaatgcgatcaccatccgggagctgaggcccgggacgtgcaagctgtccctgcgcactgatccggaggtccttaacgccagcagggtatgcgccctgctggggggcgggggccacgccgccgcctccggcgccacggtggagggcagcgtggaggaggccaagcgggccatcctgtgggcgatagagcaggtgcgtcatggctgacggcatcatcatcatcgacaagccccaagattggaccagtatggatgtgtgcgccaagctgagagggatcttccacgaaaggcgcatcggccacgccggtacactggaccccatggcgacaggtgtgctccccgtgttcgtgggccgggccacccgggcggtggagtttgcctccgagtcggagaaagagtatgtagccggcctgcggctgggggtggagaccaacacccaggacaccaccggcacagtgctggcggagcggccggtctccgtctcccaggcggagctggagcaggtactggggcagttccggggagagatccggcagatcccccccatgtactccgccatcaaggtgggaggaaagaagctctatgagctggcccgaaagggccaggaggtggagcggcagccccgggccgtcaccatccacagcctgacgctggaagagcagacggggccggcggattacaccctgcgggtccggtgttccaaggggacctatgtgcgcaccctgtgtcatgatattggccgggcactggggtgcgggggctgcatgagcggcctgcgccggaccatggcggccgggttcaagctggaggacgccctgcctctggagcaggtgctccaggcggagggacccgcgtccctgcttctgggggtggacgcctactttgctgaccgccctgtgctgatcctcaagcctccggcagagaaaaaggtgcgcaacggcatgagcctgttcctgccggagacaccggacggggagtaccgggtctatggggcggaggggaccttcctagccctgagccggatggagcggggaaggctgaccaccatcaagagcttcttcccggtgtgagcgcccggaagtccgcagagagaaaaagaaggagacttatcagattgtgaacaagaacagacgagtgatcgccctcggcttttttgacggagtccacaacgggcacggggccctgcttcgccgggtggtggacaaggcccgggagctggatgcggtggcggccgcattcacctttgaccgcagccccaccgccgccatcacgggccagacagtgcccctgctcagctcggtggaggaccggggatggctgatgcggagccgctacggcatccaggaggtggtggtgtccaactttgatggcatgatgcgcatggactgggaggactttgtggaccggtatctggcggaagaactgggcgcggtccatgtggtggccggccacgacttccacttcggctatatgggtaagggcaacccccggcgcctccaggagaagtgcgcccagttgggcatcggatgtgacatcatccccaaggtggagcaggacggcatcaccatctcttccacctacatccgcaccctgatcgcccagggggagatggagcgggcggtccagttcctggggcatccccatgtcctgactcagaaggtggcccacggcaaaaaaatcggcagcagcaccctgggttttcccacggtgaacctgcatatcccggagggagtcatcgtgcctgccttcggcgtctatacgaccaaagtctgcttcgggggggagagccgtatcgccgttaccaacgtgggggtgcgccctacagtgcaggacggagaccgccgggtgacggtggagggcttcatcttggactttgacggggacctgtacggtcagacgatgcggatggagttctatcaccgcctgcggggggagcggaagtttccctctatggaggagctggcggaggagatccgcaggaacgcccagcaggcccgggaatattttcaggaaaaggcggagtatcaataaggagaggggaaaagaggccccgccgcgccacaggcggcagaaaatcaaaaatcggatcgggagggactacgaatgccccattcacaggatacacgccacatgcggtacgagaccctgtatatcatgctgctgatctttgcctccgggcttttcctggcgggcgcgctgctggataccccggacaatattgcacggggcctgatccgcatcgtgatgacggaggaccccctcatcactgactatgtccggctggccggcgtgggggcagccctgatcaactcctctgtagtcaccgccctctcggtgctgatcctgcgcagctctggggaaccggccaacggcttcacgctggtggtggtaggattgatggcggggttttccctgtttgggaagaacccggtcaacacctggcccatcgtcctggggacttggctgtacgccaagagcagaaaggagccctttggaaagtatgcggccgtggccctgctgtcctcggccctggggccggtcatcagctatatcatcctggacaacggctggggcaccccggtgcttggggtggcgaccggcctgatgatcggctttgtaatgccctctctgtccgcctatacatacaagatccagaacgggatgaacctgtacaatgtagggtttgcctgcgggctgatggccatgctgctggtgtccctgatgagctccttcggggcggagccggaggtctcttacctctgggccacagggtacaacgctctgttcggcgggctgctggggacgatgtgcatagcagccatccttgccggcctgtttttctgcaggaagccggtctgggcggcctgggcgggttaccgccgcctgctccagaccagcggccgggcccccagcgactatctgcgcatgtttggcgcggcgccggtgctgatcaacatgggggtcaacgggttgatcgcaatgggggtgatcctgctcaccggcggggacctgaatgggcccacagtgggcggggtcctgactatcgtgggcttctctgcctttggaaagcatgcgggcaacatcgtgcccatcatggccggtgtggtcctgggcagcttcgtgatgcactcctcggtctccagcggcgccgtccagctggccatgctgttcgggactaccctggctcccatctctggctacttcggctggccctacggcgtgctggcggggttcctccactcggcggtggtactgtatgcgggcacgccggtggccgggctgaacctctataacaacggcttttccggcggcctgctggccatcatcctgtatcccaccatcgtggccatcgcccgccaccgcaagccggtgatcaccgaggcggagtacttcgaccacatggagcacgacgagccggagaccccgcctccagttcaggacatgatcgaggaggaggactgagggagcgccccggctggaaaaagaaaatggattttccatacagaacttctttacagagcgggatggggagtatataatcattccgcggcaggggggcggcgcaggtgtgcgctccggcaagaccgcacgggacaacgtcattttggaggctgctatggaaaaagaggtcatcatctccatcaaggggatgcagaaatatgagaacgccgaaccggacaccatcgagctggtgacaggggggcgtttggagcgggacggcgagagctttactctgtcttatcaggagagcgccgtcaccggcatggacgggaccctgaccaccttccagatagagccggagcgggtgaccctgctccgggtgggggagtacacctcccaaatggtgtttcaggaggggcggcggcacatgtccatgtacaacaccccctatggcaccatgtccatcggggtgaacacccggcatttgacagcccaggtgggcgagagcggcggcgacattgagatcgattatgccatcgagatcgaccacacggtggcgggacgaaatgtatttcagatcaagatcaaggaggcggcaccgggctgtagcttgaagcagtagcgtggtc

SEQ ID NO: 13629 - DNA, 273 bp, Unknown
  gut microbiota DNA sequence
accgtcaaggagagccgggggcggctttcctacctcacgccggacaggacaaagcctatcacagcccgaaagctgggggacgattttgacaaggctgctgtccttgccctgctcacgcagaacgcccacagagctgccgaacagaccaaagccatacccgaataccctgccgcagttaaaaagccgttacaaggggaaaaagctgcaaaaaccaccccggcagacaacaccttgcagcgcatggttgaccgggaagccaagcgagccgagggc

SEQ ID NO: 13630 - DNA, 242 bp, Unknown
  gut microbiota DNA sequence
gtggcgctctttgctggacaggccgcaaaactcagctcgaagcagaaagagcgggccttccaggaagtacgctggggacagcgagcggagaatatccaggtgctggagcaagctgggatcacagtggacaagtttggcggcgaggcattccgggccgctgtgtccgagggcaacaccaaacttgcccggctgcttctggaaaaaggggcagacatcaattaccacaagccggacatggtgtt

SEQ ID NO: 13631 - DNA, 388 bp, Unknown
  gut microbiota DNA sequence
attttacagacagaccatccagagttccaaaactggatcgactggttggagcgggacattcaggactggaaccagcggcgggaggttgcccaccatcttcgggcatacggaggtatgggctcgttcaacgacctgcccagtatgcgtggaaatcacgactatattttcgactttctcaagtccgtgtgctatgccttcggccatctttatggcaaacgggaaggcatttctccggaggcattgatggaggagtgcctgcacgatgtagagcaggcagcctatcacccccataaggcactgaaccaagccattgcccagcacttgatgcagggcgatttacaggaaaacctggataggctgtaggaggacttgttatgaacaaaagact

SEQ ID NO: 13632 - DNA, 29074 bp, Unknown
  gut microbiota DNA sequence
ggcaaaaaagacgtcatccgcccgcccccttgctcttccttttcaaatcgaatccgctccgccgggcttcgatttggattttgatacagaccgacagccactgcatctttttctgatctgctgttgaaaacgaaagacacgctgaaaagcgtgtctttcgtttttatcccgccgtctctgggcggcccatccttctgggatccagatgctcaggccggcagagccgtacctgcgccagggtcctcgccctggcacccagctgaccgcgcctgcggtcaggcttttaattgctgtaccccatcaaaaaggtgtccacctcgtgggcggcggcgcgcccttcctggatggcccagaccaccagggactggcccctgcgcatgtctccggcggcgaacaccttgggcacattggtggcgtatccgccgggggcggtgctgacacaggagcggggggtacgctccaatccaaaggtctcggcaacataggcctgggggcccaggaagccggcggcgatgagcagcagctggcagggcagttcttcctccgagcctgctacctcgtgcatcacagtgcgccctgtcttcttgtccgtccccgcctccagccggaccaccttcaccgcccggaggttcccctcgctgtcggtcagcagttccttcaccgtggtctgatagatccgggggtcccgcccgaagacggcgacggcctcctcctggccgtagtcggtcttacacacccggggccactccggccagcgattatcgtcggcccgctggtcgggcagcctgggcatcatctccagctgcaccaccgaacggcagccatgacgcagtgccgttcccacacagtcgttgcccgtgtcgccgccgcctaccaccaccacgtccttgcctgcggcgctgagataagtgccgtccttcagcttggagttgagcaggctgcgggtggtggcggccagatagtccaccgcgaaatggaccccgccggcctcccggccgggcaccgccagatctcggggctccttggccccggtacacaggatcaccgcatcaaactcgtccagcagctcctgggcactcttgtcccggcccacatccacgccggtgacgaaacacacgccctcctcccgcatcagctccacccggcgcatgacatacttcttctccagcttcatgttggggatgccgtacatcaacagtccgcccacccggtcgtcccgctcaaagacggtgacgctgtggccccggcggttgagctggtccgccgccgacagtccggcggggccggagcccaccaccgccacccgcttgccgctgcgcactctgggcggccgaggctggaccaagccccgctcgaatgctgcctcgatgatgcccagctcgttctcccggacggtgaccgggtcgccgtggaggccgcaggtgcaggcggcctcgcacagggcgggacacacccgccctgtaaactcaggaaaattgttggtcttcagcagccgctccagcgcctggggcaggttccccgtgtagagcaggtcgttccactccggcaccaagttgtgcagggggcagccggaagtcatcccgcccagggtggcgccggactggcagaagggcacaccgcactccatgcaccgggccccctgctggcggcggtccgcctcggacaggcgggggtggaactccttccaatgctcgatgcggtccagtggctgctccgccggatcagtctgccggtcatattccagaaatccagtgatctttcccataacactttctcccccttattccttggtgctggcactgaatgcctccacctcagcctgttcgtggctcaggccctgggcctcaaattccgcgatggtgcgcagcattctgtcgtagtcccgaggcagaatcttcttgaaacaggctgccttctcctccaggtggtccaagatctcccgggccttaggggagccggtggcctccacatgctcggtgagcatggtccggatctcttggatgtcctgccgctccgtcaccgggtccactgtgaccagcgccttgttcagccgcaggtacaggtcccggtcctcatcccacacataggcgatgccgccggacatgcccgccgcgaagttcttgccggtaggtcccagcaccaccacccggccgccggtcatgtattcacagccgtggtcacccacgccctccaccaccgcgcaggcgccggagttgcgcacggcgaatcgctcccctgccatgccgttgatgaatgccttgccgctggtagccccgtagagggcaacattgccaatgatgatgttctcttccggtttgaagggggaccctttggggggatagacgatgatttttccgccggagaggccctttcccatatagtcgttgcagtccccttccagctccagggtgagccctttgggaatgaaggcaccgaaggactgcccaccgccgccggtacacttgacagtgaaggtgtcgtcgggcaggctgctgccgtggagcctggtgatatcggaaccgaaaatggtccccagggtccggtcggtactggtgacggggacgttcaccgtccgcttctcccccttctccagcgcccccttcatcttcttcagcaggaccctcatgtccaccgtcttctccagctggaagtcataggcgtccgcggggtcgaaatggcgcttgacctgcgccccttcaaacgggttatccagaatggcggacaggtccaccgtggcggcccgctcgttgacggcgtgctcccgcaccttcagcaagtcggtgcggcccaccagctcgtccacggtacgcacccccaggcaggccatgtgctcccgcagctcctgggccacgaagcgcatgaagttcatcacatactccggttttccggtgaagcgccgccgcagctccgggtcctgggtggcgatccctgccgggcaggtgcccaggttgcatacccgcatcatgcagcagcccatggtgaccaggggggcggtggcaaagccgaactcctccgcccccagcatgcaggcgatggccacgtcccggccgctcatcagcttgccgtcggtctctacgatgacccgggagcgcaggccgttcatgatcagggtctggtgggtctcggccacccccagctcccaaggcacaccggcagaatggatggaactgcggggggcagcaccggtgcccccgtcatagccgcagatcagtactacctgagccccggccttggccacgccggaggcaatggtgccaactcccggctcggcgcacagcttcacagagatgcgggcttgccggttggcattcttcaggtcgtagatcagctgggccagatcctcgatggagtagatgtcgtggtgaggcggcggggatatcaaggtgacgcccggtgtggaatggcgggtcctggccacctccggcgtgatcttcttccccggcaggtggccgccctcgccgggcttggccccctgagccatcttgatctggagatcttgggcggacaccagatactcgctggtcacgccgaagcggccggaggccacctgcttgatggcggaatttttcagggtgccgaagcgggcggggtcttcgccgccctccccgcagttggatttgccccccagggtgttcatggccaccgccatgcactcgtgggcctcagcggagatggagccgaaggacatagccccggtcttgaacctcttaacgatggagtccacgctctccacctcgtccaagggaatcggggtgtccagatactgcatctccatcaggccgcggagggtgtggggcttggaggcgtcgtccaccagggccgtgtactccttgaagagtttgtagtcccccctgcgggtggcctcctggaggagatggatgacctgggggctgtacatgtggtcctcctggccagcgcgggccttgtgctcgccccggctgtccagggtagggtcgccgcccaggcccagggggtcgaaggcccggctgtggtggtcatccaccagttgagcgatctccttcagacccacgccccccacccggctgagggtaccagtgaaatactcgtccaccaccacccggtcaatgcccactgcctcgaagatctgggcagactggtaggactggatggtagagatacccatcttggaggcgatcttcacgatgccgctgaggatggcctggttatagtccttcaccgcggtgtggtaatccttgtccagcaaaccttggtcaatgagggagccgatggccgcatgggccagataggggttcaccgcccgggcaccgtagcccagcagcgtggcgaagtggttcacgtcccggggttccgctgactccagtacgatggacacggcggtgcacttcttggtgcggatcaggtatcgctccacggctgagacagccagcagggacgggatggccacatggttctcgtccaccccccggtcggagaggatgacgatgttggccccgttgcggtaggcccggtccaccgcaacgaacaggtggtccagcgcccgcttcagaggggtgttcttgtagtataggatggagacggtctccacctggaagccgggctgcttcatgtcccggatcttcatcaggtctaccgaggtgaggatagggttgcccacctgaagggcgtgagcgttgtccgcccgctcctccagcaggttgccgtcgttgcccagatagacggtggtgtcggtgaccacctcctcccggatggcgtcgatggggggattggtcacctgggcaaagagctgcttgaagtagttgaacaggggctgttcgtggtcggagaggaccgccagtgggatgtccacccccatggcggcggtgggctccgccccggtgcgtgccatagggaggatggtgtttttcacatcctcataggtataaccgaaggccttctccagccgggtcagctcctcctgggagtagccgggcacctttttgttggggaccggcaggtccttcagccggatgaggccccggtccagccactcgccgtagggctggcgggcggcgtaggtctccttcagctccgcgtcatcaatgatacgcccctggactgtatccaccagcagcatcttccccggctccagccgggatttcttcacgatcttcctggggtccaggtccagggcacccacctcggaggagaggatcagcttaccgtcgtcagtgatatagtaccgggaggggcgcagcccgttccggtccagcaccgctcccatggcgtcgccgtcggagaacaggatggaggccggaccatcccagggctccatcatgatggcgtaatactggtacaggtcccgcttggcccggctgatactgccgtccttggtccagggctccgggatggtgaccatcaccgcgaggggcaggtccatgccgctcatgaccaggaactccaggatgttgtccagcatggccgagtcggacccggccccgttgaccacggggtagatcttgtccagggcgtcgtcgatcaccgggttggacatggtctcctcccgggccagcatccggtctgcgttgccccggatggtgttgatctcgccgttgtggaggatcaggcggttagggtgggcccgctcccaggaggggttggtgttggtggagaagcgggagtgaacgcatgcgatggcgctgtggtagtcccgattctgcaggtccaggtagaacttccgcagttcccccaccaggaacatccccttgtataccactgtccggctggacagggaggggacataggtgttgtcgttggactgctcaaagactcggcgggccacatacagcctgcggtcgaactccagtccccgggccgcatcccccggccgcttcacgaaggcctgctggatgttgggcatcttggacagtgccttctggcccagcacctctgggcagacaggcaccttccgccagcccagaaattccatgccttccttggccacaatgacctcgaacatcttcttagcctgattgcgcctgagagtgtcctggggaaagaaaaacatacctacgccatagtctcgcgcctcccccagctggatgccgcactccgtggccgccttctgaaaaaactggtgggagatctggaggaggatgcccacgccgtcaccggtctttccctcagcgtcctttcccgctcgatgctccagcttctccacgattttcagcgcactgtccaccgtctcatagctctggcggcccttgatgtccaccacggctccgatgccgcaggcatcgtgctcaaacgccgggtcatacaagccgcgctgctgatagccttctctgttcatctcgatttcccctttccaggtcagcttacaaaaatacggcagtcaaactcccggactgccgccgcgagactgcgctgtctctcccatacgcacatagccgtctttcaccgcagggctcctgtcccaagcctagtcattttgcatgaacttcgcctccttctttcaagtttaggcatctcgaaattatgtctctatcagagacatgaggccctctgttttcagctatgggcgaaagtatagtacactacttcgtgaaagtcaatattttttgaaattatattttatctttattgcaaatatatggccaattccaggagcgccctcctattttatgcaatttttacattcaactttttcttttctattttttgagaaacgcttccctctccttctgactctggcacgcaaaaaatttgttgaacttggaaaagagggtctgccctgtctccctgcattttgattgggtcccacaaactttcttcctgcatcttgacaggagagaaccggaggtataaactcacactcaagcaaaggcgctgtcgggatcagacccggcggcgcctgcttcttttgctgcagcagaggaaccaaaatcaaacgcacaagggcgtgcgggacggcgaaggtgccggaccgcacgcccttgtgtaaaaaggagcgagagaagatggatttatcggtatggtatctcatgggcgcaatcctggtctttttcatgcagtgcggattcgcaatggttgaaacaggatttacccgggcaaaaaacgcaggcaacatcatcatgaagaacctaatggatttctgcatcggaacggtggtcttcatcctgctgggctacggcatcatgaacagtgagaactatttcttcggcctgatcggcatgccggagtatcagatgtttacgaacttctatgccttcgactggtctaacttctttttccagctggtgttctgcgccacagcggccaccatcgtctccggcgccatggcggagcgcaccaaattcctggcctactgcgtgtactccggcgtcatcagcgcggtggtctaccccatcgaggccgggtgggtctggaacagccagggctggctggtccagttcggctatgtggacttcgccggctcctctgtgatccacatggtgggcggactggctgcccttatcggcgcgtggatgctgggcccccggatcggtaagtacacccgggaaaaggacggccgcatccaggtcaacgccatccccgggcactccctgaccatgggcgcgctggggtgcttcatcctctggttctgctggtacggcttcaacggcgccgccgccgcagatgccgcccagctggcccagatcctgggcaacaccacccttgcccccgccgtggccaccttcacctgcatggtcttcacctgggtgcgcagcggcaagccggacgtctccatgtgtctgaacgcctctctggctggcctggtgggcatcaccgccccctgtgccacggtagacgccttgggcgcgatcctcatcggcgcagtcgatggcatcctggtggtgctggtggtggagctgctggacttcaagctccatgtggacgacccggtgggtgctgtagcggtccactgtgccaacggcatctggggcaccctggcggacggcctgttcaacacctccagcgggctgctctacggcggcggtctctaccacctgggggtgcagtgcatgggtgtagctgccatcgccgcctatgcctctgtatccatgttcctggtgttcaagttcatcgacaagaccatccgtctgcgggtatccgccgaggatgagatcatcggcctggacatcacagagcacgccctggcctccgcctacgccgacttccgccccgcagcccccagcgccctaggcggagaaggggccggcgggctggtggacctctccggacttgtgccggccgcgctggaatcccggcctgcgcctgacccctccggccggaagctgaccaaggtgaccatcatctgtcgggaggagcgcttctccatcctgaaggacaccatggcggccatcggcgtcaccggcatgacagtgagcaacgtgatggggtgcggcacccagctgggcaaggtggggcagtacaggggcgtcaaaatgagcatgaacctgcttcctaagattcaggtggacatcgtggtgtccagggtggaccccgccctggtggtggctgcggcggaaaaagccctccgcactggcaatcagggggacggaaagatcttcctgtacaacgtagaaaacgtggtcaaggtccggaccggtgagacggactacgatgccctccaggacgacaactgaacggctcctccccgccggagcaggcaccgctattctcatagggcggcttccagcggctccctctcaagccggctgatccgctgatcagcataaaagagccgttcccctatctcagggggacggctctttttatcatacaagaaaacgggcagggtggccccccctccgctctcacagccggctgaagaggtactgccgctcccccttcgccgtctccacgctgtggacccggacctggaataccttctccagcacgccggaggcgtagatctcctccggcgcacccacccgccgcagctgtccctcctccagcaccgccacccggtgtgcgcagctcagggccaggttcaggtcatggaggaccatgaccaccgcttttccctcccccgccaacgtccgggcggtctccgccagctccagctggtgggcgatatccagaaaggtggtgggctcgtccagcagcagcaccggggtgtcctgggccagcgccatggccagataaaccttctgtctctgtccaccggagaggtgggccatgggcaccccctccagcccggccacaccggtgcgctccatggcttggcgggccgcctcccggtcctccctggagtagcggcggggatagcccagataggggaagcgcccgtggaggaccaggctccccgccgtgatgccgggcagcggccggctctggggaagcagcgccgccaaccgggcaaactgcttggcggagagccgggacacgtcctgcccctctatccttacctctccccgttccggtgccatcagccgggccgccacccgcaggagagtggattttccacagccattaggcccggccaggacggtgaccttccccggctcaaaggccagggatacgtccctcagtaccggcgggccgccgtagcccgccgtgatatggcatagctccatcatgtccgccgccctcctctctgccggaacagcagccacagaaagaaggggccgcccatcagggagagcaggatgcccactggcagctcaaaagggacgaacagcacccgggccgccaggtcacacactgtcaccagcgccgcccccaggaacagggaggcagccagcaggtacttgtgttccccccctaccaggaagcgggccgcgtggggcaccagcaggcccacgaagcccaccagcccggcaaagctcaccgccgcgccgcacagcaccgccgccagggtaagcaggaggttccgggccgcccgggcagacagccccagggactgggccacctcatcccccagggtgagcaggtccagctcatagctcatggcaaaggcccccgccccggccaggagggagagcagggccggcaccttcagggcggccactgtcaccccagacagccggcccaccataaagctgcctgcccccagggcggcctccgggaacaggatggagaccgcgtcgatggcggcggagagcatgctgctgatggccaccccggccagcaccagggtgatgcggctggccccggtcctccgggccagggtgtacaccagcatacacgcccccagcgcccccaggaaagctgccaccgggaccgccgtcatagaggtcggaatcagggcggcgcagaggactgcccccaggcctgcgccggcattcaccccgatgatattgggccccgccagggggttgcccagcactccctggatgatgaccccgcccaccgccagggcactgccgcacagcagggccgccagggtgcggggcaggcgggcatagaccacgatattgtatgcctgggtctcaccgcccatcaaggcggtcaggatctctgaaaacgggacttgggtggagccgaagctcatgctcagcagagccgcccccagactggccagagccagcaggaggatgatcccccacttacgcgccgccgtataggatgtcggcaaggacttcatagctctctccccatcgcgcattaggcttgtagtggaacagggccttgtccaggatatggacccgcccctctttcaccgccgcaagggactcccaagccggatcgctgtggaacagctccgtcaggctgtccagcgccttctccgtgctggagcccatggtggtcacgaagatatggtccgggtccgccgccaggatggactccatctggatctcctccagcagtccgctgtcgctgtccgcgatgttgatacagcccagatccttcagcatcacgccggtgatattgtcgctgttcttggcccggacgccggtggagtaggcccgcagcagcaggaccgtggggtgctccccctccgggacacgggcaagcacccggtcgatctctgcctggatatccagcccgttggcctgatacaggtcgtcccgccccgtcagacgggtgcagatctccagcatggagaggtagtcggagaaggactccaccttgaaccaagcggcgggaatgccggccgcagccaggggctccgccagcgccagttggccgtccaaatcgggagtcaggagcaccaggtcaggctgggcagcgaaaagcgcctccagctccggggtctggttggagcccacgttggtcacatcctcccccagctccagcccccgctcatcgtaggcgtcctgggtcaccgctgccagcgtgtcctcccctcctgccaggacccaggtctccgcgtagctgccgatcagggctgccacccgctggggcgcttcctccagggtaatggtactgcccaagctgtccgtgaagctcacagagctccccatctccccgtccgccgacgcgggggacaccgcccttccgccaggagcggcgcaggcgcagagggacagcagacagagtgcggtgaccagggatatggatcgtttcatcatcatctgggatttcctttcttttcagaagcctgggtccggagccccagaccgaatgaccggccccattttaccacaagatctccccggatgccacaaaaatcttttctttccacggcctgaaaggacttttctcccccatgctcccgggatgcgggtccggctgcctcaatgctgtgcgcccgccgcggcctggagccgcggcgggcgctgtctctctcttttcgatcaggatacgaatctgacgggccgggagctcataccggctccaggggcagggccatcagctgggccatcttctccctggccgctccgtccaggggccggaagggggcgcggcagaagccgcagtccaccccccgcagggtccagccgtatttcatggcgttgaaaatgcccagcttcaccgtctcctccacccggagattgatggcgtgctgccagcggtaggcctgggccatgtccccccggtcaaaggcgtcccgcacccggtggaacaggggggcaaacaggttgaccgtggtaccgatggtggcgcaggagcccatagccagagctcccagcagctgctcgtcaaagccgttgatcagggccttgccagggaatgcctgccccatccgctccaggctgtacaggttggtggaggtgtgcttgatgcctacgatgttctcgttggacagcagccgtcccgcgttttccttgctgaactccactccggtgaactggggaatgttatagacgatggcgggcacatcggggatggcccggatcacgtcctcgtagtagcccatgatctcgtccatggaaaacttatagtagtagggcgggatcatggacaccgccagggccccggcggacatggcgtgccgcgccaggtccaccacatcccgggtgcggatggtgcctacatgggagataacgggcacccgcccgtccgccgccttgagcacgtgctccagcacctgcttgcgctcctccagggtgagcagcagcccctcccccgaggacccgcagcagtagaagccctccgcgccgtcctggatctggagctccacgatgcgctccagggcctcataattgacgctctcgtcctcgttggtgggggtgatgagggccgaccagatcttttggaactgctccggcttcacgtttaccatgctgtccagcccccgtcgatcaccagattggaacccgtcataaaggaggacgcctgggaggccaggaagatcagggcgccgttgtactcattctcctgagacatgcggcccatgggcatccgggcgcagaagttggcctggaatatctcgtcctgggtgtcccgccacacgccggcgggggtgagggtgttgacccggatgccctgcttgccccagtaggtggccaggtagcgggtcaggttatagatgccggacttggcggcagagtaggccaccggcttgatgaaggggacgccggtcatctccttcttataggcatagatgtcctggatgggagagagcatgccatagatggagcccacattgatgatggagccgcccttgcccgccttgaccatccgggcgcccaccgcctggcaggccaggaaggtgcctaccaggttcacatccactacttcccggaaaatctcctccgggaagttctcaaagggaccggacacctccggaggcgcagagggctgagtgtcgatgccggcgttgttcaccagcacgtcaggggcgtccccccagacctcttccatgtcgtcaagggcggcgttcatctcctccttcttagtgatgtccacagagtaaaaacgcagagcggaggtcttcagggcctcctcccccagggtcttggcgatgcgctcgtcgttgacggtgcggccccacacggccaccctggcgccccgcttccagagctcctggacgaaattcttgccgatctgccccaggccgcccgtgacgatgcagatcttattttctacgctgaacagttgatcgctcatgatgtgatgtactcctctctaacaattggatgatttggaacaggggacgttctcagctcagcagggcgtttggcagggctgtaacgatccccggtatataggttaccagaatcagcgttaaaatcaaggggaccaggaagggcaggatggatcgatacagccgttccagcttcagcttgtttacgtcggagatgacgaacaggcacacgccgaagggcggggtcacctgaccgatcatcaggttgagcaccaccatgacgccgaagtggaccaggtccagccccaggccgttggcaatgggcagcagcacagggagcatcagggtcaggatggcgccgggctccatcaccatgcccaggacgagcagcaggacgttgatgaccagcaggaccacgttgggattgctgctgatgcccaggatcacatcagcgaactggcgggagatgccctccattgccatgacgtaggtgaacagggtagaggtgccgatgatgaacagggtgttggcagaggagatggcggagtccttcaggcacttcttgaagctcttccagtccagggtccggtagaggaagagggcgatcagcagggagtagataaccgcaatggaagacgcctctgtaggggtgaaccagcccaccacgaagccacacaggatgatgaccggggtgatgagggcggggatggatcccaggaactggcggatcagggcccgcaggcggaaggggtggcgctcatacctgcgcacgatggcgaagtaaaggaccatcaccatgagcagtacgcccatcagcaggccgggcaccacgccgcccatgaacagctggtccacactgacgctggccacacttccgtagatgatcagggggatggagggcgggaagatgggtccgatgacggaggaggctgcggtgacggcgccggcgaagtcctcgtcatagccgttctttttcatggcctccatctcaatggcgcccaagccgccggcgtcggccacagcggagccggacatgccggcgaaaatgatgctggccaccacgttggcatggcccaggccgccggggatccagcccaccagctctttggccgtatcaaagatcttctccgtgatcttgcctgcattcatcaggttgcccgccagaatgaacaggggcactgcgatcagcaggaaagagtcgatgccgctgaccatcttctggccgatgaccaccaagggataccccagagacaggcaccccagcacggcggaggcgccgatggagatgctgatagggacaccaatgaccagaaggagcacaaacgctatcagaaaaattaccatatccgtgtccctcccttatacctgcgcccggctgccccgggccttttctgccacgtgctccgccatctgccgcagagactccagcgccatataggctccagccaggcacatggggaaatactgcaccgtatagggcaccgggatagggaaggtggaataggtgcgggtgctgacatagggatactgggcggcgaaggcgacgaccatcaccacgcccagcaacaggctgaacagcttgttggcgaagtacagcacctcgtacaccgggcccttggtgcgggcgacaaggaagtccaggcgcatcaggccgctgtcccggtacagggggatcaggccgataaaggccatccacaggaagaggatgccgcacagctgcacgttcccgccaaaggactggcccaggaagttacggcggagcagctccaccacgatgaccagcaccagggccgcaatggtgagcatgcagatcacttccgcgcccttggccacccctttggagatcttgttacacaatttcatacgatttctcccctctacaaaggacagctgcataggcaggggcctatgcagctgtcagcgcagattttgtttggatcagcgcacctccgccaggatggcgtccagcagctcctggtcgtaccagctctcatccttatactgatcatagtaggcgtcgccgcccagcgcgtccttgaaggactggacatcaggctcgaagtcgaactccacgccggcgtcctgcagagtcttggtggcggtctcgttgtcggcggcgatggtgtcaaagctgtacttggcagctgccttggcctgttccttcaggatctcctgtacggcggggtccaggccgttccaggtgttggcgttggcggccatggtgcagcccatccacatgtagttgatgttggagaagtatttgatgtcgtcataagtggcgttggcgaccaggtgataggtggcattatcctgggcctcggcggtgccattggacagggccagggccagctcaggcagagccagggccacgggggtggcgcccagagcctgccacacgtccaggtacagctggctctcaggcacgcggatcttcaggccctgcacgtcggcggcggtgtggacgggccggttggtggtggagatgtggcgcatgccgttatcgccctcggacaggaagaccaggccgaactcctcgaggccggagaagatctgctcaccgatctcgctgttggtcacctcataagcctgctccgcgctgtcaaacaggaagggcaggtccagcaccttggctttctcatagaaggaggtaaaaccggaggtgccggcaaagatcaggtcgatggtgcccatgcgggtggactcgatagattcggcgtcgctgcccagctcgttggagtggtggacatccagggtgatggcgccgtcagaggcctcgttcaccagacgggcgtactcaatgattgtcttagtggggacggagttctcgttgccgggggaatagatggtcagctcaatgggctcgatgccgccggaggcgggagtgctggcggctggagtgctggtgccggcattggcggagctgccgccggcaggagtgctgttgtttccgcaggcagccagggaaaaggccatggcgccggccagcacaagggaagcaagttttttcattacaggatcctccttatcgttgtgtccgaagctacataccaccgtcctccctttcgtcagacggacgattgtatgacatctgactatagtatattaagactgcattaagatgtcaatggaaaaagccgacaaaattcctctctcatttttgtgctaatttccgctctgctctctctttttctcaaatttctcaacatattgtacaaagccggttttcccctggaccccgcccgtcttcctggcacgtccaaaacaccgctgcctgagccggaccgtgtcctcttctctgccgggacacagaagaaatcccccagccgcaccggtacggctgggggtctcaaactgccgggctgggcagttccgattattttgtctcgtgtcccggggcatggatgttctgggtcagatcctcctggaccttgtccagatgggcccgcatctcccgctccgcctgggcggcatcccgggccaggatggcgttcataatattgctgtggggcatgaccgcgttcttcacgttctgctccacctggaaggtcttgctgcggaaggtctgcattccctggcacacatggctgttgatctcgatcatcagtgcgttcccgctgctctccacgatggcgctgtggaactgctcgtccaggcggccgatcatagccgcgtccccctcctgaatggcgcttaggaagctacggtggatgttctccaggcggcggatatcctcggtgttgcatcgctccgccatccgccgggccgccataggctccagcgccgtgcggatctcgatggagtcccgcagttcccgctcgttctccaccagccagtcgatggccccgatatcccgctctgcagggttctccgccacaaaggccccccgtcccggcttgatctccaccacacccttggcctggagcagccggaatgcctcccgcacagtgccacggcccacccccaggcgctggcacagctccatctccggcggcagctttttcccaggctgatactgctcctcctggatcagctctctgatcctctcctctacctgctggacaatggggaccctggaaatgggttccatatgcctcacctccgcctgtcttttgggcatgtcattgtttttattctacaacccgatgccctatacgtcaaggatttctttcttttgtatgacaattattgttctttgtatgacatttttctcttttcatctcccatccccagctcttgccaaggccggaaaaagcgtctacaatagagaaaagacacctgccgccgggtcccggtccggcccgctcagaaaggagcccgccatgaaacccagagcctactatcagccctatcagtccggcctgctgctggcccaggccttctccccctccaagacgccactgctccgcatggagcacctgcgccagctggactttcccatcagccgggagatctcctacgagcgcaccgtggatgaattcctcctccagctggcggtaaatgatgccctgcgggccctgcgcagccggaaggacatggtgatcctcctcaacgaggagggcgccctcatccgggaggactggcactggtccctgctcttcacccccaaccgcagcgagaagcggaccctgggtgactcctccgacctctatcaggtcctgtgcagcctggctcagcgccggcaggacggtgaggtctgccgggtggcggtgcccgaccggagcctgaagaccctggtctccggttccgaccccttctgcatcctggacgagttctgcaaatctcagcccgggggctatctggcagtggcccagaacatcgtgctggaggggacggaccacctgttccgccatgtccccgtctgccgctaccgggttctgtctacggtagacctgggggagatcgagaactaccacgccatcaagaccctgctggacgagtacatctatgcatatgaccaccgggacgcaggggaggacgcccccaagccaatctccatcgccgtcttcggacctcctggctccggcaagtccttcggcgtcaagcagatcgccctgagccggggcaggttccgcatcacctccctgaacctgtcccagtacgactcggtcccccagctcttccacgccctccatcaggctctgcgctatgaagacgggctgatccccctgatcttcttcgacgagtttgactccgagctgggcggggtctcccggggctggctgaagtatttcctggcccccatgcaggacggggaatacaccctggacggcagccccctgcccatcccgggggcggtctttgtctttgcgggtgccaccgcctcctccttctcggaatttcttccccaggccccggaggacgtgcaccgcttccaggccatcaagggccccgatttcgtcagccgcctcaaaggcatcctggacatcaagggccccaaccccacctgcgttaccgacaaaaagcacatcatccgccgtgctatgctgctgcgcagcctgatcctgaaaaacgtgaagggtatctgccacccggataccggacgggtggacatctcccggggcctgctgtgcgctctgctgagggtgtcggagtaccgccatggggcccggtccattgaatttatcctgggtatgagccggctggctggcgcaagccggtacaccccctcctgccttcccctggctgcccagctggacatccatgtggatgtccaggactttatgcgcaagctgtcctttgagcagatgatgggggaggcggtggaacagtacgccttcactgcccacgagaagtaccgccagaagcacctggccgacgcccaggcccggggtgccacccccaaggagctctccctggtgcggcaggaaccggagatggcggactggagcgacctggacgagttctacaaggagggccaccgctcccagatccgctatctgggggagcggctggagtctttcaacatgagcatcggcctgcgccccgtccttcccggggccgcggacaccatcatggatctctacggcccagtgttggaacagctctctgagctggagcacgagcgctggatgaaggacaagcgggctgacggctggcgctacggcaagcgggacagcgagctgaaactccacccagacatgcggccctatcaggagctggacgagtccaccaaggagttcatccggatgtccgtccgcaacgtccccgactacctgaaagagatcggctacgagctgtaccggaagtccttctgagtttttttgcagttcggctgtttttctggtatggatctcttttcccaggcaatactactgctgaggtgagattttatgcctaagaacagccagcaggaccaaaagcaggcccggcagaagaagaacagcaagggcgcccaggcccagggcacgcagtgccgggaccgggatcagcgccagtcctccgaccccgcgatgtgaaaaaccggcggctgcccataggcagccgccggtttccgcttttcagcgcctctcctggtatcctttccctccaggtccggcctgtgctcctttcggccagcttcccctcccctttcccgaaaaaagggtgcggtcacgcctgtcacccctctcccgtccccggaataggatagggcagcccaaaccgaaaggaggaaagccgagcttgttcggctcttcatatggaatccttccactgcttctcttccgaacccttctcccccgacgccgcccagtcccgtgcctccagcggccagacccctgtgatccccctgcctgaccccggagagggcggtcctgtggcgcccgacatcgggggtactccggtgatccctctcccaaatccgggagagggcggtcccgtggccccaggaggcggcatcggcatggtccccggctggccccgttggagcagcatccgctttctcaacgcggcccgctcctatccccccttccgcatcttcatcggcagcacgctggcggttcgctctctggagttcaccgcagtctcctcttaccgccggatggcttccggataccggtccgtcaccgtgtcgggccaggacggctacatctacctgcaaaagacccttcccttccaggacaacgcccctgtcaccgtagcagtggtccagaccgccggcggcctggacctggtccccatctccgatgtgtgctgcccccccaccggcgctctgtccaacttccggatgagcaacctggcctacaacagccagcccctggacctccttctggccgacggccgggtggtctatactgacgtgcaattcaaggagaccacctatttcaagcagatccgccccgggacctaccagttctatctggcggagaccaaccttctccccatgcccagctacctggacatcgaaaccatggactccgccttcatcggggtggcaccccccttctctgccttggcctccctccagctggaggcggcgcccaggtccacctacaccctgtatgtcctcagcgggggctccggctccaacgagatccagaccctggtggtgacagaccgctgactctcccggcagacaaaggtcctgcctttccagtaaaggccccgcgggcggatgctatccgcccgcggggcctttggcctcaacagcgcccgctggaggcggtctcctatttcttgatctcctcccagtagcgccgggcggcctgctctgtcttgttgtccccgtactgataatattttctgtctttcagctcattgggcaggtactgctgccgcacccagtggcccgggaagttatgggggtagaggtagccctgctcccgctccatccccgccgagtcggcatggacattctggagctcccgtgggatgtcccccgccagtcctgccttcacgtcggccatagccgcgtcaatggccatgcaggccgtgttggacttgggagcggttgccagaaggatggccgcctgggccagcggcagccttgcctcaggcagccccagctgaagggcgctgtccacgcaggcctttacgatgggcaccgcctggggataggccaggccgatgtcctcactggcagagcagaggatgcggcggatggccgtgatcaggtcccccgcctccagcagccgggccagataatggaccgccgcatccgggtctgaacctcgcatagatttcatcagggcggaggcaatatcaaagtgattgtccccctcccgatcataccgcatagcggacttctgggccgccgtctgggcgtctgacaaagtgacaaggaattttccttgctcccttttcgccgccgaggccagcagctccagggcgttcatggcctttcggatgtcaccgccgcaggaggcagcaatgtgctcccgcaccccctcctccagcaccaatccgccccccaggcgcccctccaggatggacaccccccggtcgatggcgggcagggcgtcctccgcggtgatgggcttgaactcgaacacggtggaccgggagagcactgccccgaacacgtagaaaaaggggttctccgtggtggaggcaatgagggtaatcttgccgttctccatgaactccagcagggactgctgctgcttcttgttgaaatactggatctcatccaggtaaaggagaactccttccggggccatcagggtcccgatgtctgcgatgatctctttgatgtcactgatggacgcggtagtggcgttcagccggtgcaggggccggttggtccgccgggcgatgatgttggccaccgtggtctttccggtacccgagggaccgtaaaagatcaggttggggatgtcacccccctcgatgatccggcggagcaggccctccctgcctaaaatatgcttctgccccaccacttcatccagggtctggggccgtatctcatctgccaatggccggtaagccattccaacactccctttccctccaggggcgcccgcccctggacccgccgctcacagcagctccttttccatgcacagggtgtccttgttgtccgcaaagatggtgagagtctcgatctcccggtatcccatttttctgtaaagggatatcgcttccgggatatcctggcctatctccatcaccatgcggccaaagccctgaaacagggcctggagctccaacacctccaccacctgcctggcacacccccggcggcggtgttctggacggacatagacccaattcagttccgctgtgccctcctccatcgcccggaaggcaccgcaggccaccacctgcccgtcccgcaggagcaggcaggcctgccggatgtcatccaggccgtggcagctccggcacttcagggccgctgccccaaaccgctccccatactcccggtccatcgcccggaccagctcccggaagcgcgggtccccgccgtgggtcagccgggcctctgatccttttccgctcatttcttgtcctcccgtttatgctacgccggccagccggctcatgcccgctttggtccaatggtttaccagggcgatcacccgcccaacccccaccatggccagcagagtgcccaggccgatccccacgatccgcccggtcagcagcaggcccaggcacaccgttgctgccacgcagcccaaatcaaatacgttcttggcaaagccctgatcccggcccatcctctgggccaccgcctggacgatgccgtcccccgggttggggaccagccgcatgttgacggtgagggccacccccacccccgtcagcacgatggccagggccagcaccgccagattttccggcaggctgtgggccgccgcctgataggggatgcaggcgctgcacagattcagcagccggctgaacaccaggctcaggggaaactgcagcagtgtggccagccgctcccgccgctcccggagaaacagctgcaccaccacaaagatcccgtagagcacaaaggtcatgtcgccgaaattcagctcaaagatctgggacacacagtaggccactgagatgatgggagatacccccagccccgtctttgtgttcagggtgatccccgccgccaggaccaccattcccagaacataaaagatccagcgattcactttttccactggtccgcttctcccctcattcggtctctccactcatgtgcggcggaacccctgaaagcgggtgccctggaaggtcagccgcccccggtccccctccaccagaaggccgtactccatgtcgggcacttccagctccatccggtccccgctctccacctgaaaagtggcgtagtaataggtccggctggaggcatgtctcctgctgtgctcagtccccccgtggcggtaggtgcgcacgtccatgcgcttggccgccacctccgcctccactgtcagcaccggggcgtcgttgttccgcttccactgggcggccccacggaccgcttggactgcaatgcccgccaggatcagcacgaagacaaccccgataaaaatggggacaatggtgaacatggcgttggccatgccgaatccgccgtatccgatcatgctggctctctcccttctgtcccccgggctgtctgcccgctctttgcgaagtggtcacaccagggccgcaggacgcagctctggcactggggacggcgtgcgatgcacacagcacgcccgtggaggaccagccggtggcagaagtcgttggactcctccggcggcaggatggcccgcagctgctgctccacctttcccgggtccttggtgccgtcggtcaggcccagaaggccggaaatgcggatgcagtgagtatccgccaccaccacccccggggtgtggtacacgtcccccaggatcaggttggccgtcttccggcccaccccgggcagcttcagcagctcctccatggtgtccggcacccgccctccgtagtcccgcagaagcatctgggaggccagcacgatgtccttcgccttggcccggaaaaagccggtggagtggatgtacctctccacctccgcgatgtccgcctccgccagcgcctccagggtagggaagcgggcatagagggccggtgtcaccttgttcacccgctcatcggtgcactgagccgccagacgcaccgagaacagcagctcatagtcctttctgtaatccagagagcagaccccatccgggtagagctccttcagcccattgacaatgctccagatctcttctatggttttcatcctgtctcacacctttcggaccgctccgccctttaggcgaggcctgtcctgtcatatccggggcctgcgcccctcactcccgctcccagtcagaggggccaaaggtcaggacggcctctcccctgctggtctttacatcggggcttcttcccccatatcttacaccagcaccccggaccttgtaaagcaagctcttcctttcttccctattttcattgtaatttccgccccatctgctataatagggaagacggccccggccccgccgggcatcaactgacaaaggagtgttcccattggtccaggaagccatggatttcatcaccgccgccgaccccgaggtcggcagggcaattcaggcggaatatgaccgccagcagcagaacatcgaactcatcgcctcggagaacgtggtcagctccgccgtgctggccgctgccggtacggtgctcaccaacaaatacgcggagggctaccccggaaaacggtattacggcggctgccagtgcgtagatgtagtggaggacatcgccatccagcgggccaggcagctcttcggcgccggctttgccaatgtacagccccattccggcgcacaggcaaactacgctgtctaccaagccctctgccagtatggcgacaccgtcttgggcatgagcctggacaatggcggccacctgacccacggctcccccgtcaacttctccgggaagcagtacaaaatggtggcctacggcgtagaccccgtaacccaccgcatcgactatgaccaggttcgagatctggccagacgtcaccgccccaaaatgatcatcgccggtgcctccgcttatccccgtatcattgacttccagtgcttcgcggagatcgcccacgaggtgggggcctacctgttcgtggacatggctcacatcgccggcctggtggccgccgggctccatccatcccctatcccctacgccgacgtggtctccaccaccacccacaagaccctccgcggacccaggggcggcatgttgctgtgcaacgatccggagatcgccaaaaagctgaactccgccatcttccccggctcccagggcggccccctggagcacatcatcgccgccaaggcggtggcgctgggcgaagcactccggccggaatttaaggcctatcagcagcagatcgtcaaaaacgccgccgtcctggcagagtccattatggagggcggcctggacctggtctccggcggcacggacaaccacctgatgctggtagacctgcgccctgcccatctcaccggcaaggagatggagcaccgtctggatgaggtatatatcactgtcaataaaaacgccatccccaatgacccggaaaagcccttcgtcacctccggcatccgggtgggcacccccgccgttacctcccgcggcttccgggaggaagagatgcggaccgtgggccggctgatctgtcaggccgcccaggccgattttgaggacaagatcgacagcctgcgggcccaagtcaaggagctgaccgggaaatacccgctctatcaggggcagtaaggccggacatacagcggtctatcagaaagcagtaccgcggcggaaaaggccgccgcggtactgctctttctttatcggtcctccgccagcaccttgccgccgtcctgcggcgccagatcccggggcccggcgataggccgaaacttcggctcctgctccaggtgcagtttggtccccacgcagcggttgatgggcgtccccaaatcatggaacttctcctcataatccgtcatgatcccgcagaccccgttcccatgcaggtcccgggtcacctcagacagctcatagcccgctttggggaattggaacagggagtactcaaacagctcccggttgtccgtcttgaagtggatctgtcccccgtcccgcaggaccccccggtacagcaccaagaagttctcgtgggtgagccgccgccgggcgtgcttgttggagggccatgggtcgcagaaattgatgtagatccggtcggcctcccccggggaaaaatagtcccgcaggcgagccgcatccccgtccacaaaaaagacattggacagccctttctccaccacccgctccatcgccacgatcatggcatccggcacccgctccaccgccacgaacaggacatccggctccagccctgcggtctctgcggtaaagcgtcccttcccgcatcccagctctacccgcagttcccgcgcctggggcatcaggtcccgccagtgtcccctcagctccaccggatctgggatcatccggtcccggcatcggtccatccgtgggatcagattgggcttttttctcattctcacagctcagtcacctcatgtcggaagtcgtcccctatcttaacataagaaaagaatacttgcaatcttttctcgtttatattatactatgaaacagtaacagtctttatctgcagagcactgactccttacaggaaaatcaaattatccgggtgtagcgcagttggtagcgcgcttgctttgggaggatagacgactcatccattcccctgaaagcgaactcccggaagtccttgggacagtagattgcggtggaaattccccggttgaaaaacttccgaaaaatcgggcttgaccacagcgccgcccacagacacgagaaacttgctttttccttcctcgcgtggtatcatgcagaaaaactgaatatccgggtgtagcgcagttggtagcgcacgtgatttgggttcacggggccgagcgttcgaatcgctccactcggaccaaacaatgataatccgaactacattatccaggtgggtaatgtgttcggatttatcatttctattgagaatatattgtaaaacaacagggggaggaaacgaagtttcctccccctgttattagagacgcatctggagtcagtggatcgtgccaggtggatagggcccataaatggaggtcaagaatccatcctcgtctaaggttacctccaggaaggaatcatccgccatcgtcagtttgaccactccctcatactgcgccgggccgatggacgcaacctcgccgtagtcgaagtaactgcttttccgataccaccatagggcgcgctgctcctccgtcatgtccgcccattcgccggggaggttcaccgcatccttccgcatgggcgaccagggagccaactctgactgccactgcaggtttatgttggggataaaactgctgtaatccacaagcgcccaccgactgttgtagttgggcagatcgtagctcatgtagaaaaagctccgatgatctccgtcccggtcgatggcgacctgctgggattctattccgccccaaagatagcagcgctccgggcggtatcccgacaacgcctccagttcctccagcagaaggcccccctgctcccgcggagtgggcatcggcgtcccatccggcgtccaaccgatcagctcgtcagggcgcagttccataaaggtcacggtagtgccgccgatggccccgccctgtgtgcgggtgtcctggactccatccctccgccagagaaagccaggggaaaggcggtcgtacaccggggcgtattcgtccagataccacttggtgccgaactcataggaaaaaccaaaagctctgtccggctcataaaacaggaagaaatagccctccggcaccgacagctcgtctatttcctccggcatggtatatatacagtatccgtcgggcaggcggtcatagatctggtaggacttgcggggggcctcgccctgcggcctggcgacgatttccagctccccgtccaaatccaggtcggtcatgccctctaaatgttccgtgatatgaaagactatcctgggttcctggtcgatgacagagaaaaacaccgcatgctcgtcaccatcacagcgcactacaaagctgggatagcccagaacatttccgacgaaggtggcccaagagtcgtcctggttccatacaagcccctcctcgttgcagcgaaacaacacgttccaatcccgcccgccgccccgtccaaggaaccagcaggtggggccatcgtagggttcctcagtccgaaccagggcaagggtgcagttcccctccatttgcagctccgaatccacctcccagccctcggggaggtattcctccggggagccccagggctgcaggcggtcgaggtcaaagtcgaccagctcggagcactctaattccaaatggtcaggccattgatggtattccagctgccgggcaaggcgtacttcctcactgggagatgacaggggcatatcgaacagcaccgttccatcctcttgagtaggaacggttactgccgcatctatcgctccctgcggagactggaaattcatgatgacctgtccgtttccaggtgacagttcccccc

SEQ ID NO: 13633 - DNA, 3468 bp, Unknown
  gut microbiota DNA sequence
ccactcctacaacgctcgtcagtaaaatgcactttttcgatattttgggagaagaaggttcccgctcctcctctttgagcaattcagccagcgtaccgacgggaagatcaagcaccgcttcgatgccttccaagtttcgcggggtggggacagattgtcctatctcccatttggacaccgcctgcctgctgacaccaagttcttctgccaatcgctcctggctcatgcctttttcttctctggcttgacggatcgcagttcccagcatagacaccactcccttcttgtctcgccttaattatagcaagtgggcccggttgcgtctacaaactttcccgcaactggtacagttgcgggaaaaaagggtgggagtatcgtttgagatgcccccgccttgtgcgttagtcttgttttaccttgttctgttcctgttgcgctttccactctgcaaactcccgctgtccgtcctcgctctcaaaaaacgcttgaatttccgggagcaggacgcgggcaagggcctctacctcgtgatagggaatccccgtgccgtagtcattgggcttctttctgcgcggcatggtatccccccgttaaagctgcccctcgtcgaacagatagccttgaaacaccgtgccatctcctgtgatgaagcggccccgtgcatccttgggtatctgttcggcggcgctggtgttgtcgagaatgatttgagaaagcacgctgtccgccctgccgcatacccggaaatccatgttgttcttgatctgaccggggatgatattggcgtcgggccgttgcgtggcaagtatcagatggataccaaaagcccgccccaatcgtgcaatcgtggacagtctgttttctatttgtgccagcagttccttatcctctttgctccggcctgtcttgtccagcacctccgccacctcgtcacaggcgaatatcagccgtggcagtttgttttctgtcgtttcgttgtatgcgtcaatattgggggaacccaattccttaagcgctttttttcggtattccaataccgccacaagctgatttaaggtgtagagcagatcttcctctgtgaagcacatccggcatttttcgtgccagactttcgggtagtccacgccgcctttgaagtcggcaatgtagacctctgcgtccttgtgaagtgcctgcataagcagcagcttgagcagaacgcttttgccgctgccggtagacccgcccaacagaatgtgggggatgtgggcgaggttgactgtcacagggccggtatagctttcgcccagcaccagcacaaaactctttgacgataggtagctgtcctcccactttagaacttccggcaaatcgtcccccgcagggacagcgtaaaccagtactcggcttttgcccttggcataggccagcttgacaatgataagccccagcgccgtttcgatggctgggcgtttcttctcccattcttgcagcggaataccctgattgcggaactcccacaccgtgacacggggattatccttgtcacgatgcttgcggagcaaatcgggcggcatccccgcatggtttatgaggccgatacattgaagctggtctttcgccgcccgtctgccgaagggatagagcaggagcaccaacagcaccgcagcacccgccagcagataggcaagcaaggcgtgttccatcgcggccttgagcagcggagagagcagagggatattcccagctagtgtgcgccatgccacttgtctgacgcagacatacaccgctccaacgaggtacagcgcagccagcgccagctttacggaaaaatctggcgttccgttcaatttctgccacaggttacggaacgcatttcttctccggatctgaagcttttcattttgtgtcacagggaaagccccctttcttatgctggacggtggagccgtccggcaaatactcaatcacattatggatacggcggaggaacgcccgccaggtctccggcctgtcccactgttccgcccggtactgcttttccagcggcaaattggaagtaagatagacctttgtataacaggccacccggtcattgtaccgggccgggaggtgcagagggtaaatatccaggtagttgagcatatcctcaataggcacctggctgttgaactcctcaaacaccaacacatcctgcccgttgtaaccgtcaaaggagatgccccttgcaccccggtagttggtaatgcggcaaatctcccaagggtcatgctgttcaaaaattccccaggtcttgcccactccgctggcaccgtacaaataggtcacttccagctttcggttttcggcactgtatttttccgcaaggatggtctgccgcagcagttcaatgtcccggatacggaaagcaagattgggatgttcttcaagaacttccatggtggatttgccggaacgcagttcctgcataagttgaaacatttccggcgctttgtcctcgctgtctgccgggagctcgccccactccgcaaaggtgccgggtacagaggtttccaccttgtctgtatcggcccaaacgcctgttttggaaatgtactctttgttttctctcggtgtgccgtatgcccgttcaatatgcgccgttggaaaccgctttttgatggtggaaaagcgcacaggtgagcgggtacagaaaaagatgtgcgtgtgaaaggttcccgtggtggcgatctcgtcagccatgcagaaataggttggatgaaatttcagtacgatttccgtgatagcagcatggtcaagtccagcctcggctggattgttgatgaccatgagccacttacgggcttgtgcattatatcccatgttggcctccttgttgtgttctgctacttgctacatatttgccataagggtaatactgcccccttatgggaaaggcggcgctggcgctgccgccgggggacacttcccttgaggggaattgtcttttccccggctggcctccccagcgccgccagcgcatcaggtcttagggttcaccaaatggatacccgtggccctggcccccacctggggctgcccctggctccaatagatgaatacctccaggccgtcaaagcgcacctccgcatagccgtccggggcgtccatgcgtttatccccgtcaatccgcacattgattttgtccaggcccttttccggcatagcgacggtatagcggtagccgaggacggtatcagttttgcggttttcacgatactcataggccggggacacctccaccagccacagcttgctcccaaggctccgggggtcaatgataaggtcggtgatcttcataggttctcctttccgggcggtgcgtggcctttgccccacccttttgaaatcacaagtccttgtgttgtccccatcataccagggaaaaagcgaaatgtcgtttcatgcgtgaaacacttgaaagggcgcaaaaaaccgacgcccctgtgc

SEQ ID NO: 13634 - DNA, 170 bp, Unknown
  gut microbiota DNA sequence
ggcatgttcgagggctacgaggacgggtccttcggccccgagaacgtagtcacccgcgccgagatggccgttatcatcagcaccatgctgtacggcgccggcgtgaacgtcaaccagttcgcggagaccaatgtgttcaccgacgtccccgcctgggcgcagggctatgt

SEQ ID NO: 13635 - DNA, 28819 bp, Unknown
  gut microbiota DNA sequence
ctccttcttcccacaaacgcccggtcctttcggaccgggcgtttgtggtgtttcccaatgaggcgggacaggccgcggggactttccccctccctgttctagatttgtgttgatataaggatacccggcaaatctttcgtcgatttgccgggtgttcttgctatgtatcagataatttttgccttgtttggcttttcaacggagtaaataacggtcaaaatgggatttttagcttcaaactatatgaaaaattgtaggaacaagtaaaactataattgctcctgttacacttacagttataactttccaaaaatcttccctttgctgtttggtcatatttttataccaatccatacaatcacgttcctttatcagatttgtctaactactttatttatgatgatagcaaaaattctttggtgtttcattttctatcattataaaatataaacatgttttgtgcaaggcacactggtgaaatcgccggagttggaatcatcagcacttagcttgaacagggacctttccccatttttctggacttttttcttcacccatgctataataattttttgtccgcgtccggatggcaggagacccgccctccgtttcttttcgtctattcatgtcaggagtgatcccgttgcagcagatgtccggcacccttcttgatctgatcctctatctggctctggtggctcttggggcctttctgggctcccgcccccagatccagtcccttcccatgccctggctgggccggtttcagacggcggctctgctgctgctgatcgtgaccctgggggccgagctggggtccaacgaggagatcatctcttccctgggcaccattgggctcaacgccctggcggtcaccctcacctccatggtgggcagcatgctggctgtccacgccctgagaaaatatctgctgaagctgaacgctcagggccgttcctgccaggaggcaccggaggacagcgacccgggttccggggaggcggtccacgtggaccacagcctgaccttcgccatcgtcttcaccgtagcggcgggcattctggcgggccgcttcctgctccccgacgccgccgtagcccactgtggcacggtcatccgctgggggctgtacctgctcctctttctggtgggcctggatatgggccggcagggcagcctgatccgggatattcgggccgccgggctccgggtccttctggtcccgctggcggttatggcgggcacctttgcggtgacggccctggtagggctgttcctgcccctgggccccaaggactgcgtagcggcagcggccggattcggctggtattccctggcccccaccctgctggctccgtactccctcaccgtatctgccaccgctttcctgtccaacatcatgcacgagctgttttccattgtggccgtccccatcgtggcccagaagctgggctatatcgaggcggtggccctccccggtgccacagctatggataccctgctaccggtggtagtcagcgccactgccgaccgcatggccatctactcctttgcctcgggactgattctctccctagccgtcccagtgctggtccccgccatcatcgcgctccccctctgaacactttccagaacaagagcaccggctcaggcccacgcccaagccggtgctctatttttcccgcatggcgtccaccagacgctccagcgcctccgcctcccgctccgaaaggccgtccatccgcagacacctgctctcctccctgctctggaacaccagagcatccacggagagatccagaagctccatcatctggaacagaagaggcaccgagggcttccgacgggagccctcgatattcttcaaatgagtgggcgtgatatccagaagctccgaaagcgcatcctgagtcagccccttcttcatgcgggccgcgcggatggcatcccccagggcccttgtttccatgctcatttctgacaactccctctccgttatcttacagataatcttttcccttgcgaattatctaaaagagtgctagcatagtatctataagataaccaaaaaagatacctgagacgaagaggccgccgtctatgatgaagtccgtcattctgcttttgatgatattaggggtgggaggatgggtcctttctcacagtgcctcttatatcgcccacaggagggcggctcatgggccgctgacccgagacttttttcatggaaactcagagatacccccggcattccgccaggccctggaggagaccatcgtcttcctggataaccggcgggactgggccgccgggagtgcgctggacgccggcacgacggacctgtgctggatcgagatcaaggactgtgacctcttgctccgggctggtctcttttctcctggaaacttgggacgcctccagatccgcaggcgcctgcccctcctgcccccgggtgcgctgcccctcagcggatcggaggcggcccaactgactcattttctcctcgccgctcttcaggtgtattaccggggcgcaccggaggtcacttccgccggcccccggtgtctccgtgcggacttctcccctctccatggcactccagagcactaaaagggcgcggggcccgatccgcagatcgggccccgcgctcctccaatatgggcaccgtatcaccttcccccattggaaaggttttggcatgttctctccccttgacagaaacatatgtttggtctattataatacatatgttcgatttcaagggagggagaccccatggacctgatggacaagctgaccatcctggcggacgccgccaagtatgacgccgcctgcacctccagcggactggaccgggccggacgggcgggccggctgggctccaccatggcggcgggctgctgccactccttctccgctgacgggcggtgcatctccctcctgaagatcctctatacgaacatctgcgcctacgactgccagtactgtgtcaaccgccggtccaacgatccgccccgggctgcttttactccccgggagctggccgaactcaccatccagttctaccgccgcaactatattgaggggctctttctctcctccgccgtgctgcgggacccggattataccaccgagcggatgatcgaggcactgcgcctgctccgccaggattatggcttcggcggctatatccacgccaaggccatcccaggtgcagatcccctcctcacccagcagctgggcctgctggccgaccggctcagcgtcaacatcgagctgcccagcgccaaaagcctggccctgctggccccggacaagggccgggccggtatcctggcccccatggcccagatccgggatgggatcacccagtcccggcaggagctggccaaataccaccatgccccccgcttcgccccggcgggccagtccactcagatgatcgtaggtgccacgccggagagcgaccgccacatcctgatgctcacccaggggctctacgacaagtaccatctgaagcgggtcttctactccgcctatatccccgtctcctccagctccctgctccccgctccccagggctttcagccgcccctgctgcgtgaacaccggctgtatcaggcggactggctgctgcgcttctaccactttcgggccgaggagctgctggacgaggggcggcccgacttcgacctccgtctggaccccaagtgcggctgggccctgcgccacctggaccagtttcctgtggaggtccagcgggccgactatgaggccctgctccgggtgcccggcatcggggtcaccagcgccaagcgcatcctcacagcccggcgggccggacccctgtccttctccggcctgaaaaagctgggggtggtcctcaagcgggcccagtacttcatcacctgctccggccgcatgctggagggtctgcgagtgcgggaggatggcatcctgtcccatctggctgccctggatcgccccgccctggcccaggtccagccggagcagctctccctctttggagaggagggggcctcatgagctggcagcaggtctgcttcgattatgacggcagttatcccggctttctcacctgtgtgtttgagagctatgcccaccgcgaggaggccgtctgcttcacctcaccggaagaggaccgcctcaccctctggccggagcggcatgtggacaccgaccaggccaaggcggagcgggtgtaccgctctctgtccaaaaagatctccccccaggcctgccggctggtgacccaggcttttctcacctgtctgcccgagcgggagctgcacatgtaccgtttcctgcggctgggctaccaacggggggcggacatcacccgggatctcaccgacgaccgggtccacgtgctgtggaaggcggtgcagcacctggggagcgaggcccatctgctcaaggggttcctccgcttctccgatcagcagggggtgctggtaggggagatcgagcccaaaaaccgggtgcttcccctcctccgcccccacttctgcacccggtactctgaggagcacttcctcatctacgaccacacccaccgggagctgctgatccatcagcccggtcggtgggccattctgcccgcggaagactttgcccctgccccgccggggcaggaggaggtgacctaccggcgtctgtggaggcggttctatgacaccatcgccatccgggaacgggaaaatccccggtgccggatgaccaacatgccaaagcggttctggggcactatgacggaattccagcccgacgagggcgcactccccgcccctggaccgcgggggaagggatggtgaaaaaagcgcagcgcctggagaatactccgggcgctgcgccttatttgcagagctttctgtctggtcagcccaggctctcccggaagatctgaaggatctcctcccgatccagatccttgtagcccccggtgaggtggatggtcacgtcagccagcccctccagcatgtcctccgtcacgcccagcgcactggtattcatggtcagcccaagctccttcatccagccctccatggccgccagcccctcctccgccgtctggaggtcggtcttgtccgccgggtccactccccacacctggacggcgaaccgcttgaatttgtccagcccataggggaggatgtgccggtagtagggtagggagaccgccgccagcgtcatgccgtgggtggcgttggtgtagccccccaccgcctggcccagcatgtgcaccatccagtcggtggacttgccccgggacaccagggtgttcagcgcccaggtggcggtccacatgatgttgctcctggcctcgtagtcctggggatcccggttggcagcccggctggagcacaggagggagcgcatcagcccctcgctgagatagtcgctggtgttgtcatcctccccggagaagtactgctcgcagatgtggttgaagatgtcgtagatacccgcgaccatctgctcccggggcagggtgagggtgaagcggggattcaaaatggagaagcggggcatcaccgcctcgtccgcaaagacgtggccgatcttctgccgggtctcctggttggtgatcaccgagccggcgttcatctctgagccagtgcccaccatggtgagcacacagcccaccggcaggatggggcattctggctcctcaaagcggagatagtatttctcccatgggtcctccggacagtggaccgacacagcgaccgccttggcatagtcgcacaccgagcctccgcccaccgccagcagcaggtcagcccggtgcgcccgagcgaccccaatgccctcatacagtttggccagggtggggtttggcatgactccggcgatctccgccacctgttttccctcctggtccagaatggcccgcacggcgtcatagataccgttgcgcttgatggagcccccgccgtagatgaggaccacccggtccccatatttgggcagctccttgtggagcccctccagcgactgctctccaaagtacagcttggtggggttgcagtaagtaaaatttcccagcatgacagttcctccttatacttgacggcccatggcccgggcccgctccagggcgggatgcccgacagtctcccccggtccattcacccctccggcaaagactgtccctgccagtctggccttttcaaaacagtcgatccacccggtcaggccgctctccgcccgcgccgggacctggtcatcctcctccgccgccgcggtgagcagatagatgtcccggaaggcgtagtccgacgcaaacagggcattggctcggtccagcagggtcttcatctgcccgctcatctcgtagtaataaatgggggtggcaaaggcgatgacctctgcccggcccattttctccgcgatctccactgcgtcgtcctggatcacacactggccggcgctttgacaggccagacagcccatgcagaaggcgatggatcttccccgcagggagatctgctccacctggtgacccgcctcccgcgcgccggcggcaaaggcgtcccccagggcttgggagttgctcttctccctcaggctggtgctgatgaccaaaattcgttttgacatattcgttcctccttattcctgttctgctgcatctgcggacccatcataaaccctggagtccacttcaagtcaagcgtttttttactgattttttgggggggagccggtctcccgtcccccgatgtcccctgaagcaaaacaggccggccggcgcagctctttggctgcgccggccggcacaaaaatcgtgcgttttcagttttcttgatctcgatcgcactcccgggacagagccctcccctggtgtccccatctcccggtggcggggactcaaaaacagatcgagacttggaacttggggaaagccttccggctcacaccatcagggagcagaccagctgcgcgtactccgccgggtcctccagcggcagatctgccagcaggagagcctgtccgtagagcagcttggcgtatttggagaccgtatccttgtcccctgcctccaccgccttttggagcgcggcaaagggagcggaatccgggttgagctccagcacccgctgggcccgggcggcgcggtccccatccaccttccgcatatacttctccatctccagggagaccgggccgtcagccgtcaggcacaccgcccccgacttcaggatggaggaggcacggacctccttcacctcctcgcccagggcctccttgacagcctccagcacaggtttgcccgcctccgccttctcctcggccgtcttcttctcctcatcgctctggggcagggcatcctcgtcattcaccgacttgaacgccttcccgtcgatctctcccaggccgcgcatgacaaagtcatccacgtcctcggtgcagtacaggatctcgtaccccttgtccaaaatgcgctccacctggggcagctttgcgatcttctcagcgctctcgccgcaggcgtagtagtaatagggctgatcctctggcatccgctcccggtactccgccagggtggtgtccttcccctccttagaggaccagaacagcagcagatcctggagcagctccttgtgctggccgtactcggctaccacgccatacttgatctgggtaccgaaggacttccagaatgtctcgtacttctcccggtcctccttctggagcttcatcagctcccccttgatcttcttctccagggcagatgcaatgaccttcagctggcgggtgtgctggagcacctcccggctgatgttcagggagaaatcctgggagtccaccacgcccctgacaaagcggaagtggtcagggagcaggtcggcacacttgtccatgatgagcacgccggagctgtaaagctgaagtcctttctcatactcccgggtatagaagtcgtagggggtgtgggaggggatatagagcatggccttgtaggtgacggcgccctcggcgctggtgtggatcacggtcagggggtcctgccagtccccaaatttctccttgtagaaggcgttgtactcctccggcttcactttgctcttctgccgctgccacaggggcaccatggagttgagggtcttccactccttcactgtctcccactcgggcttgtagtcctctccggcgtcggcgggcttctccttctgacggtagtcctccacctccatcacgatgggatagcggatatagtcggagtattttttgatcagctcttgtaatttataggtctcaagatactgatcgtagttctcctcgtcggcgttgggcttgatgtgcatgatgatatcggtgcccggcgtctccttctcgcactgggtgacggtgtagccatccgtgccagcggactgccacatccacgcctcctccgcgccataggcccgggagatgacggtgaccgcgtccgccaccataaaggcggagtagaagcccacgccgaactgaccgatcacatccaccttggaggccgccttgtcgtcccgctccagctcctgcttgaactggagggagccgctcttggcgatggtgcccaggttggactccagctcgtccttcgtcatgcccactccgttgtcggacacggtgagggtccgcttctccttgtcgggaacgatggtgatcttcagatccttgcgcttgacctctacgctgtcatcggtgagggcacggtaggccagcttgtcctctgcgtcgctggcgttggagatgatctcccgcagaaagatctccttgtgggtgtagatggagttgatcatcagatccatcagccgcttggactccgccttgaactgtttctttgccatgatggatgcctcctatatcgtaaaatctaagtttttgtaaatttagcactcaatatttatgagtgctaaattactataccgccacttgcggaaaaatgcaagagcgttcataatttttttacaaaatttcgtcattcgggccggggaagtgacaagttttaatcccaatttcaggacaggcgccccggctgtgtgatatcctcacctcatccattatgcacagaggagggagagccgtgccgcagaagaaagctgtcacaccttgggaaaaggaatttgcccggctggagcgccgcaggagagcctatcaggcccgccatgcccgtccgccggagtccaggctggaccgggcgctggaggacaaggtgccgcccaaactccgggaggcccttaactccgcctttgtcaaggcatttgatctggtcttccagcggggtaccgggcttctggagcgcacctttgatgccgaggcggcccggcagcagtttgggatcgaccagtttgccgcccagctgaagggggaccggagctctctgcgggtcttttcccgccgagccggacggaccggggccctcaatttggccctttccggggccgagggcactctcctggggctgctggggatcggcctgcccgatatcccgctctttaccggcgtcctgctgaaaagcctctaccaaatggctgcccgttacggctacgggtgggataccccggcagagcggtactatctgctccttctggtccagggcgccctgtcctatggggaggagctggccgcatgcaccgcgctgctggacgagtttgccctcaccccctgtccgccggaggactatgaccaggggacacagatccgccggactgcctctctcctagccgaccgcctgctggtgatgaaatttgtccagggcatccccatcctaggcatggctgggggcatctctgacgccctctgtctggaaagggtccagcgctatgccgggttaaactatcatcaccgctttctcctggaccaccggcccgatccccggcctttcgcatagagcagggtcatgtccctcccgcatcccaggtgcccgcccccgccaaaacgggagcgggcaaaatcagtggttgacaggaaggaaaaactgtggtagatttttattggttagcactatctaacaaaagggactaaacttttacagccaaacgccgaaaggcgcgatttttcaaaggagggattagcttatgctaacttctgaggtccggccggccgaagcgcgctttgagctgaccctggcctttcactgtgcgccggccctggcaggcatcaagcccgcggatctcattgccctcccaggggaaggagatgagaccgacgccctgctggcgtcctactccgccgccctggccggggcggggatctctctgcggcccctgtgccggtgccgcagccgctgtctggtactggtgtaccggcgggaccgcctggagcgccagctggagcaggaggaggtggcccgtctgctggagcgggacggctatcccctggccggcgggctggaggccatgctggaccatctggcgtcccggatggcggggagcggtgggttcccccatgaggtggggctgttcctgggatatcccgccgaggatgtggagggctttcgccggcatggcggccagggctataaatacagcgggctgtggaaggtctattccgacgtggagagggcccagagatgcttccggcagtacggctgctgccgaagggccctgtgccgccgcctggaggccggctgccggctggtccagctgtttcggacagcttgacggagataagggatagaggcggggagatccgcggcgcccggatgggcccgccccccccgtttgctatacaaaccaaatttttattttcaggaggtcacatacatgagcaggatggcagtgatttactggtccatgacgggcaacacggaggcgatggccaacgccatcgcggagggggccgccggggctggagctgaagtggatgtgaagcaggtgtgcgacaccacggtggacgaggcgctgggctatggactgctggcactgggctgccccgccatgggggcggaggtgttggaggaggcggaatttgaacccttcttcaccgaactggagggccttctgggcggcaaaaaggtggctctgttcggctcctatgactggggcgacggtcaatggatgcgggactgggcccagcgggcggacagtgccggagccaatgtgtaccaggacgagggcctgatcctccacctgacccccgatgaggaggggctggagcagtgccgcaccttcggggcgggctttgccaagtattaaagggaccggatcaagaaaaagaggacggatgtctccccaagagggtatccgtcctcttttttctctaactctccggtccccgcttctggtactcgctcagcttccggttcagggagcgggtgtcccgccgcagggccacatggaggccgaaccacatggcggacaagccccactccaggaagagcaccaggaagatgcctccccaaagcggcacattggaaaaccagcccagggccagcgcgccgcccacaaaccccaggttgcacagcagcccccaccagacggtccgcacccgcagggcggacggctccagctcccggccctccgggaaaaggaaggactccagaatggccaccgccatggagaccagcagcatctggagcatggtgagcgaggatacggagccctcgccggccagggcgttgaagatggccttgaaaaagaccagcgccagggtatagacagccatatgaaatttcatggacaggccccagctgtagaaacggataaattctcccatgatggacctcctttttatagtcccagccgctcccgcagcaggggcgcgtagtgccgggagaccaccagccgctccccgttctccagggaggcctcgatgcggccgccagtccggctcttcaggctgcggatgcggtgcaggttgataacagcggacttgctgacccggagatagcccagctctccataccgcccctccagctccgccagggtgagggccgtctgataaaaggcagaggcggtatagagaaaggtatgttcgtccacactctcacagtagagcgtctcatccgggctgagcaggatgatctcccggttttcatcccatacgcacagcttctgaaggccggagcgcaccagagacaggacgcggagcatctcctgatccagccgggggcagcgcaggaccacctcgttttccagcacgggtgcgtattccaccctcactttcatagaaaaacctcccttctctgtgagcataccagaaccgggacgccagagcaagccaggagccgccaggatgccatttgggggcggcagcctgcctccaggccaaattttgccgggatacagcggaatttgtccggtataagatttgcatttttttaatatctgtgatatactcctgtgctaagcacccggaagaccgggaatttatgacagaaagctgagttgatttgtcccccatggacagtaccagtattggaatgaccgttgctcttgtcatcctcgtggccatgtccgcttacttctccgccacagagaccgcctttacctccctgaaccggatccgcctgaagagccgggcggacaacggggaccagcgggctgccagggccctggctctggcggaggactatgacaagctgctgtccaccatcctcatcggaaacaacatcgtcaacaacgtggccaccaccatcggcgcggtgctgttcatccggttgctggatgacgtgcgggggcccacggtgtccgccatcgtgctcactgtggtgatcctgatctttggcgaggtctcgcccaagagcctggccaaggagagcccggaggcctgggccatgctctctgcccccctgctgcgggcctttgtagccgtgctgaccccggccaatttcctgttcacccagtggaagcgcctgctctccctgatcatccacaagcgggaggaggacggcatcaccgaggaggagctggtcactatggtggaccaggcggagaacgagggcggcctggacgagcacgagagcgagctgatccgcaacgccatcgagttccacgacctggaggtgtccgagatcctcactccccgggtggatatcgtggcggcggaggagaacagcaccatggaggaggtgggctccctctttgcggagagcggttactcccgcctgcccatctatcaggacagcatcgacaatatcgtgggcgtgatccatgagaaggacttctacgccgcccgctaccggggggagaccatgatctccgccctgaaggccccggtgctctacaccaccggcaacaccaagatctccgagctgatgcgcatcctccagcggaacaaggcccacatggccgtggtggtggatgagtacgggggcacggagggcattgccaccctggaggacatcgtggaggagctggtgggcgacatctgggacgaacacgacgaggtcatcgaggagttcaaaaagcaggaagacggcagttatctcatcgcctgctccgccgacctggacgatatgttcgacctgttcgccgtcaagggcgcctgcgccgccaccaccgtctccggctgggtgatggagcaggtgggccgggtccccgaggagggggaccacttccaggccgagggcctggatgtcatcgttacccgggtggagcaccgccgggtcatcgagatccaggtgcgggtactgcccgaggaggagcccgagactaaataaagaacactgcccctgcctgcggctccgcgggcgggggcttttcgcacccgggccgttgcgtctaggggagaaacgtggtatcataaccctgatttgagagacgggaggaatggccgtgaaacgggacaagagctccccttgggaatttctgtggtacgccctgtacgcctttgcgggactgggactggagctggtgctgatgggcggagtggagccggccctcttcggcggtacgccgccctcccgctataccgccgcccatacgcttctccactgggggatgactatggcctgctgggggctgacggccgccctgctggtgagacaggcggagaaaaagctgggcttttccctgctggaggccaggcctgtcccccggaagggggcggggctcgccattgggctggccgccctgtgcatcctgctgaacgcgctggactgggggactctgaaggtgatcgaagagtttcagaagaaggggcccctcctgttcgccggccagtatctctactacgcctttgaggtggtcttggtccttctgatcgcagcctttggacagcagttctgggaggcgctgaggaaagggcggagccagttccccttcggcggcgtggtgctgtgctgcacctggggcgccatccacacgctgtccagggggagcctctccaccggcctgggggtgatggccttcgggctgatgtacggggcgatatatgtcctgctggggcgggatgcccgcacctcctatctggctatgctggcggcctttgtcatctgaagcggcgcggaccttgggcggtcagtcctccggactggccgcctttttgtgcctgtttcaagcccaccgcccccgatcccggttgacagatccgcccgccgcttttataatagagctatccaccaggagaggagggctcccatgaggctctacggaaaatttgccattgtatccggctccggacgacccgatgtgacagagcgttgtacggagcctgacgggatgggatctggcacgcgcaggcccgcaagaagggcttgagcgcctttttgatcccttctgttccattctcatgactcaggccgcggacagtgttctgtccgcggctttttcgcgcccgtttccggcggagggcctgcatccccgcccttcgcccacttctatacctgtcttgagaaaggaacgatggatatgaactccgatacgctggatctgacccgggggagcgtccccctctgcctgatccgattctccttccctctcctgctggccaatctgctccagtccttttacagcatggcggatctgctggtggtgggccgcttcgtgggtgagaccggcctggccgctgtgagcagcgcctccaccctgtgcttcctcctcaacgcggtgtgcatgggcttttccgccggtgggacggtcctcaccgcccgggcccggggtgccggggaccgcctggaagaggaggaggccgccgccgcactgctcctgctggcgctggcaggctccgccctgctgacggcggccgccctgctctgctaccgcccgctgttcaccctgatggccctgccttcccaggctatgggggacgcctgcggctatatggccatcctctgctggggcaccccctttgtctttggatacaacgccgtctgcgccatcctgaagggccggggcgactcccgcggtcccctccggttcgtggccgccgccgctgtggtcaatctcctcctggatctgatcctggcaggtccctgcggcctgggaaccgccgggaccgcctgggccaccgtggcggcccaaggcgtctcctttctgctctctctggcccacctgcaccgctgtgtccccctctccctccggcgtctccccctccgccccgccgccctcctctcccttctccggctgggcctcccctctgccgtccagatagcggtggtcaacctctcctacctgatcctcaccggcctgctcaaccctttcggcgtctccgtggcggcggcggccggcatcggcctgaaggtcagcaccttcgccgggatgccctgctgggcgctgggctatggggtgaccgccatggtggggcagaacctgggtgccggcgatccggaccgggtgcgtcagaccgtcaggagcggccttctcctcagtctgggggccactgcccttctgaccgccctcgtccagctggccgccgcccccatcatcgccctcttcgaaccggagaacgcggccgtgacggcagagggggtgcgctatctccgcatctgctgctccgtcaacggactgatctacgctgccatgtatgtcttcgactccttcgccatcggctctggggcttcctgggtggctatgtgcaatgccatgctggacgcggccctgctccgtctgcccctgtgctggctgctggccttccccctcgccctgggccccgccggcatttacttgggccaggcgttctcccccatcctgcccgccctggcggggctgtgctatttccgtctccggtgccgccggtcttgacggctccccctcccgccgctacaatagagctaaaaggagcgctgaccatggacattcagggactgcaaaaattgacgctgctggactggccgggccgggtggcctgcacgattttcctggggggctgtgacttccgctgccccttctgtcacaaccgggacctggtgaccggccccctccccgccgccatggacagcggggagctgctggctttcctcgccaagcggaaggggctgctggacggggtctgcgtcaccggcggagagcccctgctccgccccgggctggaaggacttctggaggagatcaaggccctgggcttccccatcaagctggacaccaacggcagccacccccaactcctggccaggctgtggtccctggggctggtggactacgccgccatggacatcaaaaattccccggagcggtacggagagaccgcaggggtccccggcctggacctggggcccatccgggagagcgtgtcctggctgctggagggccatgtggactatgagttccgcaccaccgtggtgcgccagttccatgacagcgcctccttccgcgccatcggcccctggatctccggcgcccggcggtactttcttcaggccttcatcgaccgggacaccgtgctccggcccggtctgagcgcctggtcccgggaggagatggaggggttcgccgccctggtccgcccctcggtcccggcagtggagctgcggggcatctgaaccccccctccgcgtttttggctaatttttatggcagagcactcccgtcccacggggcgcgggagtgttctttttcagaaaaatcgccggtttttgccccgtttcttcccaaaacatgtgccggcgcttcctgctttttcgctccaggaaaacaaaatattgtgtttccgccggaattttgcacaagatattgacgagccatttccttcatggtatagtaggagcagtcgcggcggccaagccgccgcgggactgaagaatgtggagggaccgtgtgatgtatcaggtgaccaagcgggacggcaccgccgcccaatttgagatcggcaagatcagcgccgccattaccaaagcctttgaggcgctggaaaagcagtatcatcccagcgtgatcgacatgctggctctgcgggtcaccgccgacttcgagcccaagatccgggacggccgcatcgcggtggaggacatccaggacagcgtggaaaaggtgctgtccgaggcgggctacgccgatgtggccaaggcctacatcctctaccggaagcagcgggagaaggtgcgcaatgtcaactccaccctgctcaactaccgggagctggtggacaactacctccagatcaacgactggcgggtgaaggagaactccaccgtcacctactcggtgggcgggctcatcctgtccaactccggcgccatcaccgccaactactggctcagcgagatctacgaccaggaggtggccaacgcccaccgcaatgccgagatccatatccacgacctgtccatgctcaccggctactgcgccggctggtctctgaagcagcttatccaggaggggctggggggcatcccggggaagatcacctcctccccggccagtcacctgtctaccctgtgcaaccagatggtcaacttcctgggcatcatgcagaacgagtgggcaggggcccaggcgttctcctcctttgacacctatctggctccctttgtcaaggtggatcacttgactcagaaagaggtcaagcagtgcatccagtccttcgtctacggggtgaacacccccagccgctggggcacccaggctcccttctccaacatcaccctggactggaccgtgcccaaggatctggagaacctgcccgccatcgtggggggcagggagatggacttcacctacggggactgcaagaccgagatggacatggtgaacaaggcgttcatcgagatcatgatcgagggcgacgccaacggacggggcttccagtaccccatccccacctactccatcacccgggacttcgactggtctgagacggagaacaacaagctcctgtttgagatgaccgccaagtacggcaccccctacttctccaactacatcaactccgacatggagccctccgacgtgcgctccatgtgctgccgtctgcgcctggacctgcgggagctgcggaaaaagtccggcggcttcttcggctccggcgagtccactgggagcgtgggggtggtcaccatcaacctgccccgcatcgcctatctggccaaggacgagtccgacttctaccagcggctggacaagctgatggacatcgccgcccggtccctcaagaccaagcgcaccgtcatcaccaagctgctggaggcggggctctacccctataccaagcgctatctggggacctttgacaaccacttctccaccatcggcctcatcggtatgaacgaggtgggactgaacgccgggtggctccgggccgacctgacccacaaggagacccagcagttcaccaaagacgtgctcaatcacatgcgggagcggctgagcgactatcaggagcagtacggcgacctctacaacctggaggccacccccgccgagtccaccacctaccgctttgccaagcacgacaaggaggagtttcctgacatcatcaccgccaacgagaacggaactccctactacaccaactcctcccacctgcccgtaggctacaccgaggacatcttctccgctctggacgtgcaggacgagcttcagaccctctacacctccggcactgtgttccacgccttcctgggggagaagctgcctgactggaaggcggcggcggagctggtgcggaagatcgcagagaactataagctgccctactataccatgtcccccacctactccgtgtgcgccgaccacggctatctgtccggggagcagcacacctgccccatctgcggcaagcctgcggaggtgtacagccgcatcaccggttactaccggccggtgcagaactggaatgacggcaagacccaggagttcaaggaccggaaggtatatgacctcaccgcctcccacctgcggaaggcgggccgggccggcagccaggtgaccttctcccaggagggcgccccccaggcgtccggcggggagtccctgctgttcaccacccgtacctgccccaactgccgtcaggcggaggccctgctccagaaggcgggagtgccctatcagaaggtggtggcagaggagtctcccgacctgaccacccggtacggggtgcgtcaggcccccaccctggtggtccagggggagagcatcaccggactgggccccatcaagcggttcgcggaggagcaccgggcccgggaagtaggctgaccgcgccttgatcccaagttccctccccccttgcggcggcgggggcactgagacggatcgggacatcaggaaaagagagcggctccgggtctcctggagccgctttttcaaaggagagaggacccttatgactgatatcatcgtggcggggggcggccccgccggcctcactgccgccctgtacgccgtccgggccggccgctccgtgctggtcctggaggaggccgctcccggcggacagatcaacttctcccccctggtggagaactaccccggcctgcccggcgtcagcggcctccagctctctgaggccctcacccgccaggcggaggagcagggggtggagctggactatgcccaggtgctgggcttccgcccggaggaggggggctttgccgtggagaccgacggcggccccctccactgccgcgccctgatcctcgcccctggcacccggcaccgccctctgggcctggagggggaggaggccctcaccggacagggggtgtcctactgcgccgtgtgtgacggccccttctatcagggccgggacaccgccatcgtggggggcggggacaccgccctgcaggaggccctgttcctctccggcgtgtgccgccgggtgaccctgatccaccgccggctggagttccggggcagtccaaagctggcggagcgggtacggacccgggacaatatccgcctgctgctgggctatacaccgcaggccctgctccaggcggagggcaggctcaccggtctgagggtccgccaggcctccaccggacagaccctggagctccccctggacggggtgttcgccgccgtggggcgggtccccggcaccgcccccttccgggcccagctggagctggacgatgagggctatttccgctccggtgaggactgccgcacccgcctccccggcgtctttgtggccggggactgccgggccaaggaggtgcgccagctggccaccgctgtgggcgacggcgcggtggccggcctggccgccgcccggttcgtagaggacggacaaggctgaatcttcaccctccaaaacacagatctccctccccgccggagacaccggcagggagggagatctctttcttattctgtgatgcccagctgggcggcccgcttggccagagccgcgcacaggcggtcgatcccgtccaggctcttctgccggtcagcgaacacaccgtagatgatgcgcaggtggccggctccctggcctccgtaaaattttccgtcgttgaccagcgtcttggcctcctccgccagataggcggtgatctcgctggagtctcccaagcggctgacattgacccagccatagaagcccgactccatcaggggcatggatactccgggcaccgcattgaatttctcataggcatagcggcggcggaagtcctgctccgccacataggcctgaatgaaggatgtgtcctcataggcggggatcatggccatctggaccatggtattggccgcaccctggatattcaccgcagtggcgtacatggtgtccatgatcacatcatccgcgaagatatagcccacccggtagccgctcagggccatgcccttggagcaggaacagactgtgaccgtgcgctcccacatgccgggcagtgaggccatggtgaccatctcatgtcccggaaacgcggtatcctcaaaggcctgatcgcagacacagatcaggtcatgcttgatgatgaactgggacagctctgtcagctcctcccgggtgaacacccggccggtggggttgttgggggaggagagcagcaccatcttcgtcttgggtgtcagccgcttctcatactcctccacccgcaggcggtagttgtcctcctcataggtgggcaccttcaccaccacgccgttgagcagctgggggtccaggaaattgcttggatagctggggtcgtggaccagcacctcgtctcccggctcaataaagggggtcatggcaaaatacaggcccacgtcagagccgggattgatgatgatgttccgctgggggtttactttgatgtggttgtcccgctcgatttttttcgcaatgacctctttcaggtccgcattgccgatgggcggggtatagtggcaggccaccccctgctggatgacctccacactgcgctccagtaccttctgtgggatcacccggtctggatagaaagggtccgcccagcacatcagggtgccgccctccgcttggagcttggacaccgcatctcccacgtctgcctttcccgctttttcagaaaacaggccgccgtccagggtacggaacaggggccgcatcttgtctcttatgctcataagctcaaatcactcccaaatgggccatgatgatgttgacgatcgtggccagtgtggtggtaacgacagtcaccacaaacaggtgcttgtagccctccttgtgggtcacgccgcagtaggacagggtcaggacaatcgcgctgttgtggggcagggagtcaaaggtgatctgggagatgttggcgatccgggtcaacgcctccggattgccgcccatagctaccagcttgtccgtaaaattgtccaggacaaaggccaggccgccggtggcgctgcccgtaaagccagcgatcaccgcgatgcacacaaacagcatgatgtatgggctgccaaaagaggccttttccagcaggcccagcagcaggttgtagccgggcaccgcgcccaccacagaggccaggccgcagatagcggcagtctggatcacagactgagagttcttcgctccctctgccatcgtattgacaatcttgtggaagccctcgtatcgcttccagaacatcagtgccagcacaacacagccgataaacagggccgcccaggcgggccagtggatcaggttgagcagaaggaccacgatacccatggggatcagcaggaggaaggggttgggcagtccctcagtgttcagatccacgtcgtcggtgtcgccttcacgggggataaagccttcccctttggcgatgtacttctgtcctgcccggtggagataccacaggttgccgccacccacgatggcaaagccggcgatagccatccagaaaccggccatgggagtggtgccgaaggcattggcggggagcacgatgttgttgataggcatgccgggcagggtctgcattgccaccgcaccgcccaatacgcaggcggggatcaggctgcgggagatgccggcagccttaaagaaggcagcggccaggggatacatggtgaaaataatgacgaacacgtcgatgccgcccacagacatggccagggtagccagatagaccgccgccaccgcgctggcgggccccagcttgcggaacacgccgctggccaccgccatgggcaggccggacatctccagcatcttgccgaacatctggccgcccaggaagatggggaacagggccagcaccatgttggccacgccgcccatatagacattggcgtaattttcaaacacattcacgccgccggtggctgccaccagcagagccgccacagtggacagcaggatcagggaatagcctcggacggagccgaggatgatcaggatcagtgccgctacgatgccaataaagctgataatttccatggagttcccgcctttctaatttctatgattgggtgagagaactgggccgcagcatcacagcgccgcgaccgcctcgatttcgaccagtgcgcccttgggcagcttggctacctccacagcgctgcgggcaggcaggacctctccctggaagaactgggcatagacctcattcatcaccgcaaagtcatccatatgctgaatgaatacggtggtcttgaccaccttgtccatggaggtgcctgcggcctccaggatctgagacagattggtcagggactgtctcgcctggtcggccacgttgtccgcgtcgatgctgccggtcttggggtcaatcggcagctggccggaaacgaacaggaaatttcccgctgctaccccctgagaataggggccaatagcggcaggggccttttcggtattgatgcgttttgtcatggtttcctctcctttttaccgtgatatggtttgtctcctcactcagatcaggcgccaatcgcagaaggtgccgcccttcatctcatagccgggggccagcacgctgaagcggcggacattcaggttgggcagggtgctccaaatcagcctgcagtgcttggccaccaggcgcagcttccgcagatcagagatattttcatccggcttgccttccaccacaatgaagtcgcccatcagtccgggcttgagggtgccggtcacatcctgcagcccacacagctccgcaccggtggaagtagctgccttgatggcctccatcggagacaggccgcactggaccagcagctcgatctcccggacggtggcgttggtgccgtccaccgggtcagagggcagaagatcggtgcccacgcagatctttacgccgtgcttatgggcccaggtcacgccctgccggtgggtcttggcggcctcgcgccccttttccacctggtgagccgggcatccgtgggccagcagataatcatcgctggaggagacagagatcgttgggacaaaataggtgccgtgctctgccatcagcttggcagtctcttcagacagcgtgtagccgtgctccaccgaatccacccccagcaggacggactgacggatggccttgtcgttggacagatgagcgaagcacttctttccggcccggtgggccacgtccaccactgcctttacctcttcatccgtcatctgcatatcgcacaggccctcattcgcggaagccattcccccggtgtacatcatcttcagctggtctgcccctgccgccagctgctcccgggcagccttcataaatgcgtctacaccgctgcacatgaccacggagttttcctctgagccgtgtccattgtgggccaccagtccctttccgcaggcaatgatgttggggccgcagagcatgttcttgttgatggcctttttcagtccaatgtcgatgtcatcgggaatagcggcactgcggatggtggtaacgccgcagtccagcgcctcggccgcccgccggtagctcagcagtgtgcggtaggggatgccaaactcatcaaagctgttgcccagcccccgataggggagcatgaggtccagatggacatggcagttgatcagtccgggcagaatggtgtgcccggacaggtcaaagaccgcatcctcgggccccgccttggccaggacactctggtccatttctcccacatactccaccacgtcctcattgaatttgtcctctatattgtcaaagacatagaggccgttttcaatggccggtgcgccggttccatccacgatgcggacatttttcagataggtgcgtgacatgattgatgctcctttcaaatttctttccgttcttagcagcaaatcacttgctcttcatatactgtaataaattttattatatactgaatttttatcatgtcaatgtctgattcctactatatctcccttttatttttgtttctttttcataaataaactctttttttgcaaaaaaggttgtgcgccatttttgtttgtgatattttgaatttaacaggctttcaggaaaggaagatgttatggaacagacagaaatcgtgttgactcccgcggagcggctgatcctgaactcttaccgggatctggtgtgcggtctggaggattatctgggcataggatatgagatcgtgctgcacagcctggagtccatggagcactctgtcattgccatcgccaatgggcactatacaaatcgtcacgagggttctcccattactgatctggccctggatatgcttcgctccatccagcaggaggatgggaaaagccatatttcctatttttcccgcaaccgcagcggcgaaccgctgcgctccactaccatcgttatctatggtgaaaaccgccgggccattggcctgctgtgtatcaacttttatctgaacacccccctctataaactgatcggccatctgaccgaagatgcgatggatgagcgccctatgctgacagaaacttttgtggacaatgcggaggaactgcttacccgggtcgtggaacaaatcagggatgaagtggagcaggacatccatattcttccttctctaaaaaacaaggagatcatcaagcgatgcagcagtcaggggatcttccaaatcaagagcgcagtcaccagcgtggcgaagatcctcaatatctccaaaaatacggtgtatctgcatttgaaatctttagagtagcagtgaaactcttagtatgacgattacaaagggctcctggcagttttaaactgtcaggagccctttataaattattcttttagcacataactcaaattatcaatgccgtttttgtataaaaatagatttcacacttttttagccaattctatatgtgaaaattattgaccaaaccggcagaaacagatgctcaggcagagaacagccaagataaaaaggcttatctgccagtctgacagcacgcagacccgcagtctttttgcttaaggccgatccatagcgggcggcagccctctcactactccatctaattctttccgatgcaattatcgcaaaagttattttctgtcttttaattttaaaaaagattttagctccctttttgttccattgatttccacaacattttagtttatgataaaaatacacatttctaaaaagggcgggcgtatttttatgaaacagtttttttcacagtatcgtaagtgcctccgcttttacagctcttttcttcaaatcttttcgattctttttcttattatttcgatgacattaggaatattttttgtatatgtctttcgacaggaaaaccataatcttcaacaggcagcagagcactcctatcttaacattttggagagtactagcactacgctagagctgactatgcaaaatctacagcagattatgctggataccatctggacttccgactttacaaatgcccttgtagtcccttttgatgatacctatgaccgcacccgaaatattttagaacatcttcagcaacttgttgatgtttatcctttcattcgatcagctttcctatattgccctacatctcaaatggtatatggttccgatctgacctatcaaccggtagaagaagcttctaacgagctttttcagaatcctgagcatcttttatcctactctggtgccagactctctaagtcccatacatccttctttataaaacaattagctggtaaaaccattatctgtcagcatctttatcccgattatctggatagtctaggggccctaattatagagttggacctagcatcctttcctctgtcttccatttttaatccagaatcgagctcaaggctaccctgtttcatcactgatacaaacggattgcctattttcaggggagaactcccgtcctcccttgcctctctttttcctctggcagcactatcctctgtccctgcacagacagtcctttatgcccaaaacggcttgacctacttttatcaccgttcttcttccaccagctggtcctatattttacaaatcagtaccagccaacttcaattttataccccgttgtctcaaatcatcctgttttgcatcttaggtctggtatgttcggtgcttctctctgttctaatcgcatccaaggccaatcaacctatccgccgcttgctttttgaggctggtccttcctctcgttctcccgatgtggatgcagaaaatgaagtggactacctctccaaaacttattcatataccacccgacaaaacgaggaactcagccaagcaattcagggcatcactccgctggtgctagagcgtctgtttgggcatttgctcagcggacgtccccttagtgaagaacatatctcctctatcctgtccggcatcggcaatccttttccccaggaagcaacttttttggccatggctctcacaatctccagcagttctcccagtagtcttaccccattggagtgcaatcttttgctcagtaagatccaggaacaattgcatcaacttttgtctccccccagttccagttaccttgtcccacaagaattttcttctgctgccattgtactggtctttccctgcgatatttccgaaacctcaatccaactcatggttcaggcatctattaaggagatttctcagaggctctctattcccccctatcatttagatttaagttgtgggaatctttatcaccatctctccgacctccagtattcctacctcgaggcacagaaagcccaaagccgccgtcgtttctaccaggacgaggatattgaggactcatcggacctttttccttcccataaccgctattttgagtctgtccaaaaaattttgcttgctattcaagctggagaccctatctccgcctatgagcaactcatgcaaaacatgaacacactctccagatgcaatccagatattcaggaacagcgcagacaatatcgctctttttttcgcactctgtttgaattggctgatactctgcgcatgggagatagagaagaactgctacaacaggaacaagttatcttagagcttcttgaaagtacttcttttcccccaaaagaaggtcctttgatcaatgcagtatatgatctgcttcataacattgaacgtaaggaccgtactcgtgcctcacagcatattgcccgggtacaggagtatattttggaaaactattctgacagcacactatctttggaatccgtcgcagagcgaattggcatcacttcctcttacctaagccgcctatttaaaaaggaaaccgggagttcttttgtggactatgtcaatacagtcagagtccagaaagccaagtttcttttggctcaatcagagctaaaaattaaggatatcgcatatcaaactggttttcactccatacagaactttttccgaatctttaaacgcatgacgggtgatcccccgggtgaatatcggattaaacaaaaggacgtttcttgataggaccatttcaccgtttgtggcagggtttggccgatcctctttattggaaaaggcaacctgccacaaacggattttttacccctcgtcccattgtgcagtaatactcaaatttttttactatagtcttcatttttgttctttttatc

SEQ ID NO: 13636 - DNA, 3520 bp, Unknown
  gut microbiota DNA sequence
aatgaaataatcaaaaattctgagttttcagcatttaactctccatttatactgaaggcactcaaggcctgagtaacaattttgtgaaaggagagtctgcatgtttaaaaaatttttacgcgccctgaatcagcatttggaagagtatctaatcgctctgtttttaattgcaattacattcgttatgcttcttcaaattgtaatgcgatatgtatttcagcactccttatcttggccggaagaatttagccgctactgtttcgtttatattacctttttaacctttggttactgtattcagcatgactctatgcttcggttagatattatcaaagaggtactgccgaaaaaagcttgggatgtacttcaggttatagttatcctaatctcagcagcattttttctcatcatgcttttatactcttttgacttgcttcaatcaatgagagagactggccgagtaagtgccgcgttaggtattccatatttttatatttatctttctactacggtcggtttcgcattggcccttttccgtacagcacagcgtatctggcgtgctctcgcagggcattttaaaaaaggggaggtattatccttatgacagcggctatgtttttggcatttattttgttcctaatcctctcctttccggtagccattgctatgggtctctcttcctgtgttcccgccttaatagactcaagtttctcagctgattttgtctatattatccggacaatggtggtaggcattgattccactcctattctagccattcccttattcattatttcgggtactatgatggctcagggggggatctccggaaagctcttcgatgtattctcctatttcttaggaaataaaactggcggtctgttatgtgctacgattgcgacctgtcttttttacggtgcaatctccggttctggtccggcaacctgtgccgctgtaggagctatggccattcctctgttagtctctcttggttatgataaggcgttctgttccgcaatggtggccaccgctggaggcctgggcttaattattcctcccagcatttcatttgttaattacgcccttgtcactggtacctctgttacctccctatttatggcaggaatcctgcccggatgtcttattggtggatgcctaatgctgtattgttacatttactgccgtgttcacggggaagataaggaaaagatccgcaaaaactatgagcagctccaccgccgaacaatttttcaggtactacgcagcgccttctgggctttgctttcccctgtaattattttgggaggaatatacagcggcatcttctcccccacagaagcagcctgtatttctgttgtatatgctgctctggtctctgtctttatttaccgcaccatttccctaaagcaactttggactcttatgctggagtcggtccacgcctgcgcgcctctttgtgcattgctcgctcttgcaactgctttcagccggatcctgaccatgctcaatgccccacaggtcttggcttccttcctttctggtataatttccagtcgcatttctttccttattttacttaatatagtactcctgatcttaggtatgtttattgacggtgcacccgccattcttattctctccccgctacttatgcctatcgcccagcagttcggtatagatcctgttcatcttggcattatcatggtgtgtaatctagctgtcggccttgcttctcctcctttcggtctgaatctgtttgtagccagttccacaaatggggcccccattatggagatcagccgaaaggtcgtgccctttatccttgcatttcttgtagctctgattttgattacatttgttccatccatttccctgtgcttagtttaaatctctattttttataaggagtaatttatatgaaaaaaatatttgctctggctatgtctgccgcactcatcctcagcggctgttcctccaatgcgcccaccaatcctgcggtctcaggctcctctgtttcaacagcttcttcctctggggaatataactttacaataggtacctccgctaccaaagattctacaattggacaaaccatgcaatacgcggccgacctcattacagagcgcactgatggtcgaatcacggtgacctgctatcctgattctcagttaggatcagacagcgaactagtagagggggtccaactgggtagtattactatggtgatcggcaatactgcaccccaggtcacttttgttccggatcttgccctctttgaccttccaaacacctatgtagatattactcaggcgcagactgtactctctgactttaccgaaaaaatgatccctagctttgataatacaggcctgcatttgtgccagatatttccaaccgcatttcgctatatgtcgtgcagccaggccatcgacagtattgatgatttttccggtattcaaattcgtactatgaccaatccttatcatatggcctattggaattccctcggtgctactgcaaccccgctcgattttagtgagctctatattggtttgcagcaggggttggtagatgcacaggaaaatcctttggatatttttctgagttcaaagttctatgagcagcaggactatgtcatcaacaccaaacacaatgtatttgtcgcaactctgctaatgaaccaagacacctgggatagcctgcccagcgacttgcaggaaattctgaatgagtgctttgttgaaattggccagtatggtactcaattgggccaaacggcagaggaggccaaccttcaggctgtccgagatactggcgtaaccattatcgacttagatgatactaccttatctcagatgcgtgagaaagcccagcctgtttacgatatgatccgggaagatgtgggtgcagatctggtagatgactaccttgctgctatcgatgctgctgggaaataattgctcggatgccggaaggagaattttttattatgaaaaatattcgcaaaccatcccgcattatgacggcatacgatttctgtaataccggaagcactaccatttactggttgtctggggctggctttttgattaactgtcatggaacttgtattttgatcgaccctgttcttatgacagcatcaggcgatgcctcccgcagcgagtctggcctaccgctcaaagtcaccctccctctggatcctgacttaattcctgatcgatctatcatcctttatacccatgctgacgcagatcacctaggccctggtacagcactggcgctggcaaaaaaaaatattaccatggtaggcactttgcgtgtctttgaacgtcttgttcgactcggtgttcctcatgaaaatattcagattctgcgtattcatgaacatatggatatttccggagtccagatacattctgttcctgctgaccatccctggcagcttaaggacttagagcggggtggccctccctaccggatgggagaatgctgtggctttcttatagatgcaccggagggt

SEQ ID NO: 13637 - DNA, 138 bp, Unknown
  gut microbiota DNA sequence
tttggccgcaggctggtggaggactatgcgaagaccgccccggatcagacagagggatagagcggggggcggactccccctgccggcggcagccggcgccgcgtgtgcggcggagctgggcgggattcacttccgccc

SEQ ID NO: 13638 - DNA, 391 bp, Unknown
  gut microbiota DNA sequence
cctccgttctcatgtcatttcatacagcagagcagcatcgccctgcaccagttccagatgggagcgcagcgtattaagcccgctttgcaccgcctcggtgggcagatcccagtccggggcaatttcagcggccagctccgggagatcctgctcccgcagagctgccagcagttgagacgccagctctccctccagcagagcgcagtccagggtgtcttccgtctggggagcaggaaaacggacatccagatccagttcgctctcacaccagtcccagatggccatatagaccgcgccggagcagtcaccgtcggacaactcctgccgctggttattttttatcagataaaaggacgcgatctgtgacatggtggttccccctaaatgttat

SEQ ID NO: 13639 - DNA, 9964 bp, Unknown
  gut microbiota DNA sequence
ggaagatcaggggaaaaatccctgagatcacgcctaaaaagtttacatggtagacatttggtagacacatgaaaacaagaggggcggcgaggccctgaaactccaggccaccgccgcccttttttggtagacttttggtagacatcgcgctttttgtcaagaatatgattggagctcttacaattataatatgctgtttttcatttgcaagggacctcaatctccttctgccatgcggtaacccacacctacctcagtaaaaatatactggggtttcgccgggttcttttctagtttgcgacggatctttgccatattggcccgcagattttgagtatctcctacagcattcggcccccagatctctcgaatgataaaatcatatgtcaaaacttttccggcatattgggtcaacagagcaacgatcctatactcactctgagtcagatgcacgttctcttctcccagccataccagatggctgtcaaaatcgactcgcagccggccacaccggtagatccctgtacgcgccaatccaggatcggcggcttgcgtcctggtatggcgcagagcggtgcggatacgcgccagcagttctcctccgccgaaaggtttggtcagatagtcgtccgcgccaagatccaatgcttcgatcttgtctcgttctctggtcctggcagataccactataattggaacaacgctccaccctcgaatacgtcggatgatatccactccatccatatctgggagccccagatccagaataatcaagtcagggcagtaggcgtcaagcatctgacacgcctctgttccggtataggccttgatgacatcatatccattggctgtcaggaccgttccgatcagatagttgatacttttttcatcttcgatcactaaaattttatcctttatgaccgccatactgccgttcctcctttaagggaagcgtgaaccaaaactccgtgcctccctccagctgatttctgccttcaaaatttcctccgtgcaccttgataatatcgcggcagacgatcagcccaatgcccatattgtgttttttatctccagaactggtatctgccaattccatatagtccccgcatagatgctccaacttttcctgcgggatccccgccccgtcgtcactgacagaaaaacggacccagtgctttcccgcatctacccgaatccggatcttctccgccatcccatggatcaccgcattttccatcaggttgtatagcacctgctcgatcagcatcgcatccataggcacttccagcaggacgtcaggcacctctacttccactgtggtattggggaagtgcttttggaatttttccattacctcacccactacttcctctggcatctccggactctttttcaagtggtaagacgccccgcctacacgggtgatagacaataaattttctaccatacggatcatccactctgcttcactgcacacattgcggagcagggtcctgttctcctcatcgctcagacaatttcccggactgaggatcgcctctgctgatccgatgatggaagtcagcggagtccgcaggtcatgccccactgcccggagcagattggcgcgcagtcgctcccgctccgcctcgatctgggcctcctcctgctctttgatatgggtagtaagcgcgctggtcacgatagagacactaaacagtgtgacaaatgtgaatgggtaaccagccccccgcagctcaaaccggtaatagggttccataaaggcataattcacgaccactgcggcgatcaggctcgccgtcatcccataaaaatatccattggtagaacgggccaccaccaagacacctgtcacaaaaagcaaggctgcatggcagtcatccgcccctacgggctggagcagcagacccaggtccaataccaccgccatggtcaccactaaaatcacgctgtcctgccagcagaggggacacatccgccttatcttaccgagcacaggcccacctcccccctttctaaccgggtcaaagtcagtatatcatggaacgctgaagcgttcaagccggacgtataagtgcaaaaatgccagacagcccccgatcaggggctgtctggacattggccgcgcctcacagcgtggggatccctgtatcaaatttggggcagcggacccggactgtcttcaaatcattgactacctgactgatctgaatgtcacaagtcgcacttagcaaacggtatgcatccggaaaatccagtttcagttttttctccagaaaggcaactgtatcagataccgccaatcgaatagcatcgtccaaagtcacagcggatgctgtaaaatagagggcttccactgtctcgatgaccggtctgctcaccggccggtccttgtaaagcgtggttttgagacagatccggccgggtgtctcgatcccggtcccgcttaattccccgtcacccatacaggcgtgcaggtcccccactgccaggccggctcctgggaccgacacaggaagatagacacgggcccccgccttcaccatcttcgtatccatattagagccgtgatcccccggcactgcacagtggatatccagcccaggtctgggggctaccccgcacacgcccaccattggggtcaatgggagacggatcttgtcagaaaagcaggcaaatccatcctcaatgggaatcaccttagtgtcagcctctgtgatccggtcccccagtacgcccaatccctttgaggtcaccataaccccctgtctgccgagctcaatggccaggatctccacacacagggtatctcccggcttggcaccccgcacctcgatcggcccaacagagcagtccatgatcgtgatatcgatatccggacgctttaccgaggcgtctgtgatctggccgctgtaacagtcatctgtctccacccagaaggtctccccatcctcgacgctatattgacagggatgctccgcattgaagctgaagatcactttgtctttgggaatgacacgcattgcattttcctccctcttttaccagcctgagggcaggatccccaccagatccaaaaccgcatagagggctgccgcacagaagagcgtgatgatgagcacctggacccaccgcgcagagtaccagccgcacttccagggcggctccatgtcgccgtttttccgggcactgtttaccatcagcgcaggcagaatggacataatgacaccaccgaaggtcccagccaggtaaatggcgtctacaaagctgaccaagccgctgtaagctaaaatgaatggaggcagagccacacatgccagcgagatcaggcgggtcggcacatgattctcgctcttgaacttgaacatgtccacaatgttcgtcagcatagagccgcccactgcccagtaagaggtcatcatggcgcacagggcaaaaatgttggctacaaacattgcccagctgcccagcgcctggccccaggcgagcgtcgctacctccgtgacattgtccggtccagtaagggaaatgacagccagagggaccagtgccagcagtatcccggtgatcagcatgccgatggtgaccgctttgggcagtgcgcgagcattatgccgcaggccgcgggccagttcagggactgcatactgggcgatatagcagaagatcgccacgttgaacacaggcaccgcataggtccagttggtgtagatcgcctggctgatatccgctttcccagacaagaaagagaccccgataataacggccagcaaaacgatcatgccggtactgataaatttttctgccaggccggttgctttcagtcccagccacactactactacggccggcacagtaaagatcaggcttccaagtgtgggagagatccccagcagctcagccaaaatttctccgctgccgctggtataggagatcatgcagccaatggagttggcgcacacagaaataaagaccagtaccgcccccaattttcccacatatcgttctgccagccccggcagctgcatgggctttttcgtgcggagggtagtctcagccacatacagcatggagaccgtcgtaaatacccccgcgataataagccacatcagcaggataggccatccggccttccgggaggaataagccagtcctaaaataccggctccgatatttgcacccacgatgatcatagctgcttcccagaaggtcagcttcttcacactgagtgctccttcctctgtaatgacaacattacttttttcttcgcccatgttcatctctcctcagcttttattttttgccggagtggtatgatctcattatagaaagtcgggctcccaaattcaattgatttagttcacaatattttcactaatttttatataatagcaacataatcgcaacattcattttctgcttttttgtctccttacaggccgcaggcataaaaagcgccccttaagaggcccgaaaaggggagagatcccaaacttttcagggccccttaaggggctgtctgcttgcatttctttcaggtcctctgggccctggccgggtctccggccctcttgggaggaagccccgcccatgctggggaccagccagacgcggaccggtgacggcgggacggggcattctgctgttcagcactcaccggccgccaaatccgccgccgcggccaccgccgccgccaaagccacctccgaagcctccgccacggccaccgaagcttccgccacgaccgccgaagctcccaccaaagccaccgccgcgggaaccgccgaagcctccgccgcggctgccgccgaaggagcctccgaaaccaccgctgccgccaaatccgccgccacgtgatcctccgctccgcggacggccgccgccgatcccgccaaatccaccggggtcacctggtcctctgggccctctcggacctcctggcggtggcggcggcggacggtgccaatggcgccggtaccagccgtatcccggaccatgccagaagaggataggccggaacacatagggtggggaggccaccccataaaaacgtgcccggtagctgttgtagcgcgcccggtcgatggcggagagcaccatcagggccgccaccagaaggaccagcagggagatcacccccatggtccgctcattgacctggtagctccctccccctccggcgttgcccagtccgaagttgtctatatatacctggttcatctccgcaaagaaggacagcacaccctcttcaaagcgctgggcaccgaagttgctggaaagcatcccatccagccgggaagtcacactgctggtcaggatggtggagaagtcgttgcctgtagccacgtaatagagctcgtcatccaccgcagccaccagcagggcgtcgccctggcccaggccgatctgggtcccctggtcgtaagcatagctttcgatgtcctgcccatccaggctgtccaccatcagtacggcgatcagactgttgtaccgatagtcccagttggcgttatagaggctgatctgctcctctgcggaggaggacagcaccccggcctgatctgagatccaggtgtcatactccgacgtggacagggaggtgtccagcgcgccggaggcactgttggatgtgtctgtgggcagtccggggacgggagcccgcagctgacccacgccgatagccgccacgaccatgatcacagtcagcgctatggccacccaagtctttttcaaaaagttcatcatttcacctcacgcagcgggacaggaccgccggcctcagcctctcagctccagcagcttctgcttcagctcgccctcaatgcggcccagctccagctcggcctccttccgcttctgactgccctcctgctggatcttcatcacctcgtccagggtggaaatcagctgctggttggtgtgctggagggtctggatatccaccacggagcgctcagattcccgggcggtctcgatagtgcccatcttcagcaggtccgcgttcttctggagcagctggttggtcatgtcggtaactgcggactgggcggccgtggcctggcggctgtgctccagccccagggccagcaccatctggctcttccacagggggatggtgttgaccagggaggactggatcttctccagcatcagggtgtcgttgttctggatcagccgagtctgagggcccatctggatggagatcatccgggtgagctccaaatcgtggagcttcttctcaaagcggttacacaggttggcatagtcgttgtatttctgtgcgtcctcctgggccccggtctcggcggccttcttcttcagctcctccaagtcgtgggcccggacatgctccagccgctttttccccgcgatgatatacatagtcagctctttgtagtatttggtgttgaggtcatacatctggtccaacatggcgatgtccttcatcagcaccacctggtggttctccagcacccgcacgatcttgtccacgttgacctcggccttggcgtagctcgtcttcatggcctccagtttatcccgcttctttttgaagaagcccaggaagccgccctcgtcttcctccttgccgaagcccttcagctccaccactagagaggacagggcctcccctacctcgcccagatccttggtccgcacgttgttcagcgcgttttccgagaagccggcgatgtttttctgggcggcggcgccgtactggagcaccacgctggagtcggtgatatcgatcttctgggagaactcatccaccatcttccgttccgcctccgtgagctggctctcatccagcttgacggcgtgggcgtcccgctccttctgggctgcggcctcgtcagccgggtccgccgccgcgggctccagggtcagggcgggtgcctccggggcggccggtgccgcggccgcagcggtgtccgcctccggcgtcagagtcagctgaggggtcatatccagattgtcgctcattgtcgtttcctcctgtatcgtcacgtttctgatctcattgtcctagatatcacgggacctcggtccccgctttccagaagtcatatcccgtcagcacggccatctccattgccccatgatcagtttctccacctattccacggtctcccccactcttctcggctcacagctccagggtcacgcctccgtctccgtccttcttctggccgcccagcccctcccgctggagcatctgctccatgacggtgatatcggtagagatgtccagtgcctcatccccgaacagggcgtccagctgcctgtcaaaagcctgggagatggtagccatcatctgctccaccttcttcttggtggcgtcgatattttcccccgagatgccggccgcatccatacggtcataggcattcaggatcttcagggtggtgggcagatagtaatccagaaaccggcggatctggggcagctttttaggctgcttcaccaccaggtcgatgatcttccgggtgacctcctccagatgatcgatctgggcggatatctcctcgtcctcgatgctgtcgttgaggcggcgcatctcacccaccgcccggtcccgctctttgatgagggcgtcgatctccggatcgccggtacttttaggaggttccttcttctcgggctcctcctgtttgttctcctccggctctccgggcacctcatacaccttattggggaagagtcccttccccacgatgaaggccgccgccgacagcgccccgcacagcaggtaatggaccggctggtacagtgggaacagcagcgcataggccagccagaccgcacccaccagatagatggggaccaccgaccgctttacatgttttgccatatctgaacttcctccacttccgcaggccggccccttccccggtccggcctgcaaagctgccttcatatgtcctgttgtgagatattgtacccccacggagatggggtgtcaaggaaattagccgcaacttccggccgtccaatctgtggtctcaatttttacattctctgcgcccttttctagaaagacgagaaatgccgccccaagtggggcggcatttctctgaaaaaacacacaagaaggaagtgcggggcaaacttaggcgttgtgggacttggagtggctgggggcgacgtactggccgttctccttcttgaccagcttgccctccttgaccagctcgttggggctgtaaatgtcgttgatgttccagcagccgggggtgggcaccacgatgttctccatgggggcctccaccaggaagggcttgccggccttgttggcctcgatggccttctccagggcgggcttgaactcgtcagcggtagagcagcggatggagtccacaccgtaggccttggccacgtcggcccagcaggggctgtaggactccccatcgggagtgtggaacacggtgccgaacttggtcttgtagttggcgttctccagaccggcgatggtgccgaaagcggagttgttcatgaccacccaggtgcaggcgatgcccttctccacggcagtagccatgcaggtggggttgacgccgaagccgccgtcgccggtgagggtcagcacgatcttatcgggggcagccagcttgccgcccaggacggcggaagcgccgaagcccatggtagccagaccggaggagtggtggatggtgccaggaacggtgatgtcgaactcctgggccacgccgttcttgttccagcccacatcggtgaagatgatggcgtcctcggggatgacctccttcacgtccttcaggatgcgctggggagtcatggggaagcggccgtcgttggagatggcctcgttgctggccttgaacgcggccttggcggcagcgatctgctcacgcagctcggggttgctcttgccctcggggcagatcttcttcacttcctccaggatctgggccaggccgatcttcaggtcgccgatggcgccgatctccacagcgtagttgcggccgatctcgttggggtcgatgtcgatctgcaggaaggtggtcttatcgggatcgaaggtgacgccctgataccagctggagctgtcggcctcgccgaagcgggtgcccaggcccaggatcacgtcggcattggtggtcagggagtgggtgaactccaggccccagaagccggtctggccgatcatcagggggtgctggtcggacaggcagccctggccggccagagtgcgggacacagggagatccaggaactcggccagagcggccagctcctcggaggcctgagccagcaggatgccgccgccggcgtggaggacggggttcttggcctccaccagcttcttggcaatggccttggcggcagcggggtccagggcgggcttcatggtcacatggctgtccttgtaggtgcgggcccacagctcctcctccatctcacgggagaacatgtccatgggcacgtccaccaggacggggccgggacggccggcctcagccagacggaacgccttgtccaggatgtagggcagggcctccacatcgtccacacgccagctgcgcttgcacacgggcttgagcatgctgtactggtcaccgtcctcatgcatctggatctcctgatgggggtgacggccgaagtagtagctgggcacatcgcccgcgatgaccaccatggggatggagtccagggaggcgttggccacgccggtgagcacgttggtcaggccggggcccaggtggcacatgaccacggaggccttgtgggtgatgcgggcgtagccgtcagccgcggtggaagccacggcctcatgccgggtgccgatgtactcgatcttcttgctgcgggaaagggcgtccagcatgccgatgacggtgtggccgcacagtccgaacagcttggtgacaccccggcgctccaggtagtctaccaacaggtcagataccagtttcttgctcattgtgtgaaatcctccatatca

SEQ ID NO: 13640 - DNA, 739 bp, Unknown
  gut microbiota DNA sequence
gtctaaggtcaggacaccacttacccagtccgctgtccgcgcccgtttcggccattccatcgctgtttccctccttacgcctgctccttgtaactggcttcaatgtcgatgaagcgcacatacacggcacagatttcgccctttgcgtcatagccgaagtagacgggataatacccgtccccccagccggaggcgaagatgggcagattgcagtccgtatccggcaccgtccagttgagccagtcgccgcagtccccctgatatttggggtgggctttggcgttttcttccagaagatcgcagaacaggtcgttgtaggggtcgatgtccggatcttcctccagccgcttggcccagtaggtcttgaagaccgtctgggtctggatgtccgcaatgcagcccattccggcgtctacgccaaagccaaaataatcgtcctcgcccagttcctcgtccagatcctctttgccggtcatgcccagctcatagcggacaggcctttcccggctgatctccaccttgacgcaggcgtagcggtcgccgtatttctcactgggcaccacgcagatctttaccggataagtcccggcaggaatggtctgtataaagggcggcgtgtcctccagctccaccagcggatcgcaggcgaaaatcgtcccggtggggaaatggacggtaccaatgtccagcacagccacttccctattcccaatcactttctctgtgaaatgagcgtcta

SEQ ID NO: 13641 - DNA, 533 bp, Unknown
  gut microbiota DNA sequence
gctatcttcgggcgcgaccgccacccggcagagtgcgactgccagaaaaccgcccgcgaggaacgggaagccgccgaaaagcggcgcaggcaccttgacaccgtggaagaactgaaacgccggggctttaccgaccccgccatgcgggactggactttcgagaatgacaacggcaggaacccgcaggccgggcttgcccgccggtatgtggagcattgggaggatatgcggacagacaatatcggctgcctgttctggggcggcgtaggaaccgggaaaagctaccttgcgggctgtatcgcaaacgccctcatggagaaagaaatccccgtccacatgacgaactttgccctgatcctcaatgaccttgccgccagctttgaggggcgcaacgagtacatttcccgcctttgccgctatccgctgctgatccttgacgactttggcatggaacgcggcaccgactacgggctggaacaggttttcaatgtgattgacagccgttaccgcagcggcaagccgctgatcgtcac

SEQ ID NO: 13642 - DNA, 810 bp, Unknown
  gut microbiota DNA sequence
caatcaaaatccatccagaccaggtgttttccgcagtggaggcactggaacagatagcattgcagatgcccgccattgacggattcctgaatcattttcttctgttcgtcatcccacatgggatcgtccaacacttcctcgagcacacccagggcccgcagttctctggcacccacatggcccaggtaggcgcagtagtcgccacagtgggcgcgccagtattcctgctgccaaccggagtagccgggagttcggtggatgagctcgtccagcttctctggatcgtctacaccattatccagagagcaatcgtcctggaagcagccgtcatatttccgggctgcttcgccactggagatacactccgggcacagatactcaatatcctccacagcgtaaaaggggcctgtatagaaaatatgggtcgtcttgccgcagcagtcgcagacaacgccgtctgcggattcctcaaaagccccagtttccagagggtttgggtgataccggaaggcgggcaggcccagctgggcctgccgttccttttctttctgcttttcctccggcgttttgggcttggggagagcataatgattgccccagttttccgcatagtccttcagcgtgcccagccgcttgagggtctttttatcggaacgatttccgatttggcagagcagttcgtaggcgtccttcttaaagtccagcaggtcatatacatccaccagcacttccttggcctgctgatcctcactctgctcaagttcttccttgaaggtatatagagcgcggacagtgtctggaccttcattg

SEQ ID NO: 13643 - DNA, 1115 bp, Unknown
  gut microbiota DNA sequence
tatagtaatcaagcacttcgcgagagcgcctttgagaaaaaggcgggcggatttgaagtgtggttatcacaagggaagcgaagctgaggactttgaaatcgactgagaagttcgaaaaaagttcttgacaaagcaagaaagatgtggtaacatatcaaagttgccgaaaggcggcgggcgcacagcgctgcggatgagagaacaaaagagcttgaaaaaactcgaaaaagttcttgacaaagcgaatgagatgtgctaaaatttaaaaccgccgctgaaaagcgagcgggccgcgcaaaaacaagttaaaaagaatttgaaaaaagttcttgacaaacaagtttgagtgtggtaaaattaaaacccgccgatgaacggcgtgcaccttgtaaattaaacaacgtaacgaaaacacgaagcaccagatttggatttggttgttcaaacaagcttgagcttgaaggacgaccgttaaatttctttgaagctggaatgagcttcaataaagtgatttgaagagcctcggctctttagataccattttattgagagtttgatcctggctcaggatgaacgctggcggcgtgcttaacacatgcaagtcgaacggagtgccttagaaagaggattcgtccaattgataaggttacttagtggcggacgggtgagtaacgcgtgaggaacctgcctcggagtggggaataacagaccgaaaggcctgctaataccgcatgatgcagttggaccgcatggtcctgactgccaaagatttatcgctctgagatggcctcgcgtctgattagcttgttggcggggtaatggcccaccaaggcgacgatcagtagccggactgagaggttggccggccacattgggactgagacacggcccagactcctacgggaggcagcagtggggaatattgggcaatgggcgcaagcctgacccagcaacgccgcgtgaaggaagaaggctttcgggttgtaaacttcttttctcagggacgaacaaatgacggtacctgaggaataagccacggctaactacgtgccagcagccgcggtaatacgtaggtggcaagcgttatccggatttactgggtgtaaagggcgtgt

SEQ ID NO: 13644 - DNA, 647 bp, Unknown
  gut microbiota DNA sequence
gaaatgaggatggaacagaaagtaatttacaacggccaaattcttactctgactcacttttgggcaacaggagaaccttgcctgtggatcaccgacccggagcagatcgggatgcccaaaatggagtttgtgggaggccatccggacgaatactgcattttcctgaaaaatctgacggaaacagagttggcacagatcacattcctggacggcgctccactggatgtgagagaagaactgcgataacactgaacagaaaaggagaacccctatggcactacaagataagaaaatcatgcctcctccttggctggcccaccgggagatcgagcgatactccattggctggcgcatgggctatggggaggattacatagaccggttcggccattggcttaacaccctctcccaggaggaacgggcagaataccgcaccctctttcccgaaccggcgacctggaagggctggtgggatgacgaggacagcggtgaagtgctggtacatggtgacttcctggtggaggcgtggcagccggagggccagccaaagtacacccgccagtggctccagcaggagtttgccgcggggagaacgcaaaagctgtgcctgttctggggccatcagcctgcccaggacggcagtatca

SEQ ID NO: 13645 - DNA, 884 bp, Unknown
  gut microbiota DNA sequence
gaagctgaactgtaaacgcattgattttacatatacccccggcgaggaaatcttcaactttcccgaggaatcgggactaccctttatcttcgatgtagaggaagaactgaccggcgatcctgctgccatggatgcggtgggagaaatgctggatgaggcggagaaattggcggagaaggccaaagccgccatcaaagcggcgctggcggacgaggacagccgctaccatagcgttgtgacatttttcatggagttccaccgggacgatgtaggcccggatattgcggcggaactttttccaggaaccgacccatccaagctgtcctttgccgagatggtggactttttgaagctcaagcggttcggcagtctggtggatgacgagatggatcaacaagttttcattatggatctgtccttcaacccggagatcaccgacgagttgatggtaatctactttgacttaaaccaggagattttctgtattacccatgaaagctgatgaaagagaattgcctatggaaaaagcgactgctgttaatacctgcttaggtgttttgaagggacgggactgcatctatctggatcaggtgaaacaggatgctctgaacaatctgacctttacgggggacatcaatggccatctaatctcccagtgcagggacgaaaaaaactggtttccctatacactcacctttcggcaggtgctggcctattttacctgtgaattggacacctatgaaaatatggctgggacggagtatctggatggcagttccttcgatttaattgaggacagcacctggctgaagtctctgccagtgcgggaggactttgacaaaggcatctatcggcactaccggctgtttacatacgatgatgtt

SEQ ID NO: 13646 - DNA, 226 bp, Unknown
  gut microbiota DNA sequence
gaaatgaggatggaacagaaagtaatttacaacggccaaattcttactctgactcacttttgggcaacgggagagccttgcctgtggatcaccgacccggagcagatcgggatgcccaaaatggagtttatgggaggccacccggacgaatactgcattttcctgaaaaatctgacggaaacagaactggcacagatcacatctctggacggcgctccactggatg

SEQ ID NO: 13647 - DNA, 857 bp, Unknown
  gut microbiota DNA sequence
tcctgctcatagtctgccgacagttccatgaaacgctcgtcgctgattttgccgttcacattgtcctcatacagccgcttgataatgcggctcacttcggcaatgcgctcctgcgcctgttcaagctgcttggtggctgcggcggtctttctcttgccgccgatctcgttctgctggataagcagcttcacaaagcggctctcgtgcttggcggcgtattcggtcacttgccggagattggagaggacaccggcggtcaacaggtcggtgcggataaagtgcgccgtacagtcgcgggtgcgcttcttgtagctgccgcagatgtaacagtcctgcttgcggttcttgttctgataccgctgctggtacatcacatggccgcagtcggcgcagaacagcataccagagaacagccccacttcgtcatagcggttcgggcgtttgcgctgcttgcgtaactcctgcacacgctcccatgtttccgtgtcaataatcggctcatggtggttctcaaaaatggcctgcttctcaatgggattttctacgctgtgcttggtcttgtaagagggcttttccgtcttgaagtttaccagacagccggtgtactcccggttttcgaggatatgaacgacggtgttcgtcgcccatttacactcatagccggggtggtagcggcgtgtgctgcctgtcctgcggtattccagcgtccccggcgtggggatttgctgttccgtcagcatacgggcaatcttggtcgggccgttccccgcaaggcaaagctggtaaatctgctggacaaccggcgcggtttcctcgtcaacgatatagttctcgtcctcgtccatgaggtagccata

SEQ ID NO: 13648 - DNA, 711 bp, Unknown
  gut microbiota DNA sequence
cttgccgctggacgcgatatggcaggatagccggtcaatgtaatagtcccatttgccgggcaggtctgctttcagcccgtccagttccgattgcgaaagaaaaacattttcataccggccataggcggcgcgggcgggttgtcccgtatctaactctcgctctctctctttttctatctctttctctatctctatctctggtggacaaatgtccgcttgatatggtggacatttgtccgccccggcctttggcaaggctttctgctcctgcaaagccagccttgcccgccgttttcgctccccctcggtagaggattggccgatcagtagttcaatgttgctcatatacagtgcgccgttctgtaacggctccacaagccccagcttcataaaaatctgcaaggcccgttctacggtgccgacttgctgacgggtaatggtggcaatcatctgcgcggtgtaggggatattttcatcaagctgcaacttcccgccgtttttcagcgatttcaggtacagtttcaagaggatgttggaatagaggataccgtcctgcatactttccagcagcacaatggcgtcctcgtcaaagtaattctctttcagcttgaggtagtagtattttcggttgtctgacatggttcctcctttgggtggatttggggtgtttgtacgcatttagaacgccgtttccgggggaaaaggataaat

SEQ ID NO: 13649 - DNA, 11736 bp, Unknown
  gut microbiota DNA sequence
ccgtgttggcgatgtccctggggtcccggtccaggaaatagacggtgccggtggcgctgaggatctccatattctccggccggaggatgatcccgccgccggtggagatgaccgtcccctccatggccgcggcccggcgggcggcggcggtctcctcccggcggaaggcggcctccccgtcctgggcaaaaatgtccgggatggagcgccccgtcttttccaccaccatggcgtccgtctccaccaggggcatccccagccgctccgccagggccgcccccacgcaggacttcccgctgcccggcatgccgatgagcaccacattggtctttcggaccgtgccagtgccgctgcggtcgatcagctcctgctgccggcggcggctgatggccatgatggtctggaatagctcctttacgtcctcctcctgccggatgtccaccgccaggctggcccgcttggccagcacccggcgctcccgctcccggtccagcacctgcatcccgtgggccagcttgtactcccctaccttgccagtgacctccatccgccggaggaagagccggaccagctgttcgtccagctcgtcgatctcctgtctgtactgttccaaatcgctcatatcgcgtccctctctctgtccaaatcggtcataagtccatcagctggcaggcagccagggcggcggcggcctcgatcacgggcagcgcccgatgcaggatacaggggtcgtgccggccggtgatggtcagctccgcgtcttttcgctggaccagatccaccgtctgctgaggctgggcgatggagggggtgggccggatgcatacctcgaactccaccggcatcccgttggtgatgcccccgttcaccccgccggagtggttggtccgggtcttcactgtgtctccatccatataaaagctgtcgttggcctggctcccccgcagggaggcaaagcccactccgtctccgaagcccaccgccttcaccgcgggcaccgcgaagaggtactgggagaagatgccctccacgttctccccgtagtccggcgcccccaggccggcgggcagaccggtgacggcacagcggatgcacccgcctaccgagtccagctggctcctggcctccagcaccgcctgctcatactgctccggcgtggggtccgggatgcccgccacgttggagatgcgggcggccacctggactcccttctgctccagcagctgcttggccaccgcccctgcaaagaccagcggcgcagtgagccggccggagaaatggcctccgccccggtagtcgttgcacccctgataacgcacatagccggcgtagtccccgtgtcctggacggggcaggtccttcagcttcgcgtagtccctggaacgggtgtcggtatttgcgatcaccgcgcacagcggggtgcccgtggtcctgccctcaaacaggccggagaggatctccggcacatccgcctccttccgggcggtggacaggggacttccccccggggcccggcgggccatctcggcggacacccgctccaggtccagctccagccccgcaggcaccccctccagcaccacaccgatggcggggccgtgggactctccaaagatcacatatcgcatgcttctcgctcctctctctgccgcaggacgcgcccgcccaggctctcatagacctcccagaagtcggggtaggacttggccacgctctccgcgccccggatggtcactgtcccttccgcccgggtggcggccaccgccagcatcatggcgatgcggtggtcgttgtggctgtccgcaacgccccccagcagccgctccacgccgcggatctccagaaaatccgccccatcggtgagctggccgcccagcttgttcagctcctccgggatagccgccaggcggtcacactccttcagccgcagccgccccgcgttgaccagccgggccgtctgcccgggccggagggcggcccgcaccgccagggctggagccaggtccggacactgggcaatgtccagctccacccggcccggcccggccagctgctggaaatagggtacagcacaccggtccccctgggtggagtccgggtccaggccatccaccgtcagcgggctccccagcccggcggcggccagccagaaggcggcctgggagtagtccgcctcctcccccagagtgccgcggccgtactgctggcctccgggcacccggaagccctcgggcagctcctccacccggatgccccggtcccgcagcacctggagagtcatgtccacataccctctggactccagcggggaggtgagccggatgatgctctccccctccagcagaggcagggcaaagagcaggcccgtgacgaactgggaagacacatcccccggcaggggatactccccgggacgcagccggccccggaccgtcagggagtccccctcccggcggtgggtgatccccatcccgtcaaagatccggaagtagggctcctggggccggtccatcagcctcccccgtccccgaaacacgcctccgccccgcagggccagcgccaccgggatcaggaaccgcagtgtggagcccgactctccgcactccagcaccgggagcttcccctccccttcccgcaggctcttcaggcagtcccgggtggcccggatatcctgggaatccgcccggtgggcggggtcgtccaggttctcccccgccagcgcccgggcgatcagcagccggtgggcctggctcttggagggaggcggcgtcaccgcaccggccagcagcccaggctcgatcatcactgtcatatgttccgctccttttctcgctgtgctgcaaaaaaacgggggacacaccgatgaaatcgatgtgtcccccgcatcagcatccagatctgatcacacggagagggccgccgtcccactctgggaccggcacatccattccatctctctgtattttcccagcacgaaatagccggtgctcataaatcgagcccagctgttggtaaaatagaaagatgcagttgtgaggatgtgctgcttcatgtggcacctcactgaaaatcattttttcttagtttaacccgataaagtgaaaattgcaatcgccgtttcatccataattccagattataatcgctaaatttttgtatacatttaacatatttcagatgtttttccccttccggggccgaaagccaggtctccagcacccgatccagagacgtccgcacctgctcctccgtcccagactcccccaccgcgcggatggtatagagcacgctgcctcgggcgtgctccgcctggatggagcaccagctcgccccgctctctgcggtcaccaccggcgtccccgcctccgccgcctccagataggcctgccgcgccagctctgtcccccagcccttgtccgagggcatgtcctccgcccgggtcccgtacagggccgcggataccatcacccggactgctccgtcccgccagcccgactggacgctgacccactccacctggccctcccgtgtgccgtaccactcggccttcacccgcggggcgtcggaggcttccaggggcatgcccgcataggtggcctcctccagccagccgcagtccgccgccgggtccgggatggacggccccagaaaatccgcgcactgcgcccagctgtcaaactcctgggcgcagtggcccggaagtgtgctgctcagcatgcgttccaactcgtccaccgcctcccaggccgtccagttctcctccagtgcgtcgtacaccccctgagagaagccctctgccgggatgggcgccagaacgccgctctccccaccgcatccagccagtaggaaggcgccccccagtgccaggaccgccgctctgattcccttcatctccaccgatcccttcttctctgtggtttggctgtattttaccatatgagatacccccgcaacaagcccgtctttcctggcgaaggcctcccggcatcgtgtcctgcttagtgcgcatggctcccgggccccctctctacgccctgcagcaccgatcatactggactggcgggctttgcgccgccggtcctcttgaaaagccccccccttctccctttacaaaacgcctgcctctggtatatgataatatgacatctacccgtcacaccgggagaacaggaggaccctatggaatacatcatcgtccccatggaccggggccatatcccccagatcgcggcgctggagcgggagtgcttctccacgccctggagcgagaacatgctctcggacgcgctctttgaccccaaggccagcttcattgtcgccgaggacggggagggcggcgtgctgggctacgccggtctccaggtggtgctggacgagggctacatcgacaacatcgccgtggaggaggccgcccgccgtcacggggtgggggatgcccttctggacgtgttctgccgcttcgggcaggcccatctctccttcctgaccctggaggtgcgggcctccaacgcccccgccatcgccctgtaccgcaagcatggctttcaggaggcgggccgccggaaaaactactaccagcagccccgggaggacgccatcatcatgacaagggagtttgaacaccatgaagctgaatgagctctccccccagcagctggcccagctgtaccgtcaggagctgacctccgcctttcccccagaggagctcaagcccctgcgctccatgctctccctcatggagcagggacgctaccaggccctgggcctgtacgacggggaggatctggtcgcctacgccctgatttggctggagccgggctgtccctttgccctgctggactacctgggcaccatggccggcctgcgggaccggggcctgggcggccggatgctggacctgcttgcggagcactacgcccacttccggggcatcttcggggaggcggaggcccctgaaaacggggaccccgccggggagcccctgcgccgcaggcggctggccttctatcagcgcaacggcttccgctacggcgggtacgactgcgccctgttcggcgtccactaccgggccctgatccgtggggcggaggatgtgacggctgaggaactgctccaggtccatcagtccatctatcgccggcacttcccgccggcactctatcagcgcttcatgcagatccccctccggcccggggagcggcccaatccccccggacgctggatggaagaggaaaaggacggtgtttcccaatgaacattctggccattgagtcctcctgcgacgagaccgccgctgcggtggtgcgggacggcaggaccgtgctgtccaactgtgtggcctctcagattgagatgcacactatctacggcggcgtggtgcccgagatcgcctcccgcaaacatgtggaggcagtgagcggtctggcccgggaggccctggagcgggccggcctgagccgggaggaggtggacggtgtggcggtgacctatgccccgggcctgatcggtgcggtgctggtgggggtcaactttgccaagggggccgcgctggccctggaccggcccctgatccctgttcaccatgtgcggggccacatcgccgccaactaccttacccacccggacctggagccccccttcgtctgtctgtgcgtctccggcggcaccaccgccatcgttgatgttcgctcctatacagagatggaggtgctgggcgggacccgggacgacgccgccggggagtgcttcgacaaggtggccagggtgctgggcatcggctatcccggcggtgcccccatggaccgcctggctgacgggggggacgacgccaaatatgagctgccccgggcccacgtccagggggccgagctggacatgtccttctccggcctgaagaccgcctgcctgaacctgatccacaacgcccagcagaagggggatgccctggacctgccctcctttgccgcctctttcggccgggcggtgagcgagagcctggtcccccgggccatggaggcctcccgccggaagggatacggcaggctggcggtggccggaggggtggcggccaaccgccgcatccgggccgacctggaggctgcctgccggcagagcggtgaccgcctcttcctcccggagctcaaatactgcggcgacaacgctgccatgattggctgccaggggtactacgaatttctggccggccgcactgcgggcctggacctgaatgcctatgccactcgggacatctccctgggatgacacctttttgtcattatgtcacctgcgtttcgtttaccggccctccgccgcccgaccctccttccccgccacagtcctacgctccccggttggagagccggagttttccacacaggctgtggataaccctgtggaaaatgtgtataactttccgtaaacaaaaattccatgtctgtattatgtaaaataaaaagccagttggtgcgctgccttatttggctggaaactccggattttttaggcgcctcagagaaggccggagcagggagaagtctcgccctctctgcccggccccttttgaaatacactgggtaatctctgaaaatcccccttgacaaggacggaactttctgatatagtagctgagcaaaacaaagcaggaacggtaccccgtcctcaccccaggccagcgccgaagggtcaacatggatctgctccgccgggtctcccggcggtagtcttcacgtgatgcgggtgcctgttctggcagctgcatttattttttgtcaggaggtgctttcccatcgctaacacaggtcatcaaaccaatgaagagatccgggataaagaggtccgtctgatctctgagtccggcgagcagcttggcctcatgtcctctcaggaggcgctgcgcatggccgaggagcaggggctggatctggtcaagatctctcccaacgctgtcccccccgtatgcaagctgatggattacggcaagttccggttcgagcagaccaagcgcgagaaggaagcccgcaagaatcagcgcgtggtagagatcaaggagatccggatgtctcccagcatcgacgtcaacgatttcaacgtcaagctccgcaacgcgcagaaattcctggccgacggcaaccggtgcaaaatcaccgtgcgcttccgcggccgggagatggcccacaccaacatcggtcaggacctgcttctgaagtttgccgaggagtgcggcgagatcgccgtgatggacaagagccccaagctggaggggcggcacatgtccattttcctctcccccaaacccgccaaggacgcgaaaaagtaagtaaaggagttctctgttatgccgaagatcaagatcaagacccacagcggcgccaagaagcgtttttccctcaccaagaccggcaaggtcaagcgcgccatgaccaagaagcgtcacctgctcaacggccacggcaagaccaccaagctcaagcgggctctgcgcggcaccacctacgccgacaagaccaacgaggccgccatcaagcgcatgatcctgtacaagtaagatagagggaggaacagacaaatggcacgtgtaaaaggcgcgatgatgacgcgcaagagaagaaataagatcctcaagatggccaagggctactggggttccaagtccaagcacttcaagatggccaaccaggccgtgatgaagtccctgacctatgcttataccggccgccggctgaagaagcgcgacttccgtcagctgtggatcacccggatcaacgccgcctgtaagctgaacggcatgaattactccaccttcatgaacggactgaagaaggccggtatcgccatcaaccgtaagatgctggctgagatggccgtcaatgacaaggccgcgttcacccagctgaccgagaccgccaagaaggccctcgcctgatcggtgcggccagaatctaaaagatcccggcagagacatggtctctgccgggatctctgcatttatttcgccatcaggtccaccagattgatccgatccttcacgtcctgggagatgtccgcatggtccttgatgtgtcggagcacctccatcgtcaggccgtaggagtcctccaggctccggtccagctccatggggccgttggtcatgtcaaagatcaccggcagcgcgctgaggaagctgaagcggttcacccgcgctcccttgaagtcctcccagggatagaaccgggccgtctgtccgcgattcatccgcaggcccttctccgtcacctcataccagtagttctcgttaaaacgccggagaaacttattggtgcaccagacagccaggatgccgatggaaccgaagatggccagcagaggcccgccggtcagactggggatccattcgccaagcagccagtcatagacaaagtaggcgaccaccaggaccgagatctccgccaggatgcccatggtcagcaccttttggaaccgcttccccatccgatattttttgctcatgtaagtgtccctcccgcccgccttccgcgagcctcttctctccggtggcccgggccgccggggggcgcggcgggaaagccgtggacgcgcccctttcatttgtgatatatcataccagcttctccgccggagcgcaaccgttcttttggaactatgtcaaaaaattcacatttcattcacaggcacgtgcgctcatccgcagggctgttccgccggagccggggcatccagccgctccagcaccgagaccgacacctcaaaggccgtccgctcctcgctggtctcccccaggcgcttggtatacacccggctctggaggcggccctccagctccacccgattgccgggagccagctccgcgcatcttctggccagggagccccaggcgatgcaggggagatagtccgtccgcccgtaccgccggttcaccgccagcatcagatcacagatgtcccggcccagcggggtcctgcggtacaccggtaccttgcacagagtgcccgtcagccgcaggcggttctcctcctcccccggttcccggtgcatctgtctggcgtagaccgagatcaccagccggctgcccaccccgctcctgttgttgaaggagcggacctccccctctacggacagctcctctccctccgtcagcgggcagcgctccagcagggcggccgaggccaccacattgacccggtcctccgctccggacagccggcacaccgccagggggaatttcaggtaggactccccgtggtttgtatgggagggcacgggggcctgacacacccgcccgtggaggacgatccgattttcattccattcagtctgcattgcggcaacacccctatcgtttgttgctcccaatgtatgcgtccctggcggctggtatgtcccctttttctggtgaggcctctataggaggcgaaggacctcccggcctgggccgggaggtcctttcagcttgcggaaaagcctcgcagagttcgcgcccgcaggcggtcaaaccctgggcgcggttgactgaagctttctcaaaaatgtggcaaagccgctttttcgacagtctcctttttccttcaccggggatcgggggccgcctccttccgagggcggttctttcgatacaggaggtccagccccttcagctggaggtcccgctccagggcgatctcatgccggcacagggggaccacgaaccgtgccactcccccggtggccaccacggtagtgggccggcccagctccgcctccatccggtcaataaggccgtccaccatggccgcggcgccgaacatcaggccgctctgcatgcactccacagtgttcttcccaatggcccgccggggccgttccagctggatgcccggcaggagggaggcccggctggacagggcctctgcggagatgcgcaggcctggcagcacagccccgcccaggaaggcgttcccgtcgtcgatgaccgcgatggtggtggccgtccccatgtccaccacggtgaggggggtggggtaggcgtccaccgccgccaccgccgccgcgatcaggtccgccccggtggcccccgggtcctccagcaggatgttgatcccggtcttgatgccagggcctaccaccatgggctccttccccgtcagcttcacgatgccgttgcggacggagttgaacaccggcggcaccaccgacgccacgatgcagtcccggatctcctccaccctggcgccgaagagatccagcatgtccttgatctccaccccatactcgtccgaggtcttggtggcgtcagtggccaggcgggcctcaaagaggatctccccctcctggatcccccccagggtgatgttgctgttcccaatatcaatggccagaagcatgtctcccactccatcccggccccggaccgggaccgcagttttcttgctccattataccgaaacgggccgcggattgcaacccgcggccccttcctcagccctcgtgctcgatctgctcctggagcatcttcagctcccccagggtggacaccgacagtccgctctccagcagccggagctggaccttgccagacatagtgttccagtaggtgagcaggtcgcggtcctcccccaccacgtcctggggtcggcggaaatactgcttcatagtcatcctcctccgcccacagtgtcccccgccggccccattcctatgcggaaaaggcccggacagaagctgtccgggcctttggcctatggggtcatacgtcctgtttgggctcctccggggccgcaggcgccccctcgggagcagcggcctcctctgccggggtctccgggacctcctgctccgaggcgggctcctcgggggggacatcctccaccaccggctcagcggtgacgctctctgcctcctcctccacacagccctgggccttcagctccgcaatgcgggcgttgttggtctcaatggccgccttagcctggctgatccgtccgcaggcggcggcataggccccctccggggcggcgccccgctccgcgtagtacagccggcccagctccaggtacgccttcttgatggtgtcctcctcgcccatattactggtcttcagcttcgcgatctccgccagctgctttgacttcgccacaccgctctgggccaggtccgtgaccttctcccgcagatcatcaaaagaaaatgccatggtcaaaacctccttcaaatgcttcaaacgcggtccttccgcttggtggcttcattttatactactttcccggccagcgcaaggcaggcagccgcgatttaatctttttttcatattctctgcatcccagtttaagatttccccctgtccgggccctgagttctccccggcccaaaacataccatttttctcctgcaattcggccaaatttcgatatttttccagcggtttaagattttaagccgtacatttgcactaagattaaatgacgaaaaaacggcgcaggctatgctttgaagcagcaggtgaaaggaggcagtgcgctttgaacgtcaaaaaacatctgagtattcgaatggacggggaacttcacgataaattccagtacgtggcggcctatgagggacgctccatgagcggtcaggtcctctatctgcttcggaaatgcgttcaggagcatgaaaaggagtatggaaagatcaccaaagaggatctggaggacccctctgtccagtccacctgacctccgctctcctccggggagggtgtttttaagaagcaagggtgcc

SEQ ID NO: 13650 - DNA, 13804 bp, Unknown
  gut microbiota DNA sequence
gtgaaccagaccatcacccgccaggagatggcggtgatggcgtccaagtttgcggcgcagtataaggacgcggcggtcagcgcctctgcgaacctggccggttacgccgatgccggggagctggacagctgggccagcgaggccatgtcctgggcactgtccagcggtgtgatgcaggcggtggacggcaagctgtcccccaagagcacggtgagccgggccaacacggcgggtgtggccgtgcggctgtatgagctgggcggcgtggatctggacacgatcacggcgctggagaaggactggacccaggcggcccagctgccgctgaccggctggttcacgaagaacatcgatgtggagggtgaccgccaggtgacggtgtacatctccgaggaggcgtccatccgctcctacttcaccgtgatcgcggtgcccaatggtgtggatacccagcagttcctggaggacgaggggtggatcgacctgatggaccagaagggcgaaggcctgttcgtactggagcccggcgcggagggctggggcagcgcggcggaggagaaggcctacatggacgccgccattgccttcctgaagagcggcagaaatgaggctggcatcaacgtgttctccacctttggagagttttatctggcaggctacggcgagggcgccgctcccctggaggcctgggccgctgagaatcctatctttgtcatcagccaggcctttgtaaatgccgcttctgccgggaaagctgttctggaagaggctggttctgcgctttatgacggctctaataccagtggctatgatgctggcttcaagaccgatgcagagttccaggcggtgctgaaagagtgcggaatggagcagatcgcccgtaaggatgtgcctgtacccacctggtttgccggaacctcctctgctgacagcgtagactattggaaagaagccaatgactgcgtttccaatgcagacggggagggcgtatatcgtcaggataaggactcggatgcgatccagactgcttttgccaatgcgcagctccccgccagtgagcggtacggcatttctcaggtgaaggtgagctctgagacccccagcgccgctgagatctatgctttcctgtctgtctacacccgctacgacaacacctttgcatatagcaacgcgctgacctaccgcctggactatacctccgcccgagtggctgcccagcaggcggctaaggccggacaggtgcagaagaccctcagcgacgggacccagatcctggcccaggaggatgtggccattgacggacacggcaccgtccaggtgggcgtgatcgccttcagtgacaacagcggcgacgggctgtgggatccccgggaatatattgcctatgtgcccgatggatttgagggtaaggaactgcctgtgctcgtgctctaccctggcaacagccagactgactccatttttatggattccaccctctggtggcaggtggcggacaaagaggggatcgtgctggctttcgtctgcgagacttatagtgccagccccagcagtgtgtctcacgctgactccgacaagttctataactccctgatggccgtgctggaagagactattgacggcacttatgcggatctggacttcacccggatctacggctccggccagtctgcaggctccatggctacacagggctttgtccgcactaaccccgaattctatgcggctgctgcctccacctctggactggccgtgcctgatggtacttctcagctgcccgagggggctggcggggctatgcccgactttgtcatcactggccagagcgacttggataacctgatgcctgacctgtggggctctgagatggccaatgagtggatcacctacctctttgatgtgaacaacatgcctgacgcgcagattggtactgccgatgatgagcatgagtttatcaacgaccgcaccaaggtctatacttgggagaatagcgacggggtgcccatggtcaagtatggatataccctgctgcgtgcccataactgcagtccctatgagatgcccatcctgtgggatttcatggagcacttcagctttgagaaggccgaggacggcacgatcacccgctattacagcgcctccgcgtttgagagagacgacgcggtgatcctgaaataagaatcaactgtagcagaacgaccgggagccccatggggctcccggtcgttctgcttgcggaaaaagccctgcggagttggcgcccgcaggcgtggaccaaattctgatctggtttccccggcgacatgtgcgtcggagaaaacacttctgcgagatatttccgcctgggtagacgcttcacagctccagggagccggtggcgatgcaggcgccgctcttccggtggaagagcatgatgttgtccccggagacggtcacaggcaccttctccccgatggtgaacagggagctgccgaagatgacgccggtgagcaggaagtcgtccacccgcaccttgatggtggactccatgccggtgggcatggcgccatagatctccccctccaggggactctggtccgcaatatccagaaactccgggcggatgcccagcaccaggtcttggtcggtgagcactggatcgtcctgaagggagtcgtcgtcctccaccaccttggcgatgtggtagcggaaagcctcgtccttattgcccttctccacataggacttctctgccgcgcgcttccgatgggcctcctcccaggccgccgcctgggcggcccggtcccggaaccactggggaaggtccagcggggtgctggggcggaagagtgctttccggccctggaacacggtgagctccaccgcgccgtcggcccgctgcgcccccttggcctccacgaagttgatggaggggttgcctacgaagtcggccacaaacaggttgttgggctggtggtacacagtgaggggggcgtcgtactgctggagcacgccgttttcaatgaggcagatctgggtggccagggtcatggcctccatctggtcgtgggtgacatagacgaaggtagaaccggtctccacgtggaggcgctggagctcatagcgcatctccaggcgcagcttggcgtccaaattggacaggggctcatccatgaacagcaccgaaggctcaggggccagggtgcgggcgatggccacccgctgctgctggccgccggagagctctgcggggtagcggtccataaacatgccgatcttcacgatgcgggccacccggcggacggtgaggtcgatctcctcccgggtgagcttgcgggtctcggtgatcacctggcccccttttaccaggcggaactccccgtccagctcgccgcccgccgcagcggcggactgcctggcggcctccaccctgccccggagggaggcgatctctccagacaggtcgggggactgctccaggcggtaggagaggagctgcttggcggtgtagatggagatggtgaatgtgtccaccagcttcagctgggccttcttctggtccagcctgccgtccttgtcccggcactcctccagcacccggaccacctcggcgggctgctccaggatctccgctaaacgggcggcgttcttggcttcgaagtcgaccttgggcaggggctccttgatgtttttcaggccgaaggagatgttctcatagacagtcatattgggccacagggcgtagttttgaaagagaaagcccactttgcgcttgttggccgggatgttgatgcccagggcgctgtcaaagaccacctggtcgccgatggtgatgcggccgctggtgggggtctccagaccggcgatcatccgcagggtggtggtcttgccgcagccggaggggcccagcagagtgacgaaggcgttgtcctggatgaccagatccaggtcatccacggcgtagaacttgccccagcgcttggtcacatgttctaatttgatctcaggcatggtttaacctcctattccctcgtccagactggctccggtgaccttgttgaccacggtgttgaacaccaggatggtgatgatcaggatcaggttgatgccgctggagaaggcgtatagacccatctcgtcgaagtagtccagggtggtggacaggatgaagccctgggtgcacagcagcatgaacagggacagctcccgcaggcaggtcatgaaggggagcatatagccgctgatgatggaggacttctggatggggatgatgatgcgggtcatccgcttgacccagggcacatcctggatgatagcggcctcctcgatctcgccggacagctggagcatggagttgagggagctgcggctggcgaaggggatgtacttgatggtgcctacgatgatgagcagagtataggtattgaagaggttgacgtgctcattggaaaacaggacgaagaaggccgcccccacggcgatggagggcatgaggtagggaaggaaggccatggagttcacatagctggccgccttacttcgccggttcttggacacggcgtagccgatgagggtgccgatggtgcccgccagcagggcacaggccacgctgaccagcagggtgcccttgaatgcgttccagatagtgtcgttgtggaggatgcctttctgtccgtacatgccgttttcggtgatgttctcatcggtgacccaccacttggtggtcaggttgtccgggtccccggtgtataggaaggagtagtcccccggattggggaggaaggtctcgaaggcgaaggagacgatggggaagatgctggtgaagaaggtgaccaccaccagtaccagggcgataatgtacttgcccgcccggcccaggttgatcttggagatctgccccgacttgccggtgacggtggtgtagttctttcggctgtggagggacatctggttgaggagcatgatggccacgccaaagatcatcatgatgatggccaggatgctggcctcgccggtgtacttggagttcatggacacgtacttggtggacagagtggtcaggcccaggtagtggggcacggggtaggagcccatggagctgccgaagaccagcaggatggtggacagaatggccggcttcaccataggcagggtgatcttgcacatggtcttccacttgggggtgtccagaatggtggctgcctcctccaggttggcgtccatgttgcggaagatgcccccgatgaggatataggcgaagggggcgtagtgcaggcccagcaccaccaggctgggaaagaggcccttgcaccaccacaggggcatctggatgcctgcggtagcggccagcaggccgttggaggtgccggtgacggcgttggagttgaacaggttctgccacaccacagccagggtccattggggcatgatgtaggggaagatgaagatggagctgaggtatttccgccaggccaggttggtgcgggtgaccaggaaggcgaacactccgccgaagaggatggacaccaagcaggtgcccacggccagatagatggtgttcagcaggggggtccacaggttggtcttggccaaggtgctggtgaacaggtcgatgtagttcaccagggtatagccggcggtctggccggtgagatgggcatcgatggtgccggggtggatcttgaaggtgtcctccacaatggccacgatgggggcgatggtggtgatggtcaccacgatgcccatcagcagcaggatcacgttgtgaggcttggacaggaaggtcctgagcctgttccagaggatggcggaccgtgcggcgccgggggtcgtggtttggttcatatgcggcactcctctcatgcgggaatggaggggcgcccttggaggcaactcggctccaagggcgccctgctctgcgtttcgtcaaaaccggcgctcagcgcccagaggtccggtgacgccggggatggggctcagccggcgctgtacttgtccagcatctcgatccagctgcccacggtgaaggagacggaggcgcagtactcggggtcctccaggaccagcttgccctcgttggtccaccagtcgtagccgtggtcgttcagggcggcgtactccacggtggtgccgtcctcggccatgccgccggtctcgtggtgatagatggcctcgttttccgcagccacctcgggattagaggagtagccgccgatgtccttgccccaggcggagaagccgtcggcggtgcaggtcatgtaggcgatgaaggcgcaggcagtccagggcagagggctgttgtcggtgacgaacagatagtggcagtagccgaaaccgcccattccggtgtagccgtcgttataggccgccacggtgatgttgttcttggagacggaggcggactcctccacgctgcgcagcttggagtagacgatcaggccgaactggtcagtggcggactggtccaccaaggtgttgcagatggggccgtcgtcagtctgggcattgtagctgcccacccacagcttgatccaggccagggcgtatttgccgttctcccccaggcccaggctctcggcctcggaggccatctcgttgatggtgggctggaagtaggcctgttcctcggcggacagggcatcgaaggcctccttcagcatggcggcgtagtcatcccgggtgagcatatacaggaagttcttacccacgatttcagagtcgatgtccataaacaggccgtgctcgccctcggccacgaaatcccagcagttgtcataggatttggaaccggtgttgttgtacatgaagatcttgttcagagtctgaaggggcagatagccctggtactcctcgggggtggtgccgttggcctccgcccagtccttggggatgaaggtgtccagaatgccggtctggaccatcttggactcgatctggttgccgtcctggatcagggtcatggcaaaggtgccggtgtccttcagggagtcggcggtgagctgatcgaagatcttgttgttcttgggctgctgccactcgaactccatggtgtagcttgggtcgatggactgcagatactcgatgaacaggggcagggcactcttgccgcggctggagttgcccacgcccaggaaggtcttgccgttggactcctcgatggccttctgggccagttcctccagggtcatcccctgggcctcctggatgatctgctgggtgggtgtcagatcggcggagggctggggctggggttcgctgccggcaggggcggagctgccggcgctggtccccgcagagctgccgccgccctgggtcccgccgccaccgccgcaggctgccagggagaagctgagggcacaggccaggagcaatgaaatggtacgtttcattttggttcctccttcatcatttttcataaaattgaacctgatatcccaggtcctgtgtgcaattttattgtatcgcctccgtgatggaaaaaacaggggacaaatctgcgcttttttgttatcttctgcaatttctgtggaaattggatgaaaagaggagggggggtgtgatataattatgcaaaacaccaaactgagcacaaaacaggcgaggggggagcggaatgagaggacggctggcagcgctggccctgacattggggctgctcctgaccgggtgcgcggccggggagagggcctccgcatcggagttcgccccggaggagggggagcggctggtggtgtacacctcccacaaggaggaggtctactggcccatcatccaggagttcgaggcgcgcaccggcatctgggtggaggtggaggcggggggcaccagcgagctgctggcccgcctgcgccgggaggcggacgccccggcagcggatgtgatgttcggcggcggcgtggacagcctggaggcatatcaggactgcttctccccctacttctgtgccggttgggaggggctggacccggccatgcgctcggaggagggactgtggactcccttctccgccctgccggtggtgatcatctacaacaccaaactggtggtcccggggcagatcaccggctggcgggatctgttctctccggcatggcaggggcgcatcgccttctgcgatcccagtgtgtccggctcctccttcaccgggctgatcaccctgctccgggcggtggacggggatacggacgagaccctgatgcgctttgctgtcagcctggacggccggcagctggacagctccggtgcggtgctggactcggtggccggggggacggacctggtggggatcaccctggaagagactgccctgaagcgggcggcggcgggagaggacatcgctctgatctaccccgatgatggcaccagctgcatcccggatggaggcgccctggtgcagggagcgccccacccggagaacgcccggaagttcctagacttcattgcaggcaacgatgtgcagagccggctggagacggagttttccagacgccccgtacgggaaggggtggagagcggcggcgtgctgcggccgctggaggagctcgtcctggtggactatgacctggcctggaccgtggagcaccacgacagcatcctcatgtcctgggctttctatctggggggaggggaggagccgtgaaaaaacgccattccttccgcagaaggctgttcgcggggttcctgctggcctccctgctgccgctgctgctgtgctcggccatgctgctccagatcttccgtctgcggctggacagccagttggaggaggagtcccgggagcagctggaccacgtgataagctccctggacggcctgtaccagggctttcagcagacagccctggcccttcaggcaagcccctatgtggcccctgcactctcccggggacagcgggacagcactaccgtctatagcgagctgtacagcgccaccgagggcagccgtctcagcgcccagttcgacctgtatgaccgggatggggtctggatgtactccaccggcagcggcccggtggagccggtgatgcccacccagtggggcgttctctacgccgcccggcagagcgtcgggctggccttcacacaggtggacggcggggaggggaacagcgcgcccctgtttcggggggcggcccggatcgccggtgaggcgggggaggacgcgggctatctggtcatcaccctgacccgggcggacttccagcgactgctggaggggacctacggcggacagagcgacctgctgctcctcgaccggtactggcggcccgtctacgccagccagaccgccctggccggccgcctggctgtccagctgcgggagcagctgctggcgggggaggagctgggccaggagggggaggagtacgcctatcgggcggcctttcaggaggagatggggctgtacgccgtcctccagcggccccaggcactgaaccgggatacccggggcctgctcaccacggtgacggtgagcagcgccctggtgtgcgtgggcctctccgtgcttatgagcctgcggctgagcaggcagatgttctatcccatcgagcggctccacagcgccatcggcgaggtggtccacaacaacctggacgtctacgtcccaccttatcaagacgacgagctgggggagctggcccagcggttcaacggaatggtggtggccttgaagcgcaaccaggagcagctggtggagaaccagagggagttgaatgaggcccaaatccggatgctccaggcccagctcaacccccacttcctgtgcaacacgctggacaccatgaagtggatcagcaagatcaaccaggtgccccaggtggccctcatgtccaccgacctggcggacatcctgcgcttctgcatctccccggacgagttcgtccccctgcggcgggaggtggagatcctccgccggtacatggagatccagtccatccgcctgtcgggcaagtgccgcctggaggtggacatgcccccggagctggaggagtgccgggtgcccaagatgatcctccagcccctggcggaaaacgccatcctccacggtctggacggggtggaggacggggtgatctgggtccgggtgcgcagtcagggaacccaaaccctgaccatctcggtagaggacaacggccggggactgcccccggaactcatgggaccctataccggccccccggagacctccgggcggggccatctgggactgtataatgtggacaccattctgaaaaagcactacggggaggcgtatggcctccgcctcggctcccggcccggcggaccgggagcggcggtgaccgcctcgctgcccctgcggaaggaggaagagatatgctgaaggtactggtggtagaggatgaggagatgatacggaaggggatcgtcctggctgtggactgggccgcgctggactgtgtggtggtgggggaggctgctgacggcctccaggccctgaaggctgtggagcggtacgacccctccctcatcatcactgacctgaagatgcccaatatggacggcattcagatgatggaagcactgcgggcccggggcagccgggcctatgtgatcattctcaccgcctacgacagcttcacctatgcccggagcgccctgcgcctgggagcggtggacttcctgttgaagcccttccacgacggggaactggaggcggcggtgatcaagctgcgccgccgtatagaggcggaagggagcgggaccgcccccgccctgccggagcggaagaagggggacaagagcaagtatgtcctccaggcgatggattacatcggccagcactacggggaccagaacatctctgtgggggagatcgcccagtacctggggctgagcgagagccatttgagccacctgttccgtaaggagaccgactacaccctgctcaactacctcacccgctaccgcatccacaaggctatggagctgctgcgggactgccgcaccaaggtgtatgaggtggccgagcgggtgggctatcgggacatcacttatttctctgccacatttaaaaaagtgacgggcatgagcccgtcggaatttcaggatacctgccgctaggaggctgtgagacatggtgagaggcttggtctttgatttggacggggtgctggtccataccgatgagctccactaccgggcctggaaggccctggccggccggctcggcctccccttcactcgggaacagggggaccgctgccggggtgtctctcggatggggagcctggagattttgctggagggcagcaatcggtcctatacggagcgggagaagctgcggatggcggaggaaaagaatgactgctaccgggcccagctccaggagctgacccctggcgatgtgccggagaggacggtggagaccctgagggagctgcgccgccggggctatcggctgggcctggcctccagcagcaaaaacgccggggtgatcctgacacgcaccggcttggacgccctcctggaccgggtggtggacgggaaccagatcacccgctctaagccggacccggaggtattcctgcgggccgcccggctgctggagctcccgcccgaggactgcgcaggggtggacgacgccctggcgggggtggagtcggcacggaccgccggcatgaccgcagctgccataggtcccgccgccttggcaggggcgggggactggaatctggaatgcctctcccggttgctggacctgtgcccgcctctggaaggggggcgggacctgtgatccggctcatcgcctgcgacatcgatgggaccctgctccgggggacacagcgggagatcagccctgctgtattccgggaggtggtccgtctggggaaacagggggtccgcttctgcccggccagcgggcggcagtaccacagcctgcgggggctgttcgcccccatagcttcccggctgcactatgtgtgcgagaacggggcggtggtgttcggaccaggcgacccgggaccgatattggccaaggagaccatggagagggaacaggccctggagctgtgccgggagatcctggatatggatgggtgcgaggtgttgatctccggggccggtatcagttatctgtgccccaaggaaggggacatcgtggaccatgtgcgctattttgtgggcaaccgcaccgccctggtggaccgcccggaggagatcacggaggatatagtgaaggtgtccgcctactgccgccggggggccgcggaggcggagcccgttctggcaccccggtggcggaggatttggcgggtggcggtggcgggagagaagtggctggactttaccgcggcggacaagggaaagggggtgcgggccctgtgcagggctctggggatcgggccggagcaggtgctggcggtgggggacaattacaacgacgtgcccatgctggagctggcgggagagccctggatcatggagggggcggacccggagcttctgcgccgcttcccccggcactgtgcccgggtggagggtgtgctggagcagatcggacagcggatggagagctgagcgggaggttcctgctccatatggaaaatcaagagccccctgcgcccgtctgaatattccagacgggcgcagggggggctcccccgtgcggtcaatcggagatctttttcaagtcgtagggagtggtttggtagacataataattgagccagttggtatagaagagctgggcggcggaacgccagcggacgacaggggggcgggaggggtcgtcctgagcgaagtagttttccggtacggcgatatccagccccttgttgacatcccggaaatattcgttggccagggtgtccgggtcatactccgggtgtccggtgataaagaagcgccgattgtctgaactcttgacggcaaagactccggcctgctctgagatggccagcagctccagctcagggacccgctggatatcctccaagcggttctcggtataacgggagtgggggatgtagaagatatcgtcaaatccccggaacagcggtgactgggtgcgcaccaccctatgggggaagacgccgaagagctttttgcccagatcatatttggggatctggtagtggtaatacagcccggcctgggccccccagcagatgtggagcgtggagtggacatgagttttggtccattccatgatctggcagagctcatcccagtagtccacgtcggtgaaatccaaattctccaccggtgctccggtgatgatcatgccgtcatacttcttatccttgatctgatggaaggtcgtataaaaggaagacaggtgctcggcgtcagtattttgggaaatgtggctcagggtgtggagcagttctacctggacctggagcggagagttggagagcttgcgcagcagctgggtctcggtgacgatcttagtgggcatcagattcaggataagcaggttcagcgggcggatgtcctgatggatggcgcggtattcagtcatgacaaagatgttctctccctccagaatggcccgggcgggcagagagtcggggattcggatcggcacagaaaggcccccttttattatagtagcagagataaaataagggtatcacaaggagtgtcgttgtgcaagaaggaattagacagatagatgtccactgaaggcggacacattcttttatagagaacaaaactggactgctcgacagagaaaagcaaaaaaagtcgaaaaaaagaaaattaagtgttgacaactgaggaagtgtttggtatagtaatcaagcacttcgcgagagcgcctttgagaaaaaggcgggcggatttgaagtgtggttatc

SEQ ID NO: 13651 - DNA, 896 bp, Unknown
  gut microbiota DNA sequence
agaaaggcagggcaacgcaagatatagaattatttacaaaatattcatcaatatatggaataggtctggtaatatatcgttgccctgccataaatgaaacatgaaaaaccaagaagcaaagtaagccgccgttttcagcggcacacaaggaggaaccccggacggtatttaagataccgcccacatgtgacgggcatgggaaagcggttgctgtacgctgtcccggcaagtgccccaggattgacgggggaatacggctccatttccgtattccaatgtaacattgaattatcgtgagcgggctttgcgcgccggaggtggatagtaaacactattattcacccaaggcgtatttcacgataaggaggtggccgctatggtaagtagtcttttcctgttacggcgataccatagaccccagcgacacgaccccaggcgcaccacctccggcggcaaacccatctaaaccgaaatctgtaatccgaggatacagctttggcagttcagacgccaaagcaaggcccagattatagacttgaattgtccaagctggtgaacggatatttagccgtgctggaatggagtcccgcacggctggcgaaaatgtccgggcagtccaaagcgaccatcagcagaataacgagttacgacacagaaaggaacccctactaccggccggagttaaggacgatacaggccattgcccaggcgctggaactcacattagagcagcggcgggagctgttttatacagcgttcccggagttctatgtgtgggacgaggcggcggagcatggctacaccgtagacgaaaccaacgacctgctgcacggcaggggcctcccccttctgacatctgacaagtgaatgaccgattaaaagccgacgccctatac

SEQ ID NO: 13652 - DNA, 221 bp, Unknown
  gut microbiota DNA sequence
ttcatactgtgcgactttttcaggtctgctggtgctgcatggacacgatctggcagtccgagcagaactccacatagagcgtgccctccgcacagtcaaacaccgtatcccactggatctgtgccagatacttcataggcttcccacagtggggacaagtggcatattctgcatcctgcacccagttgccaaagccgccgatggtattcacatcctgacag

SEQ ID NO: 13653 - DNA, 31448 bp, Unknown
  gut microbiota DNA sequence
gctggacggccggcccctgctcagcggggggcgggaccgggtattcctgttgtatgatcagcgcatcaacctgtaccgcaaatatgcccggtacaccgtccccagcaccacggtggatgagacggtggactccgtcctggccctggtgcggcggggccaggacgtgcgctgaccgagaaggagcgccgccgtgtcccgccgcccggagaggggcgggagaccggcgtgggaaagtgaggctgacatcatgatggaaaaaacggagcagggcctgggcaggctgtgcgtcatcggtgacccggtggagcactccaaatcgcccctgatccagaacgcgatgatcgcgaagctgggcatcccttatcactacaccaagcgcctggtccaccagggggatacccaggagtggctggataccgcctgccgggagggcttcgcgggctttaacgccaccatgccccacaaggtggccctggtcccactgatggatgagctgggggaggatgcccggctgtacggcgcggtcaacaccgtgtgcatccggggaaagcggtgcatcggccacaacaccgacgggatgggtttctaccaggctctcaccgacctgggggtggaggtgccgggccgccgcatcaccctgctgggcgcggggggcgcggccaaggctgtggccctgaagctggtgcagcagggggcgggccccatcaccgtgtgcaaccggaccccccagaaggcggaggccctgtgcaatctggcaaagggccggatggggcacatcggtttcgcccttgaggacctgcgccggggcgccagggactgcgacatcctcatcaactgcaccagtctgggcatgacagggacgaacagccagttccgggacctgagcttcctggacgaactgcccgggcacgcggcggtgttcgacctcatttacagcccggccgagaccgagctgctgcggcaggcccggctgcgggggctgaaagcggccaacggcctggggatgctgatctatcaggcggtcttcgccctggagtatttcgccggcgtaaggatcaacgccaaggagatggaacagcacgtgatcgaggcctgcggcctgggcggagaggcataaaaacggtccccgcggaaaagaaaccccttttccgcggggaccgttctctttggggcgtcggtccttccagccagttacgggaacacagacaaaataaaacgagaaaatcataatgaggccggttgcgccgggataacctatgtggtaggataaaagagcagaaggattttccatacgaaagaaggtttatgatatgcattgtgtgcggaacgtgacagaggatctgatctggatcggcggcaacgaccggcagagcccccgctttgaaagtgaccacccggtccccagggggatgtcctacaactcctacctgctgctggatgagaagacggtgctcttcgacacggtggaccgggcggtccagcaccagttcttcgagaacctggagcacgccctccagggccggaggctggactatgtattcgtccaccacatggagcccgaccacgccgctaccctgggcgacctgctggtccgctaccccgggactaccatcgtctgtaatgggaagtcgatgaacctgctccgccagttccactggagcgcccccaagggggccatgctggtgaaggagggggacaccctgtgcacggggcggcacaccttcaccttttactccgcccccatggtccactggccggaggtaatggtgagctacgatgctgcggaccacatccttttctccgccgatgctttcggcaccttcggcgccctcaacggcgtgctgtttgccgatgaggtggattttgaccgggactggctggacgaggcccgccgctactacaccaacatcgtgggcaagtacggccctcaggtgctggccctgctgaaaaaggtggaggggctggacgtccggatggtctgccccctgcacggtccgatctggcgcagggacctgggctatctgatggacaaatataaaaagtgggcctcctaccagccggaagtgcggggagtgctcattgcctgcgcttccatctacggggggacggagacggcggccggtatcctggcctgccgcctggcggagcggggcatcccggtggagctgtatgacgtgtcggtgacccactgctcctacgtgctgtctgacgcctttaagtacagccatatcgtctttgcctccgccacctataacaacggcatcttcacccccatggaggagctgctgcgggacatcgcccatcacgccctccaggatcggacggtggctctgatccagaacggctcctgggctccagccagcggaaagctgatggcccagatactgggggagatgaagaacatggagctgctggagcagaccgtgacgttgaagtccgccctggctccagggcaggaccaggagctggaggcgctggccgatgccctggccgcctccgtgaggggggagcaggaagcgccggagcaggcggtggcggacgcccccaaggccaagggctttatctgcaagatctgcggcttcatctacgagtcggacaccctgccggaggacttccggtgccccatctgcggccgtccggcctctgattttgagccggtcacctgagagaatgagcgggtcccccaggcggcatcgccgcgccgggggacccgctgctcctctggggatacctccggggaaacgccgctggcgttcagagctcagccggccggggtgaccgaggcggcggtgagccccgactccttgggctccgccgagaccacaccggagacctcgcctcccgtgtccaccgtgacggtggaggaatccgcttccccgccggtataggtgtagaccggtccctcctcgccctcgccgtggaccgagcaggtgagggtccagtcctgcacactgccagtgacggtcaggtccagtacggtgctctcactctgctgctgaaaggtgtagtgcccatcctgggccagggcgtctgtgatgtccgtctcctccccgtccagaaggaggatcgcccggccgtcccggtcctccaggctgacctcaggcatgtggtagatggtgaggtccaccccctcctctgtggtgatgtcctggcggaacacgcccacctgaacggcggtggagatgtggtacaggaactcctggaccggttcggtgttgacagcgcccacggagatgcccagcagggccagggcggcggccaccgcggccacggggcgcagggagtgcgggatatgtctgcggtcattctctttcatcttgatgatctcctccagcttgtcgggatcggcccgcagggccgaaatggtgtcaaggtacgatttgcggtcgaacatgctcaggtccctccccttcctcttcctcagaaagtgtgcggcgcaggcgggcccgggcccgctgcagccaggtctgaacggtggatggctttgcgcggagggcggctgccgtctcgctgacggagcagccctcatagtagtagagatagatggtcaggcggtatttggcgtccaaagccatcacggcctgaaacagctcggactgggccgggtcctggaacacgggggcatcccgccactcatccagggggacggcgtgcctgcgccagaaggagcgcagcagcttccggctctcgttgacggccacccggagcagccagtgcttcatgtgctcctcgctctcaaagggctgccggtgctccagcagccggagcagggtggtctgcatcacatcctcggcgtcggcccggtttttcagggcgtgataggccacgcggtagactgtgtctccataggtccgaacagccgaggtaaaggactcgtctgtcaggggagctcacctcctttgcgggatcttgaaaagcttttcaccaggaatatccccggacacggaaaaatatctcatagggaacaaagaaatttctccagagggggaacttttttaccctttgaccgtctatctcagtgcaaggaaaaatttccgagcgtttgaaagaaaaaggagtgttatgatatgaaacgaaccttctctgctctcgtgataagcggcgccctgctctgcacccttgcggtccccggtatggcagcggaagccgaaggtcagcctggagcttccgccgccgcctctgcacctcaggcccagactctcccggccagcgtgctgtactttggacaagtgacccaggtcgttcgggatgaagcgggcacagtcacccgcctggtcctctcctctgagcgctacggtgagtatatcatgaatatttcttctgatacagtatggatcgacagcgggaaccgcactgcatcagatcccgcggacctgaaggagggggagagcgtctatgtgttccacagccccatttccacccgctcccttccgccccagtccgcagcctatgcggtggtccggaatatccctcaggatatctcctgcgcccagtaccatgtggtggaggagatcacagagggggaggacggcggcctgatcgtcacgacagacaacggcggactgctgatctatctggacggtgatacccagactgtccgttatgcgggcggctctgccgcactggaggacctgaaggcaggagaccggatcatggcctggtatcaggcggtggccctgtcctatcccggacagacccacgctgacggcctgatgctcctgcccagtgagaaggaggaaccgtcctccgttctcccggagaacggcacggcgctggacctggtgctggagggagatatggtcctgcccgttaccggcctcgttgaaaacggcaccgccatggtccccgtggccgctgtggcccaggcgcttggctatcaggtgatctacacccccggcgaagatggagagggtgacaggatcgccgtggagagcgatcagttctctgtccagatgacggtgggagaggaccagatcattggcgtgacgaagatcaagggggcagtggggatgaccgcccctgcggactatgggatggccccctacattgccgcccccggcaccacctgggctcctgcccggctctttgagatgttgggccgcacagtcaccctggagggcgatgccctgtccatccggtgagccggggccccctgaaaaaggagctctggaatatcgagaacgctcagccggcactgtcttttggacagtgccggctgtcgtggatttagaaggcgataccgcccagatcagccgtctctctttttttgcattttcctacggaatgtggtatgctgtttctgccatttcgatccgagaggagtttttcatatggaaaagctgtaccagcaggaccccttcctgacacgcttcactgcccaggtggtgtcctgtgctgctgacaagggtgggtggtctgtggtgctggaccgcacggccttctatcctgaagggggagggcagccctgggacaccggtacgctgaacggcatcccagtcacccaggtccaggagcaggatggagcggtggtccacacctgcgccgcccgcctggagccggggactcaggtggagggggctgtagactgggcgcggcgcttcgacctgatgcagcagcactccggggagcatatcgtctccggcctgatccacagtacctacggctatgacaacgtgggcttccatctgggcagcgacctggtgaccatcgatttcaacgggccgctggaggaggaagacctgcgggacatcgagctgcgggccaaccagtacatctgggaggaccgccccgtatcggtcacctaccccacgacgaaggagctggctgcgctggactatcggagcaaaaaggcgatctctgggcaggtccgcattgtctccttccctggggcggacacctgcgcctgctgcgggacccatgtggcatccgccgggcaggtggggctggtcaagcttctctccgtacagaagttccgggagggcgtgcgggtggagctgctctgcggcggccgggccctgagctatctggatcgggtgctgggccagaaccggcggatctccaatctgctttccgccaagccctttgagacggccggcggggtggagcgcctgctgggggagaatcaggacctgaagacccgcctcgcccgtatggaggaggcacggtttgcccagctggccgatggtctggctggggcgggggatgtgatccttttcgaggaggggctgtcccccgacggactgcgccgcctgtgtgacgcagtcctccaagtctgcggaggccgctgtgcctgcttttccgggggcgatggggaggggtataaatacgccatcggcctgcggggcggagatctgcgctcctttgtgagggaactgaatcaggccctggacggccggggcggaggcaggccggactttgttcagggttcggtccgggccgggaggactgccatagaggagttcctgtccgccgaaaaacagagataaacaaatggtgtacgcctcccggcacagaggtcgggaaaaacggcatactgcctttcgaccatcttgataaggagatcctatggattatactgtctatcagctgctctggctcttcctgttctattccttcctgggctggctggccgaaaccgttctagccgcgctgaaacgccgccgcctcctcaaccgcggcttcctcagcgcccccttctctcccacctatggcctgggggcgctgctttttgccatttttctgcctgaactgcgggaagacccatttttcctcttccttttgggcatgatcctcgccacatttctggagtttgttaccggtgtattcctggagcgcatctttcatcagaaatggtgggactattccggccagcggtttcagtttgaaggacatatctgcctgaaatactctgttatctggggcttgtccgctctgctggccatctttgttctgaatcccatcttccttacattggtgggcctgatccccaggacggcgggagagatcgcactgctggtggtgtatattctgctgggagtggactttgttggctcctgggccgctgtgctccagctccacggcgccctgagcgagcctacccatatctcccgcttcctgagccggcttacccataccctagataccaccgtgacccgacacatccagagacgtatggaaagggcataccccagcctggagcgggaacggctgagcggaaagcaggctccaaaggtcaagccggagcggtttgcccagggatgcggcttttacaagttggccgcgctgttcttcatcggttctttcctgggggatatcaccgaaactatttggtgctgggcagtgttggggaagctgatgagccgcagcagtgtgctctacggccccttctccattgtctgggggctgggctgtgtcctgctcactgcgctgctctacaaatacaaggaccgcagcgaccgatatattttcctggccggcacagtgctggggggcgcatacgagtacagctgctccgtctttactgagttggtgttcggtaccgtcttctgggattacagccatattcccttcaaccttgggggacggatcaatctgctgttttgctttttctggggaattgcggccgtggtatggctgaagggcctctatcccagactctcagcgtggatcgagcggatccccatccgctggggaaaggcgggcacctgggtgcttatcgtctttatggtgtgcaacatcatcatatctgccctggcactggaccgatacacccagcgcagcgccggggacgccccccagactactctggggctcttcctggaccgccattaccccgaccagcggattgagcgggtctaccccaacgccaagatcgtggactgagaggacggccgcctgccccctgagagggagaatgtcccaggataacagcgcccggaagcgggctgaggtccgccccttagggggcggacctctccgtctctccaagcagctgttccagcaccgctacattgccccgcagccgcgggtccgatggagcacaggcgagggcagccctggcctcatccagcgccaaggccctccgcccagtctgaaaaagggcctgacagcgaaggtcgtggggcaagctgccccaggagtccgcctcacagatataggtttttgggcggatagtgatggacagggcacagccggtaaagtagagcactccatcccattcctccatgtcatacagcatcctggctagatccatatacggctcccgcagatggggggcctctgcaatggcacggagataccagtcccgtgctcgggcccggtctccctttcggagccaggacagggcgatataccgcatggaggccgcccgctcatctttccaggtggcggtgggcatggacaggtggtgctccagggtgcggatgcagtcgtcccagcggccccggtacatgtactcccggcccaaatagtgggtgttccggtcatcctccggctcctcctccacggacagttccagcagaggcaagtactgtccccgggactttgtggggtcggggtggtggtccagctgcatcccctctaccgtcacggtggggccggggaccccctcgcccacccatttaaggacctcgtggaccgggtgtatccactgatagccgtacctggcatgggccttttcataccagaagacaaccccctcgctgccgtcagggttgaaactccaagtatagcggtaggtcgcctgtccggcgcccggctgccaggcccgctccagcgcagcccgccatccggggtgaaacacctcatccagatcggtgcacacacagatgtctgtgtcctccgatactaggtccagagagcggttgcgggccacatcgaaccgccaaggagagatgagctctaccgtgacctgagcgccccgctttttaaggcgttccactgtgtcatccgtagaaccggtatccagcaccaccacctgatctgcttcggacatggaatccatccaccggtccacaaactgggattcgtttttacagatcgcatagaccgcgatcctcatgactgtcactcctccttctgagaggcggggtggacggcacatcgtaccatccaccccgctttatgcctcaaggctctgcccgggcagtatcttttgatcagttcagcttttgaatcacgatggcggcctcagtcagggtcacattgttttcggtagaggccagtgtaatggtagccgttccggtcacatttaccagcaccgtggccgccaggttggcgacattggaggtggtggcaatggtggcttggctctcgctgccggggacgggagtcgagttgttctccagctccacacctacagtcccggtgctggtggtgttggacgccaccgcagagtaggagatcaggtaaatccctgactcacccagcgtaaaggtgggggtgctggcagtatgggtaatggcagatccttcttccacctggttggtgtcaaaggaggcgtcatcgccggtggaagccagtgtctgagtccccacattggtggcatacagtgcattcagcgggggaggagagccggcaggtccggtagcgcccgttgcgccggcagggccggtgggaccggtggggccctcagcgccggcggcacccgccgctccagttgcaccggcaggcccagtaggtccagtaggaccggtcggagcgtttatattaggaaaatacaccgcctggaaaaatgcggttttcaaaccgcttcattgtgggagttcatttcaatgtattcttgcacccggcgcagttcgtcggcaaagcggaacacgatgctgatactcccgccctcatagactttaatgtgatccaccagctcaatcaaaacatcccgtgtcagcttgtcgatgttctggaattgccggaacgcaacaaggaatggattttccacatcaacgccattctcaacttcctgcttctcggcctggagccgttcaataacttcttccagagtttcggcttgatgctcataatccgttttcatgtgacggtaatcggagtgggaaatctcgccgtctttccagtcctgatagatggcctgcttgtatcggacgattttagcaagctcccgttccttttgctctatcgcgtccgtcagcttttttgactgactctttaccagcggggcccggttgatccattcaatcgttttggagtagtccaccgcaaggtaaacctgctgctgaatcgcatagagcaccgctgcctccagacggtcatgccggatcgtatgctttgtacagacgccttttgactgatccttataagtacggcaataatagtacactatatcacccactttactccgggtcatggacttcccacaatcggcacatttcagaaaaccgctgaaaagatacagtttattctgctggggccctgtccgggtatctcggagcaaaagctgctgtaccttttcaaatgtctcacggtcgataatcgcctcatgggtattttccacgatataccactcgtccttgggcaccagctcttgaacatgaaccttgtagcttttcatccggtagcgcccttgcaccatgtctccacagtacatacgatttttaaggatagatgtaactgtcatagcacaccacaagggacgcttaaccatgttcatttggggattttggtatttcagccccaaacactcccgcttgtaaagagagggacagggaatcccgtggtcattcaagtggcggacaatggcatttttgctcatgccgtccaggaacatggagaaaatatctcggactacggaggcagcctgttcgtcaatcaccagcgcatttttgtcattggggtcctttatgtagccgtaggcggcaaaggaaccgatatgttctccgttgcgccgcttcatatcaaagacttcccgcaccttatcggaggtttccgcacaatgattttcattcagaactccctggatggggactgcgatactccgcatattttggggctctttgtagctgtccagggactgatgaaaaagggagatgaaacggacgttgtagcggggaaaccaatcatccagatagtacccttgatcgctgtaattacggaaagagcgggcaaggtctttcacaatgacacagttgattcggccccgcttaatgtcagagagcatccgctgaaaatcatcccgttcatcgtcagtcgtgccggaaatcccgtcgtcaacatattcgtcaacaatgaggtattcgtcgccgtcgttaaaagcggcgatatgatcttcaatgatttttcgctggttggtcacgctttcggattcgtcaaaacaccgggcatcctcttttgagagacggatataaattgcgattctccacacccggtatttcggtttgacagtctcaatgatggaacggcttttccgtgccatgttgacctccttccctatcacattacacctatattataccgctaactcaggtgttacacaaggatgtcccaacttctggacaccgtgtccagaggggcaaaaggaggtcaaataccgctttttttacgttgcaggaagctggaaaacgcgtcttgcagaggcggggcactatccagaaactccagcttgacgcatagatcaccaacacgaaaacaatacgggttgcccgtaatccgcaggatttgagccgcccgctgtttgtgtggtatgctgttgtcaaaggttgtgccgcttacgtcaatcaggtcctccctattaacggtctgaatgtcaacacttgataattgctcaatgctcatttgctgctgcaacatagatcatcaccctcccctccagatatatgtcatgctctgcttgtcctatgaggagacgccaaaaggcggtgctagacagcaccgtcttttggcctgccctcactcccggccataggccgggagcggacaggggtattccatttcgatccacgaacggggccgccacgccggggaaagtttgggctgtcacaagacagacaggacccaggcgggcggcccccttggttttgttgtacgctgtatttgccacgcacccccagcgcagggagtattccaggccgccggtggctccggctgtcatagctccacagcaccgccgcctcgccgtcacaagctccatatcactcgtttccgccttgcggcgaaaactcgttcatttcgctgttccggctcttcccaacggatcaatgatccgttgggaacccttttgtgggtggcgcgtaccgcagggctcccccgcaagtccgtgggagggcgtgagcaagtttcattatcccccgcgctgtcctcgcgcccgacttgccaaagccgggtcaaaggttcacgttgatcgctcggtccgctccctgttcacctcctcggagctcccatcctggcgacgcgccttttgtcgctatcacacgggttttgtgcctggaatactgtgtattcagttgttgacgggaggggcttgtccctcctcacctatcaggcggattttctgcgttttcggatgtaccttagaaagaaaaatccaaatattttttcaagccccgcagtcccttgttgatcgcctcccggacgttgcgctcctccacaccctcggccctggcgatctggcccacgctccgccccaggatgaagcgggcgtagacacgccgggcctggacaggcgggaggcggtcaatggcggcgtagagggcggcgtgatcctcgtcccgctccatgatctcctccggggtcagcgggggccgggacacatcggcctcaaaaccggggacggcatccagggaacactcgccatgctcccgcttgcggcgtttataactgtcacagcagcggcccccaatggagagggtcacagcgatttcatccgacacctccagggtgatacgctcggtcaggtggggatagtagttattcagttcgatggttgtcatatgtaacctccatttcgatacagggtgaaaagggacaaatcgaaatggagggtcaggcggggagcggcagccgggggtgccgccccctacctctggacacggtgtccagaggtgccgtccggatagaaaaacgcccggatggtgcaataccattcgggtgctggaaacgacatgattaacttgaaactgacgattttcgcaaccctgggtggagtacgccaatgcggaggtcaggctttttttgacaagtgcccatctacctgtaatcgcatagcggcatcctcctatgtgccgccagcagatataaaaacggcggctttgaaatcaaaaccgccgcgaaaaagcaccttttaggcatgataaatgtctgcccagcagcggttttttcttttctgccgctgggcagataataattttatcaatttattggccgaaatagtacaaatacatatcttccatattgggggattgctgaatagcttctggatatggttgatgttcagaaatcagccgaaccacgctttttccatccatgtgcatgatgttgctgcatgagaatttctgaatcagttccgcttcatcctctgcgtcaacggtgacgctccagactttgccgtccagtccatgcaacagctcactgggctgctttacatccaatatggagccttttttcaacagaatgacctggttggcaatggcctctatatcagagacgatatgggtagacagcagcacgattttttgctgagacaacgcgctgattatcccccgaaatcggatgcgttcttccgggtccagcccggctgtcggttcatccagcaccagaatctccgggtcgcccaagagggcctgtgcaattccaatccgctgcttttgccctccggaaaaccctttgagtttttttcgggccttttcttccagtccaaccataatcagcagatcatccgtttgccgcttcgcctcatactttgaaaggcccttcaatcgtgcaatgtagagcaaaaattgctccgcagtaaagctcgggtagacaccaaaatcctgggggagataccccaacttctttcggaaagcggctcccattacggcaatatcctggccgtccaaaagcacccggcctgtggagggcggcaccaagtcggtcataattttcatcatagtcgttttcccggctccgttgggtcctaacagaccatagacgccgctggacatggttagattgattttttccagcgcgacggtgtcctggaacactttgctgatattttcaaaaacaaggttcatagctccttgcgctccttccttttctgaatcacaaaaaagaatgttaaaccaattaacgccgcataccatacagaccaaaataccggaaaggacccgattgtccgtccccgcaacagttccgtaaaaaagccataccgcaggaaccagaacaggtctggcggtttcaccgcatcgacgttaatgaagtaactgcttgcaaagggaagcccacataggcacatagccacggggtggtttttggataaatcacatatcatggcagacaacgcaaaatacccggctgagccggcgaatgcagccactgtagcttgggtgaaaaagcctgtccagtcatatgacatacccattttgctcccgagcaaacatgagattcctgtgtttcccgcatacagaagcagcacagccgcaacaacagccacttcgccgccaatcagccggttccagaacagtgggaggcgcccataagccgtactgttgatgatgggaaatgttctcagttccatatcgtaagaaaaccggcggatcatcaccagcagtattaaaaatcccattgtgatggagccggtcttgttccaaaagtcagcggccagctcccaaaattgcgggctccggtatcgaaagtccaggtaggtcaatcctgcgcgggcggccagtcccaggccaatcacggcccagtagtatggatttttgaagtattggagacactctgttttcatgtctttgccttacgcctccacagcagccacaaaaccgcaaattcaagaacagtggccagcagaacaaacacaatgggcttccaggcgtttttccactgtcctacccattcaaaccagcgatagctttccaactgcataaatccacaaaagctgagttgaaaaatagctttacagatttggtcggccagtcctctcaaccggccctcaatgacaaactgataacagagtgaggccaaatagataccgccgcagaggaaaatggtaaatgaagtgcgttttgtgagcgtcgcaacaatcagaataaagccggtaaaatacagcgcccccagcagcaggaacccatattgaacgatacagtatgtcaggtttgacagagggacgctctcaaaatgcacacactctgaaacaggtgtaaaggcgtcttggaaaccgatcaaagcgccacgaataccaagggtcacggccccaagtacaaataccacagctgtacaatataggagcgacaatccaacctttgcccgccatgtcagagacgggccgtgcgcggcggtcccaaccagtcccgcagttttttgttccgtctcatagcacatcagccgggacagcccaatcacaagtaaaaaagcggtcaagacgcccacatacctgtgaatatcctgctgaatttgaaaccaacttgagttcattctgagttctcctaaatcagagtaaataaatacggataagagtaaaattgccagcaaataccccacccaaacctcacggaatgaccgctgttttctggcctcactcaacaccagctgcataagaatgcctcctctgttttattttgcagacgcacatactgtataaagccactccaaccgccagaagtgccgcatatacggaggttggcagtaaaattaaaaaatggtcaaacggcagggccagcgcgcaatagctgattccgacccacaaaacaatggcggctaatgacagcccatcctgattctggataaaggcggacaggatcagcagccctatacataggtaagtgctgggaacggccccgcacagcgccagcctgatgaagttttcgcccgctgagtgagataaaagcacagcaagcgcgataaaaacaaacgtcatgtaagcggatatcagcatagcgcggccaaccagcatttcagaataggaaaagggaaatgtttcctccagctcacgcataggctcattggagtagagcacataccggtgaaacaggatcagcatgggcagcgggctgatacaaaatattgttaccattggagaagcgatgtcctttgacatacacacgccgcatagaatcgaaacgaaaaacagggccagcagcaaaagaggattcatctcactctttgctatgttcagcagctgcgataaagcggcctcggattttctctgcggcattgatgcctgcaataaagcgattgttcggttgatctcctgttccatacgttcattcatcgaaagtcctcccaaagaagtttagaaagcgttttctttgcaacagatagccgtgatttgattgtggggagtggcgtgctagtcatttgcgctatttctttacaggtgaattgctgaaaataatgcagaatgattacgttttgctgcatttttggcagctgtaaaatcgccttttccactgtatttgaaatagcaatttgatcttccaatactgatgtcgtcgtgcagaatccagcttccgtttcttgtgtagaatcaaccttttttcgcattctaaaataatccatacacttgttatgcgcgattgtaaaaagccaactgctaaacttattccatatatgaaaacgctcaatattttgcagcacggagacaaacacatcctgggtaatatcgtaagcatcttgttcgtttcctatcactttgcagcaatatctgaaaatttgtgggtaccaacgtcgaactagcatcgatagcgcatctttgtccccgttttttattccgtttattaaatcaaaatcgctgtactccattggatcaccaccttgttctattagtataacgcaatagcagcataaaaaggatgacttcaaattattcaaattttcccatctatcttatttcctgtcaaggatgctgcattatatgaaaaaagctgaaaattaacggagcgcacaaacggcaagcagggcgagtgtcaatacactcgccattttcgccttgcgaaaatgcttgttggggtgcccccaaacccgccggaagcctctggacaccgtgtccagaggcttccctgtctgcggccccgtcgctcaccgctcccgggccttactctcccgcccgccgggcaggtcgaggagatgatcgacgttggccttgaccgccaccgcctcccgcatttcctgttgtgccgcccggtactgcgcgtagagttttttcttccgctccgccagctctcgacgctcctttttcagcgcgtccattttcgggagcttcaccccgtccagaatgtcattgatcgccgcctttgccgcccggtaggaggccagcgcctcctcatgttccgccagatacttcttgccgtaccgggcggccttgtagccgtcgaacacgggccgggtcttggcgtagtccaccacggcccccatcagctttgtggtggaggccagccgctcctccacgccccgcagctctccggccagagcatgggcccggtccaccgctgccgccgtccgctccgccagggcgtcatagtcggtcaggccgttctcctggagaaattggagcgcggcggccatctgtttcagattgtagattttcgcccaccgctcatagccggggcctttgccctgggccatacgctgctgaatgtcaattatcagattgacgcgccggggggccgccgggcggggccgcgcctgggcgggcttgcggacgggtgcccgcccgtcgattaccgcctccacgtcctccgggccgtagctgtcccccagggtggaggcccggaaccgggtggcccggtcctggcctgggagccggaacgagatcaccccgccccggccccgcttcacctggacgcccgccgcctccatccgccggagaaagtcggcaaggtcggcgggccgctccgccagggccccgtcgatgatcccccgtatctgctccttgtaggagggaggccgggccccgcccagccattggccgtaatgcagaaattttcccttgctatggagcttgggatttttgatgatagacaggtcatgctccaggcatacccggtcagacagccgccgcagggcgcgggcggagcctaaaaaatcccggtatttccgggtgcagtcaagggatgtggaattgtagtaaatgtggacgtgagggtgtggccggtccgcgtgggacaccacgaagaaagcgtgttttcccttggtccagcgcatcgccagctcataaccgatgttcagcgcctcctccgggtccaactccccaggagggaatgattggcggatctgatagcacagcacatcggcgtcccgtttctgctcccggcccgtaatggttttgtaccgggccttgctcaaaagaaactcgctgtcagcggtgagggggtcgcactcgtaggagcggatcaggaccccgtccagtgtcttggccgggttctggccgtagtcgaaacggtcagacatagaggccaggatcgacttgcccctgctgatatggtgggcctttagataggtcgttgccgtggagagcaccccctttatagatgtagagaatatccaaagaaacttttgactatttagctattctgtattaaacttatataaactgttggaggtgagttaatgaacgaacggcaattatcacttgacactttttactcttttgtagaagaaaaggtatcagaaagcaataaaatagagtttaagaaattttcgtttcccaatgggaaaataacgccggagcaaaaggaaaaacttgaaaaagagattgcggcatttgcaaatgctgatggcggcacaatttacattggcattgatgaaagcaaagataaagtagccagtcaagtaataggcgttggttgtgggactgacaaatttgatgaaatacaactggcaattcagagtaggctgctcgctaaagtgcatcccagaatatacggaatatccatgcaatgttttcctctttcagataccgatatggtaatgactataactgttcccaagagtatttcacgtccacacgctgtcaatgatggaaacaaagacaatttttatattagacactcaaatggtgttacaaatatgagccttgatgatcttcggcgggagattttgtctagtgtttcatatcaaaatgaaatcaaaaaatttaggcaagatcgtgttggaatgataatatctaacgaatatattcggcatcttcaagatggtgcaaaattggtattacatataattcctttgtggagtttggaatttggaaattccgttgatttatctgcattaaactcttggacaggcagtgatccttttaggcccatgtcaggtggcggctataatactgtattctgtgctgatggtaagtacgcatttagtattccatataattcaaactatgttgaatcttccatactgtttatgcgaacaggaatcgtcgaagtagtcgatgcccgcatgatgaattatagaattgagttaaaagaaacccgtcaatggtgtgaaatagaaaaccttttgaacaggaaacttgctgattattcaaaccttgtagacaagtttgatatacctaagccgtggtatatatcagtttgtattgctaatggtaaaggctattggacaagtagctatggtgaagattcagaaatgttacatagcgactatattcaagcagttgatgttatctggaatgatggacaagcattgagtgatatcatccaaccttgttttgactctttggccaatgcttttggcttttccaaatcgtttatagatttttcgcaaaagcagtagagcttccattttgctcttatcataatccggttctccccacctctggacacggtgtccagagggcagggacagccggggagcggcctgggccgctcccacggttcacatagccaccacctgggccagcttctccagcagctcggacagcggcccccacaggtcggcgtagtccttttggagcgcctggagctcgttgggatacagcccgccataggtgttcacatggagcgccgcctgattgagattgttggcgcaccgccgctggagggacaccagctcccgcaccggggagaggtccacctgaagcacatagccattgagggccatttttcggatataggcgctcatattgcggatgcccgtctgctccatgcgggccttgatcgcttgcagctcctccgggctcacccaaacatagagcggcacattccggcggcgcttcttccccgccacagctacctgtcgccccggtccggggcgtcctttttggggccgggcggggcctgccgctcctgggcctgcctccccgcctcctccatctgccgggagatggagggcttttcccgcttatgttcggcggcggcccgctgccgctccacggtgtccgcccgctgggatagctgctccggggtgacaaactccttgaccacataactcccgaagtcggggtaaaaccacgtcagccgcttggggtcggggatatgcttggcgtcctcccaccggcccactatctcggcctgccgctccatccgcttcttcacgtccgggttgtccctggagggccgcagttcatagtccgccatttctcgctccgtcaagggctgggcataggtcaaatcgccccaggcccggaacgcctcgccctccacctgctcccggcccgtgtagactgtcatgtgaatgggcctgttgaaatagctctgcggataggtcccaatatcaatgggccgctgggtggagtagtatttataggggcccggctggggccgctcctgctccacctcctggacatgatagcggcgctggtagtcctcggcccggttgtgatagtccgcctcggccagttgggggtcgctgtgatagtggccccagtagtagtcccggtggccgccctcctgggtaaactgccatgtcacgaagccctccctggggtgctcccccagggcaaagccccggtcattgtcgaacaggacggactgccggatcacatagccttgattttcttccatgataacctccaaaatgttgacagtatggggccgaaacaggggcgggacgtgaaatgatacggcccgcccctgtccggcgtctggaaagccttgaaaacacgggacttttgagggcctaattgtcaacggttcagccccgctttttcctcatgtggtcccgctgctgctttctgtgcgcggcctgggcgcaggcgggggaacagtagcgccgccgccctcccaggagggcgggccgcccgcagaccgggcaggcccgtgtctccaccggggccggggcggtcagggccgcctccagcgccgggtccaggggcaggaccgccgcccggaagtaccggcacaggggccccgtccaggttttccccagcatataacactcgcagtccaaaggtaagcatcccacgtcccggtcatagttggcgcaccactttaccaccagggcccggatcgccgcccgctcctcgcgggtgagctcccgctggtccatgccgtcacctcccattgtcgggcccggcccggctgcgcagataggcccggaaacaggtcacgcaccgcaggccccgccagtaggggcacccctcgcactccgatcccctggggggcggggtgggctccgggggcaggtggtaggtgggctgcttcataaagggctcgtaggggctgtttgtgaaattcactcgtcccctccctcgtcctcgtcgtccacgtcccaggggggcgcgtcgtcgtagtcgtcgggctcgtcatagtcggcgtggtcctcctccggctccgccgcccgctgctgcttggggcggtaaatcttgaagtaccacccggccccgccgcccagggccagcaccgccagggccgccaggagcatcccggccccgccggacttttggggctccggctccggggccgggtcaggttcgggctccgggtccggttccgtcacagggggcggggcctccggctcctgatcctgctcggccagggccatcaggtcggacacggtgacagcgttcagaaaatacacgttctctgtgctccgctgccggtcgatcaccagatagaacaccgcctcgtccgccgtggtgatggtgaaaaattccttgccgtcctcgtcggtggcgttgtccaccaccgtccccgttccgtccgaggtgaacggctggggctccggcggctgctccacgggcagggggtccaccggctccaggcccacccaggggacgtactcgctgccctcgctctcgccgccgccgccagcgtaggcggggacggtgagtacccccaccatcaggacggcgcagagcgtagacgccagcatccgggatttcttcatcaagtctcctcctttccctcgccgggcttctggacaccgtgtccagagggcccgccccggaactgccggaggagggcgggcagctcgtccagggtcacactcatgccccgcacaatatccacgatctcctcattctcggcctcccggtgcttctgctccagctctttcagccgggcctgctgctcgttgatcttggccttgactttctccatctcagcccaaattttcgcgcttttgctgatcgccattgaaaacctcctttgtcatggtaaacgcccccaggcgtaaaaatgggactgccagtagcttgtattcaagctggtatattgcaccgggtccccacagtggagcatcattccgtcccccacatagataccacagtgggtcacgccgtccgggttgggcgcgtcgtaggtgtagcggaaaaacacaaggtcgccgggccgtggggagctgacgggggtgcagtagttatagagcgcctgggcccccatgcggcccacgtcccacccgctatggccgatcacccaggagacaaagccggaacagtcaaaggacgtggccggggagctgccaccccacacatagggatagcccaggtacttctccgcctcggtgagcatggcggcgaaccgttcatcggacaggtattcctccggcacgtcataagactggggcgggttggtgatgtacttatccacatagccggagccggggaacaggtcgggccggttgcccagggaggacatatagagggaataccgggaaagctggtccccgcccatcataaaagcgggcaggtgggacatatcctcatttttcagcgtcacggtgcagatgtagtaattgtaggagacccaaaccgtgtaggggccgtccggccctgtccgcgtttctggctggtagcgcacctctacctccacattctccgtgaggatatactgccggtcaaaaatggtttgaatcgtcccctctacctcagccagcgtccattccccctcatggaacgcgcagagcatggagatcaaaacgtaggggtcatgctcgatagcgtccaggtcgaagtgatattcgtcgtagtcgtgggtgctggtgtaggtgtccatgtagctttgcagctccgcctccaacgcgcagtaggcggcctcggcccccagcatatccccgtcctgggcggggtaggtgctggccccgatccccccgatgatcccgttgcctatcgtcaccagggaggaggcgcaggactggaccgtgaacaggaggagaacgcagcacagggcgatcaccaccccaaccgggtgccgcttgacgaagcccaccgccttttccgccagcttctccgcagaggcggtggttttttcggcggccttggccccctgcttggcggcctcccgcgcctgtttcgcgtactgccgcttttggcgctgcttctgcgcaaaccgggcgatggcgttcttgcccagctccgggtgtttctccagctccacttgaaagcggtgctccgccgtggccttgacataccggcgttcggcgcgggcggcggccctggccgggtgatcccggatagcctgccgcaccgtccgggccgttttccgccccacggcctcgcccaccaactcggagtggtgggccccctcggtgcccacgttctcatgctccacctcataaattttgccgtggacgaagccgtgaacgccccagcccagggccccggccccgcgtttcaccgggccgggaggcttgggcggggccggggccgccagcttctcctgggccttgcccatgcgcagcttggccttttccgccttgaccgcgctctgctccgcccgcgtctgcccctgggcgctccgcttcttcccctcctgccgcagccgttcggagggccgggcccgttcgctctcctggtggagtttggatttgtggtcagatttgcggggcctctggacacggtgtccagaggcgggccgggccttactcctgcccattggccttgtcctccggcttggtggtcagcagggtatagagctcggtgtcctgggggaagtggtctacaaaggggatggtggtgtccccataaaaaagtagcccctcgccggagccggagtgcgtgacataggagagctggtgggggctgatccccaggtggcttgccagcaccttttgatccccggcggcctgggacagcatatagaggaaatcgcagttgccaaagatggattcaatttcgctgctctccaacaggcttttcacgttttgggtgataccgctggggatggccccccacttgcggaaacggcggaaaatctcgacgctgtatgccgccgtctggggctcggccagcagtacatgaaactcgtcctggtatacccaggtggcccgccgccggtcccggttctccgtcacccggccccatatctggtccgtgaggatcagcagcccgatctttttcagcatcttccccagggccttaatgtcgaagcacagcagccgggaattgacctggacgttggttcggtggttaaagagattgagcgatcccgtacagtacagctccagggcggacgccacccgccgggcctccggctcggactgtttcagcagctcattgtagaggtcctggagaatgggcatacgctccggggccgggtccgccagatagggccggtagatggtccgcacgcagcggtctatcaccgtcttttccaccggggccagcccgctccgtccgcccacgatcagctcacacagggagagaatgaaatcgcttttgagggacagcgggtcctcgtcgtcggcgtagttggggttaatgtccatggggttgatgaacgtgcccgccgtggccgatggcgacagccgcaccacctgcccgcccagccggttcaccagggggtaatattccccctccgggtctgctatgataatgtcgtcgtccgggagggtgaggaacacgttgacgatctcccgcttggcggcgaaactcttgccgctgccgggggtgcccaggaacaggccgttgggatttttcagccgctttcggtctgccatgatgacattgttagaaagggcgttcatgccgtagtagagcgccgccccgtccatgcgcagctcctttgtcataaagggaatgaaaatagcggtgctgctggtggtcatgccccgctgtatctcgatggtgttgtcccccagcaccagggaggaggtaaagccctgctcctgctgccagtccagccgcttcaaggcgcagttgtacttttgggcgatgccggagatggtgaacacgtcgttctccagcttttgccgggtgggggcgatattcaccacagtgaacgtcaggaggaacattcgctcgttccgggactggaggtcggccaggagcgccgccgcgtccttggagtaggtaatgaggtccgggggcaaaatttccatgtcgtacccggcccggaccgcctttttctgctcctccactttcattttgtcaatgtcggagattttgcccttggtcattttgatggccttgagctggtccaccgtctgaacgtggagggtgacggtcatttccgcgtccagctccagcagctccagcagcagtttgtccgacagctcggaggccatgatctgtaagtaggaggccgcgccccaggactggcctacccggaacgtccgggaggcggagaagtcgaagctgtccggggcgatgaagtccttggtccccatgccggttttcacaatgtccggccaggagaagtgaaacggttcccggcctccggggtgcatctgaccgtgaagcacctccagccgctcccgcccgttgagcacacgggaatgggcccccagctttttgaagttgcccataatgtcgctggacacccgctccagccggggacgggccgtttccaggccgtcggcggggacgccgaacgtgatgtacttggagcggacgatcccgttgttgctccgggcgatctgccgtttcagcatatccacatactcgccccggatgctgtcaaagtcgtcgtgggccatggggatattgaccttgtaccggctgcctcccctggagcggtggttgataaaggagagctggaacgggagggcgctgtcaaagtagttgaggaagccgcaccagccgtcaaagatggcggactggtcctcgctggaggctacggaatagttaatatcctcgtaggcgatggttttggtgtagaagccctcccgcacccggcaaataccgtctttcagcatttccacataggggatggtctgctgtgcggagagggagcgtttaccggcccttgcgcttccggcgcttttggttcttgggttcagaagcggacacctcctttccggcgaacggggcatagatattttgcgttcggtagggcctggggccggggcggaggaagcgggcgcggatgatgttccgcaccactttctcaaagggcaggccgtccttttcgtacatcgccatgaggaacgccgggagcatgatccccagcatgaggaacatggccccggtgccgccgacggccccacgggtcagcagatagacggggacgcccaccagcccgccgccgccgaaacagataagttgccgcttggtgaggttgaacgccagcttggttttgaccctggacaggtcattgggtacattcacatagggtatggtcaatcactcctttctggcccccggcctctggacacagtgtccagaggccgggggcattacaaaataaaagagcaaccgctattcacagttgctctttcgtatattagggcttaatcaaaatccaccctacaatatagcatttcatatataacgattttaacacatatgccgccaacatcattatacgacacttgataacgatactgattgtcctgcacatcgttccaaaacataaatgttgctgcctcgccagtatctacattttgaataatatatgcccctgtgcaacttcttgatccgacctcggaaaacaacttcatttctggaatttcttcaaattttttgacggaatcttcggacatattgaaaatgaaattgtatcttacggtcatatcgctatcatcaaagctgatatggtcaaactcaaaaccagcgtgtccttttgccagttttataaggatacgacacaaacggttttcatcaatattgaaataaacctgaccatcctctattttaatctgttcgtcaaggaggtcttttaattttgcgttcctttccagccgtcggactatatcaggtcgttgcgtataattttggtaaacggccgctttaaggacatccagaaaacaagatacatattcttcatcatttgaaaaaccattattacattcaaaacatgctgggagtgttgctaaatcttctggataaggctctataagaaaagcctttgagggtatgtgctcccttgtagttgcaggttttccacaatatatgcagcccttttctctggacttgtcccacgaagtaaagtatcccatgccctcatttcctccaggtcgatttctctgtcccatataatcacccctcggaggaaattatagcacaagaaaatagttattgcactactttaatgcgcccccaggacgctccgggcgatactccccgttttgaacaggcagtagcacagcagcaccgtatagccgatggtgccccatatcgcccctatggggtcgccccccacggcgatactctgaatgagcaccgcgtagatcgccacgcataccagtatcagcatcccctggaagcccacggcgaacagggaacggagatagttctgcccggccccgcccagctcccggtttgccagggtcgccacagggaggggcgctaaactggtgagcatatatatctctatcatccgcccgtagacgatcacgaaaatcacgatattcagcgcggtcatggtgagctgcaccacaaaggactggagccacagccccaccaggggccccaggtccatcccctccagcgtggcctccaggtccgccagcatagacggggaaacgtccgtggagccctggatcagccccgccgactgcgccaccacccgctgggccacgtcgaacaccgccataacgatgttgaacgtgttggacagaatgaggatggcacaggccgttttgaatatccacttgaagaaaatccagtagtccaggtcgtgaagattattccgctccaccagcagttgaatgagttcgtaggtcgcaacaaaggtcaggatcagtccggctatgggcagtatcaccgtttcagaaagccgccggatgagggagaaaaccccggcgttccatgccgccggggtcgtccccacttgtaccgcgatctccccgacacgggcgtttactgtatcaaagagccccgacaggttgtccatgatcccgccgatcagcagctccttcagccagttcgtgatccagtcggtgagaaatcccatgcgccgctgcctttatcagctaaacagcccggacagcagggggatcagggtggtgcccagcaggatgatgccgccgccggccatgagctgcttcattccctggctctttgcttatgtgtgataaagaagcaatagaagtgcaaaaaattttgccgttcctatccgacacttggccattgtgtcggataggtcgggcggttattcgggcaagtcaatcttgccgacaaagctgtaataaatctcaatgtcctgcctgcgggtgccgttctcatcatagctgcactcatgcaccacaattttctcgatcatttcccgcaagagagtgggggtcagttcttcaaaggcaaggtgcttgcggacaatgcccataaatttctcggcgttgacggtagctgcctgtgacttgtccagttcggcttgcagggcggcggctctctttttcagctccgcttgctcggcttcgtagtcagccgacagttccatgaaacgctcatcgctgattttgccgtttacattgtcctcatacagccgcttgataatgcggctgatttcagaaatgcgttcctgcgcctgttcaagctgcttgatggctgcggcggtctttcgcttgccgccgatctcgttctgctggacaagtagtttcacaaaccggctctcatgcttggctgcgtattcggtcacttgccggagatttgccaggacaccagcggtcaacagatcggtgcggataaagtgcgccgtacagttgcgggtgcgcttcttgtagctgccgcagatgtagcagtcctgtttgcggtctttgttctgataccgctgctgatacagcacatggccgcagtcggcgcagaacaaaatcccggagaacagccccacttcatcgtagcggttcgggcgtttgcgctgtttgcgtaactcctgcacccgttcccatgtttccttgtcgatgatcggctcatggtggttctcgaaaatggcctgcttctcgacggggttctctatgctgtgcttgaccttataagaaggcttttccgttttgaagttcaccagacatccggtgtactctcggttttcgaggatatgaacgacggtgttggtcgcccatttgcactcatagcctgggtgataacggcgggtgctgcctgtccgctgatattccagcgtccccggcgtggggatttgctgctccgtcagcatacgggcaatcttggtcgggccgttcccggcaaggcaaagctggtaaatctgctgcaccaccggggcggcttcctcgtctataataaaattctcgtcctcgtccatcacatagccgtaaaccggcttgctggtaacaggcttgccgctcatgccttttgactttttcactgccttgattttcttgctcgtatctctcaccagccattcattgaacagatttcgcagcggggtaaaatcgttgtccatgccctcgctggcactgtccacattatcgttgacagcgataaaacgcacacccttttgagggaacagcatttccgtgtaaaaccctacctgcaagtagtttcgccctaaccggctcatgtccttgacgatgaccgtacccactttcccggcttcaatgtccgcaagcatggcttgaaatccgggccgctggaagttcgcgccggaaaaaccgtcgtcggtgtaccagcgcagattggtaaagccgttctgttttgcgtaggtttcgagtatccttttttggttcgatatggaattactctcgccttgcaattcatcctcgtgggacaatctcggataaagggcggtaatgaggttttgggtggcttgtcttaacataaaatcctccgtttccgacagccagccccactattccgtggtttcattgtaccacggaacggcgggggctgtacagcggcaaaagcgttaaatttgcttctttacagcttttcaattttccgatttttatggtatgggttgtcgtcccatatttgcagtagaaaagttcataactccgtggtatactctgatttaacaaaaaaatcagaagttaaaggagaaaacatgaagtatacaatagatgaattaaccgcggccaaaaggcaaattgattcaactctgcacaagctaagagaaacagtaaaaacatttgaatcaaaggataattccgagcgttataaatcacaaatcacattggcaaagagaagaataaaagcctttgaaattgcaaattattttatagagaatgagattaagaattgctaaagcacttccgattttcgttccagcggtcatgctccctggcatggccgcttttccatgccccggttcacgccggataagtcggctcctgtgtagcagcggcttccgcttccagtacccgcgccattttgtcggcggctgtggttgtggtgtctttcttgaaatagccggacacgacaaggacggaattgcccatgcggatttccgtcacacagtcagggcggcgggtggtgcgggtgtcgtgctgcttgttatctgccataggcaatactcctttcagtcggtaatcagtttctt

SEQ ID NO: 13654 - DNA, 489 bp, Unknown
  gut microbiota DNA sequence
tcacaggtagggtacagctccgccagggcctccacgaagtcggcgtccaggttggcccgctccagagccggaagcgccgccgtcagcatatcggtggctatcacctggtaccgacactcccggaagatccgctctcggtcctcctggcagtcccacatctggctcatcaggaaggcgtcaaagcctttgcccttgaacttttcgcatttcatcaccatcagctgcaccggacatttgccatcctgaaattccgcgatatgatccagtgcggcaaagccggccatctttttatcacgacagaaacactctacagcgccgacgtgcttttccatcacagcggtcatctcatccttgtctggcatgtccaccggctctttgaacagcatttgaatgagataggggccgccgggctgggggccttttttgtcatccagattttgctggaaaacttgattgctcatgcttatccctcgcttctcctgatggcat

SEQ ID NO: 13655 - DNA, 281 bp, Unknown
  gut microbiota DNA sequence
aggacaaagcctatcacagcccggaagctgggggacgattttgacaaggctgctgtccttgccctgctcacgcagaacgcccacagagccgccgaacagaccacagccatacccgaatacccccacacccaaaagggacgcttgcgggaggaaaaagccaaaaaaaccaccccggcagacaacaccttgcagcgcatggttgaccgggaagcaaagcgagccgagggcaagggcgtgggctatgaccgctgggcggcaaagcacaacctaaagcaaatggc

SEQ ID NO: 13656 - DNA, 194 bp, Unknown
  gut microbiota DNA sequence
cccgccgacatcatccagggcatcgaggagcccagcatcaccctgacccaggagctgatgaagcgctgtgacctggtcatcgccaccggcggtcgtcccatggtcaagtccgcatactcctccggcgtgccggcctacggctccggcgccggcaacgcgactgtcatcatcgacaacacctgcaacaccgccga

SEQ ID NO: 13657 - DNA, 29351 bp, Unknown
  gut microbiota DNA sequence
gctggtacggaacccctcccgcacccgccgctcctccccggctccggtattctgggcggtgaagacagagacggcctgggccccgctgtccccgaaggagttggcgaagccctcgatgcgggtagtggcggtgtaggcggagatcatgggggtccccatggagttcaccgccccctggaccagcagcttgccgatgtagaggctggactggtgcagggcggacaccgccccatagctcaccgtccggcggagcaggccccggtccagccgccggtcctcccggcggaacaggagctggggatagcgccgggccagatagagcaggcacagcgccacggagagcagctgggccagcaccgtggcccaggccgccccggcgatgcccatgcccagccgggccacgaacagcagatccagagccagattggcggccatagccgccagcagggccagcagggcggagcgggtgtctcccacagagcgcagggcggcggcgcacaggttgtaaaagaaggtggccagcaggccgccgaagatgaccaccagatagtccgcggccagccgggccacgtcctccggggtctgcatcagggtcagcaggggccgcagcaggagcagggcggccaggctcagcaccagggtgaacaggccgccgaagacagaggccagaaacccctcctgccggaagccggccagatcccggctgccatactgctgggcaaagaggacggagatgcctgtgcagcagccgctgaggagaaaaaggaacaggttcatcaccgtccccgccaccccgatggcggcaaaggcggtctccccagcgaagcggccgatgaccatggcgtctatggtgttgtacagctgctggaggatgttcccaaaaatcagggggagggccagcgacaccagctggggcgggatggagccccgggtcagggcggcggtctccacagcgtgtcacctcgcagtttcatcaggtgagatcaggatagcacagggagaaacagttgtaaaataattgttttctccctataatatataaaaaagttgtattttggggtgagacaggtgacagagctggacaccctgcgggcggagctggtccaggtcgagggcatcgagctgtgctgagggctcagggagccaggtagaactccagggcctcccggaccaccagctggggcatgccggggccggacaggctgtggtccccgccgggcacttggatgagacgggcgccgaaggtctgggcaaagcgccgggccgcctccggcgaggcggtctggtcctcatccccgtggatcatacagacccgctcctccccggagcggtacagttgaaagaggtcgtgggcatccagatccgccaggaaggcaggggtcagcttcagggggcggacgtagccctggtccagcatgaggaagccctgccgcgccagctcctccgcctgctccggcgtgggggtatggaaaagcaggggcatctccaccgccgcgctgcgcaggaaggaccgcgtcccccggtgggggcgggtggacaggtagatcagattcaggtaggccccgaagctggaggagaaatagaccacccgggccccgggggccagctccagggcccgggcctctgcccgggccaggtcgtccaggcagtggcggatgctcagagcgtccccgtccaccgggctgtccccgtgagcggggaggtccagtgccagggtgccgatgccgtgccgggggagctccccggccagcagctgggcggtggggctgtccttgctgctgccgaagccgtgggtgatgaggcagaccatggactcgccgccctggatggtgtgccggcaggggatgttatatccgttgagtccggagagaagttcctgtgtcataagcgctcctttcaaagggcgagggcccctttttctgctgcactgccaaaagctgatttgaaaataccacagcaaaatgaccaggcgggcaaccgacggtcaaactggcagttatcgtttcaaggtatcctgataccattcgtaagtgggtttgataccctcctcttgctcaaagcgttcttccaatgctccgtaaaaatataactccagtaatttcttcaaatccggcagagccttacttccgtgaagcagtccatcttcactcaggtattcttcattccaatcaaattcctcgtggtcaaaccagactaaagaccaggtgagtgggtcgttttcatcaatctcctcctctggtatggacaaatcaatgcacagcggcccccaaccacctccccaatcgccaatgggaatcaaatttcgaaagcagtcctccggtagttcacaaaaatcacggatctcttgcaaaatttctatgttttttgacacttcgttcatagattgtgggcagtcgattgccaaccagagtgggccaaggtctcctttgtcttcaataatagagcatagaaaattgtcattgcgaatgttttgaggaagccggaatgaagtcagaaaagccctgtagagagagggcagcttgacctgatgctcttgctcaaatgtagcaatgtcctgttcagtaatggaagatgacacaaattccttgccagggaaccaaccccgctcttgtaatttttgacatgcgcttatcacaaaatttctttcttccaaaggtgtcatggtgtcccttgctccttccttgggagtccaaacaacctccaatttgtctttttacttactttaccatatttttatgtcttaatcaatgtgtagtgaaatggccagagttggaaccaatcagtcaaagataaaaatggagaggcgggacccgccgttgtcagccaggacagactctgctagaataggagagagaccgaccggggctctctggagaggaggaatggagatggagggatgggacctgcgggcgctggcggtgctggagaggctgaacgctgcgggacaccgggccgtcctggtgggaggctgcgtccgggacaggctgatgggccggacgccccacgactatgacgcggccacctccgcccggccggagcagatccgggaggcctgtgcccccatgcgggtggtggagaccggcgtgcggcacgggacggtcaccgttctgtccggcggcctgccggtggaggtgaccaccttccgccgggaggggcggtacaccgatcaccgccgcccggaccgggtggagttcacgggggatctgggggaggatctggctcgccgggacttcaccataaacgctatggcctgggagccctccggcctgactgaccccttcggaggccgggccgacctggcggcgggggtcatccgctgcgtgggggagccggagcgccgcttcggtgaggacgccctgcgtctgctgcgtgctctgcggttcgctgcccagctggacttccggctggaggaggggacggccgccggcgtgcgtgcctgtgccccccagctggcctgcgtctcccgggaacgggtggcggaggagctgaagcggctggtctgcggcccggcggcgggccgggtgctgctggactgcccggaggtcctcaccgggcaggtgctgcccgagctggctcccgccgtgggctttgaccagcgcaatccccaccacagctacgacgtctacacccactgtgtccgggctctggagcgggtcccggcggagccggggctgcggctggcggccctgctccacgacgtggggaagccggggtgctgtaccgtggaccgggagggggtgggccacttttacggacacgccgccgccggggcggagctggcggacgcctgcctgcgccgcctgcggctggacaatgccctgcgggagcgggtggtcaccctgatccggcgccacgacctccagctggagccggagccccggctggtgaagcggtggctggggcggctgggaccggagctcttcttccagtggaccgccctggccaaagcggacgccggggccaaattttcagaccgggctccgggggcagcccgctgggagcaggtggaggcattggcaagacagatcctggccgagaggccctgcctcaccctgcgggacctggaggcggacggaaacgacgccctggcccggggcctgcgggggcccgcggtgggccgggcgctggccgccctgctggaagaggtgatggagggccgtctccccaaccaccgggccgagctgatggccgagctggaccgtttggcggggagggagcgctgagcgctccgccgcccgctgggggcacaaaacaggaccgggggacagcgcgggctgtcccccggggcatttatcccagcatcacatccagcagcatcatcaccaggaagccgcacatgacgctggcggtgcccacatgggagtgctcccccaggtgggcctccgggatcagttcctccaccaccacatagatcatggcccccgcggcgaaggaaaggacccagggcatcaccagggagacgctgcccgccaccagtacagtgagcaggccgaagatgggctctaccacgccggacagggcgcccgcagcgaaggccctgccggtgcccacgccgtcggaccggagggggagggagatggcggccccctccgggaagttctggagccccatcccgatggccagggccactgccccggccagggcgccgctgcctgtgtcctgggcggccatggagaaggccagccccaccgccatcccctccgggatgttgtgcagggtgacggccagtacgatcatggtggtgcggctcagatgggcgggcagcccttccggatcgctgctgccgatgtggagatggggggtgagccggtccaggaccatgaggaaagccccgcccagcaggaacccgccgcccaccggaagggcgggggactgccccatctcctccgccatttccatagaggggatgagcagggaccagacagaggcagccaccatcacgccggctgcgaagcccagaaagatcttctgggtggcgggtttcagatcctcccggaagaaaaacaccatggcggctcccagcacggtggccagacaggtaaagccggtgccgatggcggcaaaggtaagttctcggatcagcatagcgacctcctgccccagggactggggcacgttcagtttatgtagagcggggccattctatttgggcgtccccgctcctggggcgggtcagaacagaaaaccgggctccaggccgggcaggagctccagctcccggaacatcccggcagtgagggcctcaaactccgccgggtccgccgccttgcgcagctttttggcatagctttccgggtcccggaagaggtggatgagataggaccagagctccttcatccgcagcatggcgttgcgccggctgccgaagtcacgggcatagccctcatagagggcgtcgtggaacgcgcggagggtgtcccggtccgcgccgggcccgcccttggccttggaggccagcgccgggtcggccaccagccccctgcccatcatcagacctgcgccagggaagcggacagagaaagctcggcagtccgccgctgtcaccaggtctccgttgtagcacaggggggagcggctggcggccaggatggcggggaacagctccggtcgggcggggcggcggtacaggtcctcccgcacccgggtgtggacaatgagctgggcgatgggatacttgttgtagatgtccaggatgggccagaactcctccgggtcctggatacccagacgggtcttgacagagacggcagtgggggaggcggagaagatgtcctccagcaggtggtccagttcctccggccgccccagcatcccggcccccttccccttggcggtgacggtgccggaggggcagcccaggttcaggttgacctcccggtagcccatccgggccagctcacctgccgcccagagaaagtccgccccgctccgggtgagcagctggggcaccgcatccaggtccccgtcctgctccggcaggatgtcccgcagctcccggcgggtgaacacgtggtgctggctgggggagagaaagggcatgaaataccggtccacccccgggaagaaccggcggtgggtccggcggaacagggctcctgtgatcccctccatgggggcgaaaaagcagcgcatagcctgcaattacagacccgccgcagccagcagggcctgagcatctctctcatcagggcgggtgcggaccgcgtcgaagttcttcagcagaagctctgcctgtccggcggagacggggtcctgaagcatggcctcatagcggcggcgcactccctctcccatgcgcccaggacacatgtaccagccaatcacggtgcagttctgggggagttcaccctcaaggcggcggatgatctgagaaaaatacgcctgatccgcaccaaagccggcggtgccgaagagaaagatctgcttgcctgccagtgaggggagaacagcccgcagacggtcggagcaggtgcccttgtccgtccagaaacccagatagaccagctcggctttcgagcagtccagggacccgactggaccgcatgggacgttgggcagggcatgggagagggctttggccagatattctgtgtttcctgtggcactgtcatataaaatgatctgcttcatcatcggactcctttttattctaagcaatagggactgatccttatggtgattatagcatcccggcggggctcttgtcgacagcaagagaaggaaaatcatagcggtagggagggaaaatgttcatggtaaaatcttcacaaaatgaaggaggacaaaaattaaaatttcataaatatgcaaggtatgttttgacttttggacaaaaacacagtaaaataaaaagggggcttctacccgattttccgcggcacgggatggccgcccccagaattttaggatgacaaaacgcaggaaaaggagaatagaatgatgaagacaggtttgcggcgcctgttggcgctggctctgggagcggggctgctgaccgcgaacacctacgcggccgccactacattcaccgatgtgcccaccacctactggggctattattacattgaccgggccgccacagaggggctggtgtccggcatcggagacaaccagtatggaccggagcagaccctgtccaacgcccagttcgtcaccatgatctgcaacatgttctataagacggcggtggccgccaaccagaacagctccggccagtggtggtatccctacatggccgcagcctactcggcgggcatcctgagcaacaccactgttgcccagcgccgcgccgccgccggcggctggaccgaggccatggtgaacgcagagatcagccgctatgacatggcccagatcatggtcaacgtggccggctccaaggggtgggagaaccccagcgcactggatctgatggccgcccggatcagcatcaaggactggagcaccatccccagcaattaccagaatgctgtggccggggcttatgccagaaagctgctcagcggcgatgagaacggtaacttcaacggcgccgccagcaccacccgtgcccaggcagctgtggtgctctgctccctgtatgacgcctccaccaccatccaggtgcccacctacgtcaactccaaccggctggtgagcggcaagaccccctccgagtccaacgtgtatgacgacctggtggtcctgaagagcgactatcccgagaactacctgtgggatatgacccgcagctacacctccaaggaactgggcaccgccaccggcgtggaggcctttgcctacatgctcagcgacaaggtgttcggcgccatggccgccagcaagctgaaggaccccgcggacctgcgggtgggcgacgtggtcagcttcgactccggcagcgacttcggcgtggtggtctctgtggaccggaatgacttcacctatgtcacctgtgacaacagcggctggatcacctggaaggagaccgcggacctggacgacctggacagcagggatactgtctacacccgctatctcaccaaggcctccggcgacgacaccctgagcaacggagaaaaggccactgagtccaatgtggaggaccttctggacgacctgatggacgactatgaagacggcgacgactgggatatgagcgaccgctacacctccaacgtgttcggctccgccaagggcgacgaggcctttgcttacaccatcagcgacgagatctttgacgagctggattacaagagcgtgaaatatgccgaggacctgcgggcaggcgacgtgatttatgacagctggaatgagctgtggggtgtcgtggtggatgtggacaccaagaacgaagtctgcacctacggcagcattgattccaaggacaggatcgcgtgggatttcgaggctgatttcgatgacctggacgagatgtacacccgctatcccagcagctcttcttcatcctctgacgatgaactgaccaacggggacagtattaccgagtctcatgtggaagattatctgtgggagtttgaggacgacagggattatggcgatggagaatactgggatgacgatgatgaagactttgcctggagcctgagcgacgagatcttcggtgatgtggactatacgaagcacagcaagaccagtaagctgaagattggtgatatcatctatgatgacgacgaaggactgtatggcgtggtcatagatatcgatgaagaccgtgaacgggcctactatgtgagcgtgtactctgacggcgaaatcgactggaatttctggacctattttgacgatatcactacgatttatacccgttatcccgacagcacctcttctgacgacaccttgagcaatggaaaaaaggttaatgagagcaatgtagaggcccttttggaaaagaagctgaaggatattgactcctgggacatgaaggaatactatgattccaaagtgtttggagatgatctgtctggagccgaagggtttgcctggatgctcagtgataaagtatttggaaatttggactatgagcgtttgagcgacaaaaaggagctccaggcaggggatgtgatcgagttcaaagacgatgattcctatggtgtcgtgacggattcgcagggagatagtgactacgatttcttttatgtgactgtaaacagtaaaggaagaattcaggaagaccaaagggcagattacgaagatatttaccgcgtctacacccgctaccccgactgatacgcgaacgacagacctgacctcacaggcgcgcggctcaaaaagccgcgcgcctgtttcatctccttcccgtccatcttcacgccccatctcaggggcgtccctccacacgggccaataggccgggcgagcctgggacctgcccctgcatgggagctgggaacaaatataccccacatggtgcgcatgccctgatcccgatgtaggggcgggctggccccgccggccccaaaggtatcccgccctgtcaccagctttcctcaaaaaagaggtatatttttttccaaaaagctggtagaataaaccgaaaacatacacaaggagtgagcttatggtccatctttactgcggagagggcaagggtaagactactgccgccatggggctggccctgcggatggcgggccggggaaagcgggtggtggtggcccagttcctaaagggggcggacagcggcgagcgttatgccctggccatgctgcctcaggtcaccctgctccccctgccggagcgggtgaaattctcctttcagctcaccccggaggagcgggaggcggagcaggtccgctatctggccttggcggagcaggcccggacactgggggcacagccggactgcggactgctggttctggacgaggtctgtgctgcggtgaacaccggcctgctcccactggaagaggtgatctcctgcctggaccgtgcggcgggggaagtggtcctcaccgggcgggaccccgacccggccctggtgggacgggcggactacatcactgagatgggcaagctgcgccatccctttgacctggggacggcggcccggcctggggtggagtactgagggcaacatcgccataaatgtgaaaaaatcgtgaaaaactcccgccggacagttgcaatatttcgtgcaaataggtataatatttccgcgactgtcaaaggaggcctgtgggggcccccggagggcggcggcgacttgggcttgtttgagacatgccggtacgtccggtgccgccgtgtttcagacaagccccaggattgaagaaaggaatgaagtaaatggcaacaaagtatgtgtacctcttctctgagggcaacgccaacatgcgtgagctgctgggaggcaagggcgccaacctggccgagatgaccaacatcggcctgcccgtgccccagggcttcaccatcaccaccgaggcgtgcactcagtactatgaggacggccagaagatcaacgacgagatccaggcgcagatcatggagtatatcgtcaagatggaggagatcaccggcaagaagttcggcgatctggacaaccccctgctggtctctgtccgttccggcgcccgggcctccatgcccggcatgatggacaccatcctcaacctgggcctgaacgagcaggtggtggaggtcatggcccagaagtccaacaacccccgctgggcctgggactgctaccgccgctttatccagatgtactccgacgtggtcatggaggtgggcaagaagtactttgagcagctcatcgacaagatgaaggaggagcgcggcgtcacccaggacgtggagctcaccgctgatgacctgaaggagctggccggccagttcaaggccgagtacaaggccaagatcggcgtggacttccccaccgaccccaaggagcagctgatgggcgccatcaaggccgtgttccgctcctgggacaacccccgcgccaacgtctaccgccgggacaacgacatcccctactcctggggcaccgccgtcaacgtgcagtccatggctttcggcaacatgggtgacgactgcggcaccggcgtggctttcacccgcaaccccgccaccggcgagaagaagctgttcggtgagttcctgaccaacgcccagggcgaggacgtggtggccggtgtccggacccccatgcccatcgcggagatggccgagaagttccccgaggcctttgcccagttcgagggcgtctgcaagaccctggaggaccactatcgggatatgcaggacatggagttcaccgtggagcacggcaagctcttcatgctccagacccgcaacggcaagcgcacccccgccgcagccctgaagatcgcctgcgacctagtggacgagggcatgatcgacgagaagaaggccgtggccatgatcgagccccgctctctggacaccctgctccacccccagtttgacgccgaggtcctgaagaagactcccgtcatcggctctgctctggccgcctcccccggcgccgcctccggcaagatcgtcttcaccgctgaggacgccaaggagtgggccgcccggggcgagaaggtggtcctggtccgcctggagacctctcccgaggatatcgagggcatgaaggctgcccagggcatcctcaccgtccgcggcggcatgacctctcacgccgccgtcgtggcccgcggcatgggcacctgctgcgtgtccggctgctccgccatcgttatggatgaggagaacaagcagttccagctcgccggcaagaccttccacgagggcgactggctgagcttggacggctctaccggcaagatctatgacggcgccatccccactgtggatgcctccatcggcggcgagttcggccgggtcatggcctggtgcgacaagtaccgccgcctccaggtccgcaccaacgccgacaccccccacgacgccgcccaggcccgcaagttcggcgcccagggcatcggcctgtgccgcaccgagcacatgttcttcgacgaggaccgcatccccgccatccgggagatgatctgctccgacaccgtggagcagcgcgagaaggctctggccaagctggagcctatgcagcagagcgacttcgagggcatctatgaggctatggagggctgccccgtcaccatccgcttcctggaccccccgctccacgagttcgtgcccactgaggaggctgacatcgagaagctggccaacgacatgggcaagactgtcgctgacatcaaggctatcatcgccggcctgcacgagttcaaccccatgatgggccaccggggctgccgtctggccgtgacctaccccgagatcgccgccatgcagacccgcgccgtcatcaaggcagcgctgaatatccaggccaagcaccctgagtggaacatggtccccgagatcatgatccccctggtgggcgaggtcaaggagctggcctatgtgaagaaggtggtcaccgagaccgccgacgccatcatcgcttctgtcaagtccgacatgaagtataaggtgggcaccatgatcgagatcccccgtgccgctatcaccgctgacgaaatcgccaagcaggccgacttcttctcctttggcaccaacgacctgactcagatgaccttcggcttcagccgtgacgacgcgggcaagttcctggatgcctactacgataggaagatctatgagaacgatccctttgccaagctggaccagaagggcgtgggccgtctgatcgagatggctgccaagctgggccgtaccgctaaccccgacctgcatctgggcatctgtggtgagcacggcggcgatccctcctctgtggagttctgccaccgtgtgggcctggactatgtttcctgctcccccttccgtgtacccatcgcccgcctggccgccgcgcaggctgccatcaaagagggctgatcccaagcgatcctctgtgaaaaaagcgccccgctcatatgagcggggcgcttttttcagctcaaaggcgggagagagcgcagggagtgcctcagaacaggccgaggatcaggatggtgtaccgcttcaggcccagcatcccgcacccgagagcgatgtggtagttttctgatgcgccccatcccagctcgcgcagcaatgtgctggatctgctgactatgtggagttggactcctcgaaaagtccgcgtccccaagggctgaaaagggacactgggaacgctttaagaacaaaaaagacgcgcagcgtttcaaccgtaattacgcggtaagacggaattatggggcaggggagattatgaaggaatgtgacccggagacttggaaatcggattggtgatcgaggcgctctctcagaaacaagagactgccaacaccgtctgcgcttggcctggtccgctgttctgcatatggggggtgcagaccgataagcaaacagtgggaacttggcattttgtacacccgggataaattccacgctccgccatattacgagttcgccctctgccacttggtggtggtagaggatttgataaaactgtttccgattatttaggttcagaaataggtgagtagatacaatgaagcgattaaatgctgatgcaattgtcgacagtaaagattcgggtcctttccaatttacattagatgtcattttgaatacgcagtatgatcctttgatatgaacggcgttcattatagagaagcaaagctgttctgtcaagtgctgcaatcattttcgagttctctgcggtttgtttgatttgaagcgatgaaaatttggtgactccctgccggtaaggataaagtcaaaactgcatctagattaatatcttgaaacagactcaaaagaagggccgtctctttgctcgaaccaggaaaattacttcatttatatatgaactgtaacatatttgtgaattgattgtaaaaatgcttggacaccaattgacagaacattgttttcgcaatatgctactacacagatagtttaataataaactgtctgcaataaaaatgaggagactatttcactatggaagcgtatgatcgatcctcgcaagatgtatgcagtgaattgaaaacggaaccacgatcggggttgacctccacccatgctgaggagatattgacccaagtaggggagaaccgcttgaaggcaaagagaaagcaaaccgttgttgaacgattcttcagccagttcaaagatgccatgattctcatcctgctggctgcagcggctatctccttctatgtagcattgcagggcagcgatccaacggagttttttgagccggctctgatcctgctcattgtcattttgaatgccatcatgggtacggttcaggagagcaaggcagaaagatcactggaagcacttcaaaatatgtctgctccccatgcgcgagtgcgtcgtgatggacaggaatccatcattgacgccagcaaactggtgcccggggatatcgttttgatcgaagcgggcgattacattcccgcagatgggcgcctgatctcggctttcaatctgaaggtggaggagtctgctcttactggtgaatccgttccggttgagaaggacgctcaggctgtggtggcctccagtgcgcctctgggagaccggctgaacatggtctactccggatgcagcgtgacctacggccatggtgaagcagttgtgacagctactggcatgaacaccgagatgggccatattgccgggatcctgaacaacgagaaacagactcagacacctctgcagaaaaagctggcccagcttgggcggatgctgggtgttctggcgatcatcatctgcgcagtgatttttgcgatcggtctggccagtggcatggagctgatggagatcttcatggtatcgatctctctggcggtttctgccatcccagagggccttcccgctatcgttaccatcgtgctgtccatcggtgttacccggctggccaagcgcaatgccatcattcgaaaactccccgctgtagagacactgggcggtgcttcggtgatctgctcagataaaacaggtactctgacccaaaaccgtatgaccctcattcagggctactgtgtccaaggtgatctcagagaagatatctcttccgccaacacgcctgagatccagactctgctcaaacttgggaccctgtgttgtgacggcatagtcaccattcaagatgggaaagaagtggatatcggcgacccaacggaaacctgtatcgttgctgccgctctgaaaaatggcttttgtaaagacgacttgaacaaggcgtgcccccgtgtagctgaggtccccttcgattccgaccgtaagctcatgagtgtggtctgtcggattagtggcaaattagttgtcattaccaagggcggtttcgacaccctagcctcacgctgtactgacggcttgacggagaaggccgccaacgtggtagaggagatgagtcggcaggctctacgtgtgttggcggtggcctgtaaggtcattgatgaggtgccggaagaagtcacttcggaaactttagagcacgatctgacactgatcggactggtcggcatgatcgatccgcctcgtgaagaggccaagcaggcggtggctgtttgccgtcaggcaggtatcaagccgataatgatcactggagatcatgtgctcactgcgtccgctattgcccagcagctcggcatcatggagcctggtgaccgggctgtgactggaagtgagctggccaagctgagcgaggaagagctggatcagcagattgaagatatcgcagtttatgcccgtgtgtctccagaggataaaataaggatcgtcaagggctggcaacgcagagacgcgatcgtagccatgacgggtgacggtgtcaatgatgcccccgctttgaaggcagcagatattggctgcgcgatggggatcactggtactgatgttgccaagggcgcctctgatatgacgctgatggacgataactttgccactatcgtttctgctgttcgagagggccgaggtatttatgacaatattaaaaaggcggtcgcgttccttctgggtaccaatattggcgaggtgctggtcacttttattgccatgctgctttggaatcaggcccccttcctgtccatgcagctgctgtggatcaatctagtcactgactctctgcctgctattgccctgggaatggaggccatcgaccccaatgtgatggaccgtcagccaaagcccaaaaaggaagggattttcgccaacgggcttggaattcaagttgttttgcagggtgtcatgtttgcgatcctgtcactgatcggattccgtgttggcagtcaggtcaccggtgccattgaaggtggccgaaccatggctttccttgtgctggcctttgcgcagatcctgcatgcgtacaatatgcgctcccataaatcgctgtttaagaccggactatttactaacaaatatctgaatctagccagccttgtttccactgctttgatgtgcttggtgctttttgttcctccgatcgcctccgtgtttggcctcatccgtcttcctatgaagctgtatatgctgggctttgggctggcggtcgttcccgtggtcgtactggagatcgtcaaggcgtttgggctggtgaaacatcataagtgagttgatattcgatgaagaacgtcgtaggaacattccataaaatacagaaggcgtattatcaatactgctatcaggcggtagaaccagacgggatcaaaatgagtgagatggcttgtatattgtctctctacaacagtgcgcctaaagatactgcacgggatatcattgagtactcctgcctctctcccggcatggtaagcaggagcttagagtcacttcgtaagtctggtttgattgaaggatatcgtgaccaagaggatagccgatatatccatctgcgtctgctgccgagagcggccccgattttggacaagctcacacaggctcaaaccaaattcattacttgtattgcggaaggcatttcaaaagaggattttgcgcaggtctgccaaattgcagagaagatggctgaaaatctggatgcgaacccgaaactcaaagagcccctcacttaaaaacaagaggagtgcatggagagtaactccttgcactcctcttatatgtataaaacaaaaccaaaagcagatatcttggcatctaaatatcgggcgacagaggaggtttcacaatgcaagtgtggttcagcaaatttattagagggcgtgtgttctctgtcctcttttgtatattaggttttgggctgacgatttatctgtccagccgattgggcatactgattgagggatttgccggccttgacctccaactggcaatttttttgatactgacagtgttttgcacctatatgctcagctatgtgaatacccacagagagaacaagaaaacacagaagttattcaacctatgtggaatcatattttctttttttccaagcacagtgatctgttttttcttgttcgacctgataagatccctttgcggagcctccgatgggcggctatacctcattccactgctgttggctgctgttctgtctgcctatggatttgtccatgccagaaagatctttgtgaaagagtattcgatacccattgctgccagcagcaagcaccaaagatctgaggtaaaggcagtactgctcagcgatatccataccgggagctatgtggatcggaaacaactccacaaaatagttgatgcagtcaatcggttgcagccagaccttgtcatcatggccggtgacacctttgatcaagatgccttcgggcattgtgatatggatggtgtcaaagcagaactacagaggctccagtcagagggaaacgtctacgctgtgctggggaatcatgatccggattcgagccataaagaggtcaaggaatatttcgaggaggctggaatacatctgctgattgatgaatgtgcagaaacagaggacttcttgatcgtcggtcgggatgatatcttgggaaatcctgcccgcaagggcatttctgaactgttcgccggtgtggatacggagaagccgaagatcgtaattgaccacaaccctttaggcatcgaagatgccgtcaaagcgggggccgctttgatcctttgtgggcatacccataaaggacagtttttccccgccacactgtttaccaagtgggcatacggcagacgtgggttctatgggcactttcagactggagagacccatagcgttgtttcatctgggaccggttattttcagctgccagtccgtttggggacgaacagcgaagtcgttgttttacatattaaacttcacgggatagggggcggcgcgggtcacctttcataggtatccaccggggcttgaacatctgttccctgggccggtcacagcagcggcgcggcggcttttgcaataaagcccagcagccggcgcttgagtggctctgctgggagcagatccagcgtgacttccctgcatttaccctgtgtcttttcaaaatcgtcttggatctgggggatacagtccgttccccacagataggtcgcgcattcaaagtgatgatagaggctgcggtagtccagattgatggtgccgacaacagcctcccggtcgtcacagacaaagaccttggcatgtacgaagccgggggtgtattcgtagatcttcaccccggattccagcagggatctgtaatgggtcagcgcaagggcaaaggggatgtacttatctggaacaccaggcaggatgatccgcacatcaacaccgcgctcggcggcatacttgagcgcattttccagctcaccgtccaaaatcagatatggcgtcatgatatggacatacttctgggcccggttcagcatatccatgtagacctgctcgcccaccttgtccttgtccaaggggcagtctccgtaaggcatgacaaaaccgtttgcagcctgctgctttgccggtacattcagaaatgtgtcaaaatccggtgccttttcatccaagtaccacatgtgcaggaacatcctggtgaagctgcgggctgcttcaccctttaccatcacggcggtgtccttccagtgaccgtacttttcataggcgttgatgtattcatccgccagattgatgccgccgttgaaggcggtctccccgtcgatcaccaggatcttccggtgatcgcggtagttataatgggtggagacaaagggcttgatgggggcaaacattttgctttgaatgccaagagatcgaagccgcctggggtagtcatggggcagggtagacagctcacaggtgccgtcgtagagcatacggacctccacgccctctttggccttccgcgccaggatctccaggatcttgccccacatttccccctcatccacgatgaagtactccaggaagatgaaccgctttgcctgctccagctggatcagcatctcccggaacttgtcctcgcctagtgggaaataggtgacggcagtatggtcatagaccggatagcatccactgcgctgaacatagcgggcaagcgccgcggctccggggtcggactgccccagggcctgagctgtctccggggactggacaagggtttccgcagtttccgtattcaattccgcatagcgctttttcagagcccggtggccaatgtttttctgggtgtaaagaaacagcagggcgccgaacaccggcaggagcatgaccaccaccagccacgtgatcttggcggtggggtccatagcgctgttgagcagatacagtaccataaaaaacgtgaagattacaacgccgccgtaaatgtggggcaggaaggcctcgaaccagtgaaagatgctgaacaggaacagcacctgcatggccagcaggacgaggatcaatccagagcggctgaagatcacccggaaaatcccccgcttgcccttttccaaaaggtgtatccctgcttttttggaattctctttcataataagccctctcttttggaaattacaaaaatttccgcaaaccttatgcaacagcagttcttgacttttattatatcattgaaatctcctatttgaaatggaagtcaccaaaagttaacaaatgcgcttgcggggtgtacaaaattttatattggataggtgggaaaaatacgctttagtaaacggggacaaagataagaaaacgattttgtttcagaagtttaaacatgtctgtcggttcattttggaggccggtcattctgggctttatttcataggggaaattattgaaacctacattgtataggtgtttttgaagaaggggtggctctttgctttgtgttacgagctataataaaggagcaccaatttggataggcaagtgtacagaatgaaggccagttctggatattctaacttcggcagtccaaaagtgaaaaagataccgccggctatcagcaagacagccagcggtatcttttatcagatctctgtgctggccttcatggccttgaagccgatcaggaccgtccagacataggcgcaggtcttggggatcatcagcataccaatcatagggacgacgtctgcccagaggaccacgggaatgtagaaaccgaaactgagcacaatggtcagccacatattacggaacgcgcggtcctttgcttgccgggcgctcctgtagaacaagacgatgatcagcaggcccaaaagcgcaaagggaatgttccggtaaatgccccaggaaagcggcgcattggcgctcagccatgcattctgagggaagaagcagagggcgatccgcagggcagacagcagatacacggcggcggtaatgccgttttgaccattgaccttgtaccggacccgccacacatagtagaggatgatgtaaaagatcgtcatggtaatggaggtgatgaatttgcctatgcccagggggacgataaagttttccagaccagtggtgcagagagccagagcccgggggaccagatggaaggcgtcgccggcgccaaggacgacggccatgatgccgaacagccagtactctttgtttcccctgctctttacgatcatggtgacgccaatggcgatcacggaagtcagatagactgcatcaaacagtgtttcaacaatagcttgcatgaagaggcctcgctttcctacttgatatgaactttgttcattttgctggataaagaattcccgcatgaacgggaattctttaacggtaaaggatccgttccaccatcctgacaatgccggcacagtcatagtcgtgccgcagcaaagaggagatgatcagagagaagatgatctcaacaaatttttgaggagtaaagacgtcgtcaaaaaccgccggatctacatttttatcccgcatcaggaccatgtggaagccctcctgaatgtgtttccacgattttgccatcagctcctgcccactggacttatcttcaccgacaaagctcatggagtgcatggagaagaaaccgggatatatttcattcccacgccgcatacgttcataggcccattcaatgcagtctggaaaccgtttgaaggaggtctggccatcagggatgtggaagatatcgcaccagacgcgttccaccgttgcggcgatcaggtcagatttgctgtcaaaataattatagacggagccgacggagatattgcaggcctgcgccacgctgcggatgttgacggccgcccagccgttctcctggatcagcttacggctggtctccaagatggcctctttggaagtgatgaccgtgttcacgttttcacgcccctattctgaacgatgttcactatagcataccacccttgatttgtcaagactttttttgtcaggtctctaccctgtcaatggtcgaaatggacgacaaaagcagccgttgacgggggccgcaggctgtgctttgtctgttatcaaggtgggacagccgcaggctggctgtcccaccgctgtgatattagtttgattttttatcagcccgataagctgggattacaggtccattaacatttgcgcaaaatgttcaatatgttcagagagatcctgttctccatagtaatcggcaaacaggacggtatctccgcgacgcagcacgaggatgccgccgggcagaaaaacacgcggttccccggttatctcattgacatgagttcgcccttcgcgtttggcgtacaagcattcatcgagaacatcaaactgctgatagtcaccggagttgttaaatttctgcctgctccattcctctgcccgcatttcggcgagtatatccaatgggtaacgagtgatgatgacctccagatgaggtacgtcatttgggctgtcatcctcgttgaatgcaccatactgatgaaaataccaagattccgggtcgagtagcgttccaccatgagagatatagtccatgctgtaaaacacatcccgggagagcggcagatcttctccctcaatgtccgtcagagtgatgaagccggaacctgctagatcataggggcggtaatctgttcccgcaaacaactgtatggtattgataaagaccggaagcaaaaacgcgaatcctatcgccaacaaccagccgactctttcgtgtctctttggaactgtcccgcttttaatcgcctttcggtagcacagtaaatggaaaagccccaacaagtacgataagtcaatcagcaacaacccaaacgctgtcagtaggaacgggagcacaggtcggttggaaaaggtctcaacgggataatatctgagccatgtccaatcaatttcccatggggagccgttttgataaaggctgagcaaaagcacatttccgaaggcaagcagtacacctccaatcactttctctttgaaaaagcgctttaacgcataatcctgtgtttccgactctgtatgtgcctgcgccgtcaagtcgtcagaggcaaagacataaaaacttccacggaagatcccccagtagtgccagcctgcatcttcgtaaagcgcatttagctctggatcatcatttactgctccgcgaatcggctctaaatggatttgtaccgtttgttgcgctgtcttttcaaaaatggtgagggggccagtggtcatggaaaagcgtagtcctttcccagccataacagcgaaccagttttctaaccctggaatatcaaaaccgccaactggtgttatacggatcacagtcttgctcataaaaattcctcctctccgtcaaggacacaggcttttaggcgtgccagctcgtccttaaatactgctctgcctctctcagtcagccgatagctgcgtttgcggccatcggtttgtgtttcttcgatcaggtgctcatcttgaaatttgcctaacaatgtataaagcgtaccgggaccaagacgcacccgtccattggtcttctgttctacaaattctgtgatctcaataccacacatttcacggtgcaggaaagacatcagcacatagaacattgactctgtcagtacccctctatctttcatatcgatcatggcacctctttctgcaatatcgtctcacgatattgctttttcccattctaacatcgcggcacgatattgtcaagcagctcctcttgtatatgtggatatggagttgtgaaatttaatgtctttaagatttagcagaacaaaagaaaaagccgacacctacaaaactgtaagtgtcggctttggttcaccctgttacgcgcttttatttttgcgtttgtggagtaagcttggcataagggctgcactcctgtgttgcaaaagttcagcgttttcaagaggtcgaggcatgtcttagtacatgccgccctccggaactttgaacttttatcaacaattatgtagggatacaaagagaaatgtcgattatctcaaatattatccgcacatttctctatggtaatctacatatttctacggctgaaaatagtaagttttatggtaaggtcagccatgcgattgccacggattacagattgctgactgcccggccaaacgcctcttccaccgcatcaaaattcacatgtgtgtaaatatccagtgttacgctgacattagagtggcccatgagatattgcaagctcttcacatcaattccggcccgttgcatatctgtgcagaaggtatgccgcaggacatggggcgttaccctgggaaatgagcgcccgtaaattctggcgatctttttctgcatcccccgcatatagttctgcaagtgcatagcgaccttgggtttcccgtccttgtccagaaacaggaatccgctgtacccatccaccaagaactcaaccgttggcgttgggcggttcgccaccacccgtttcagtgccatgtagaccatatcgctcatggggatgcaccggacgccgctgctggtttttggagaagttacaaagtagggtttctccgctgtcctgcatagttgatgctcaatgaagatatgccgctttttgaagtcaatgtcttttttggtgaggccgtacaattcgctgacccgcaagccggttcccagcaggatcacaatatcatcatagtaattatcctgcccattctcgcggataaacttcaaataggtctcctgctgggattttgttagggccgtgcgctttgccgcatcatccggaagaatgtccgcaaccttgaacttgaacgggttcttgcggatcatatcatcgtccacggccatctcaaaggcaggtcttaagatactgtggtagcctgtgatcgtattacgcttgatccccttgtcatgcaattcgatatagaaccgcttggcatccgacagttttacattccgtaccttgagtttcccaaagtctgactctctgatccggttgactgctgtctgataggctcttaatgtattcggcccaatatcccgtttcaagcccatgtatcggtctaccaattccgacgcagttatctcaccggcggcatagtcaatcccgtctgccagatctctttgaattgcactctctttctcacgaagggcctctaatgtcttggcgtacacgcaccggactttcccgtggccgtctgtgtagcgataatcgtaggttccgtttttcctctgattttcaccagttttcagaacacggccacttttgtctttgcgctttcccgccactgtgcacgctcctttccggaaaagcgcccggacatgtatgataaaaatatcatagcacatccgggcatctatttccactcaaatcgaatattcgccttgcagataaatttcaaagggtaatcgtttaatcaggcgtcgcgtccccacccagagtacatatttttcacactctttccgatccgtgatctgccgaagtttattgatcccgatgttatagtaggccgcggcctcttccagggtaaggttcgccttctgccaaataggaatttcgtggctcatggtacccaccatccatcacaactgttcctcgtcgaacagatagccctggaacacggtgccgtccccggtgatgaaacgccctcttgcgtccttgggaatttgatctgcggcactggtgttatccaggatgatctgggaaagaacgctgtccgccctgccgcagacccggaaatccatgttgttcttgatctgcccaggaatgatgttggcgtccgggcgctgggttgcgatgatcaggtggataccgaaggcacggcccagccgggcgatggtcgccagtctgttttcaatttggcctagcagcttcttctgttcgctgtcggcacccgtccgatccagtacctccgccacttcatcgcaggcgaagatcagccgttccaggctctttcctgtggctctgttgtagcgatcaatgtcggggcatccggcctccgaaaagtcccgtttccggcgtttcagttcctcaacaagccccgtcaggacattcagcaggtcttgttcctcgaaacacatccggcaggtctcccgccatgcggcagggaaatccacgccgcctttgaagtctgcaatacagaccgccgcccccttatggatcgcctgcatgagcaggagtttcagcaggacgctcttgccgctccccgtggaaccgcccagcaggatatggggaatgttggccaggttgaccgtcacgggccccagcaggctttctcccaacaccagcacaaaactctcctgggacaggtacttgtctttccatgggagcatatcaggcagtccggctcttgctggggcggcatagagcagaacgcggcgtttccccttgctatacttcatttttgcaatgttcagatccagagcggtttccacactcgtccgcttgtcctcccactcattcagcggaatcccccggttatcaaactcccaaatggtgatattgggataagtctcgtcccgccgcttgcggagcagggcgggggcctccccggcgtggttcacaagccccacccggtgcagttcttcttccgccgccttcctgccgattggatagcagagcaggattagcagagccgcgccgcctataatcaggtaggcagggaagatgttttccaggatcaggcggaggacaggggagatcaggtcgctcccctgcgccagcgcaacggcttgttcctgttggttccacacccacacagcgcccaggggatagagcgccgcaaagggcagtttcacggccaggccggggccgtcgaagagggtcaggggaaagccccgcaggaaatcccgccgctcccgcctgcgcctccgatcatatttttcgtttcgtgtcatagatgacctcctgtatcgtgccatcccgccagaactcccgcaccacatggatgcggcggagaaatgcccgccaggtctccgacttgtaccgctggatatccgggtactgtgcttccaggggaatgttggaagtgaggtagaccgtggtatagcaggcgatcctgtcactgtaccgggccgggagcgtcaagggataaatgtctaaaaggttcagcatcgtttctatggggatctgggagtaaaactcttccagcaccaggacgggttggccgtggtaggcgtcgaatcggacaccgttcttcccgccgtaatcggtaatccggcagatgtcgcccgccgggtgtgcctggtagatgctccgggtctttccggctccggaggctccgtacaggtaatacacggtcaaatcccggttctctttcccgtattgggccgctgtcacggcctcccgtagtgtgtcaatgtctcttgtcttgaaggcgaaggccggagtttcctcaatgatctccatggtggagcggccctccttcacgctttggagcaggcggctcatggcgggggagtgttcctcctgctccgttgggagcgttccccactcatagaaactgcctgccacagaggtttccgctttctctgtgtccgcccacttgccctctttggcgatgtaatcccggttctgccttgctgtcccctgcacccgttcgatatgggccgtggggaattttcgctggattgtggagaaccgcatgtttgagtgcgcgtacaggaaagcgtgggtatggggtgttccggttgttgcgatctcgtcgcaaaggcagaaatactccaggggcaactggcttaagatctccaggatcgcatcccttgtcaagccgtaggactggggattgttccaggtaagctgccatttcttgccctgcggatctgatgccataggatcagcctcctgttcatttttcaatgtgcgactgcgatgtgcgatggaaaagggggcaatggtagcccccttttccatcccggcggcgttccgcctgccggcgggggatgctctcctaagggagatcatctgttccccaccggcgtcggcccgccgccgtcaggtcaatccggtttccgggctccgttgaccggcttgatgcccgtcgctctggcggtaaacttcacagcaccgagtttgccctcgtcacgttcctgataggcacggacttccaggccgctgaactcgacttccaccgcgccgtcctccgggctctccatgagctgcggccccgcgatcttgatgcccagtttctccaggcgatgtgctaccaggcagacatcatagcggtaaccggcgatcccttccaaggcttttccgtccttgtactcagaatagggacggacttccaccagcagcaggggcttgcccagggaggcggtgtcaattttcaaatctcgaatgtttaacattgtaataccttacctttcttatcggcgcgggttgatcaggcccgcatttttcttttcgtgtcgtactttcgagtacgatcccagcatagcaaaaggcagggggcggcgttaattccaaaaaggaataacttttccctctacctgattacctctattcttttttgcggcgtccgcccttacgggcaccgccgctccggccttccttctgaagattgcagttgggaaggggggcaaaaccgcgttctatcaaatatgcgtccgcgtcatccaggagcgttgacctggtgacacgatccacagtgtaatcaatctctttctccgcataaatccgaatcaattccagcaaggccgtgtgccgaggatcagcgggtgaaaatgtccgctccttccgggccatcagatccattgcctcttcctctgtcaatccaagtgccaaacacaggcagaccagggtatcaaccgatacgccgtgcctcgctatgtttgtaatcttattcaatgtcgattggttcatcctagcaaattccgccagtacagtttctgacaatccaactctttgcgcgtaaaaatgcaggtacagcccaaaggaggctgtgggacttaattcacagggttcccgcgtggaacgaaacacaggcaagccgcctggtcagcagtatcacgcaaatcaaacagacacttctatttgctccaaactgttccgcgccggggatggtgatgactgtaaggccgatgctgtgggcgctggggaagagagaatacagcataggcaccacccccttccgtggacttgccgcaggtcgatttttcaagaaaacacccccggcagcggaacgctggacacctcaaaacaagtagaaaaagagtacagttcattccagaactgtactcacacaaaaaaacttatatatcctcaaaaaagtctgcggggcgcactgtcccccttaagaaaaagcatccaacaaactgctgtcacacggacacgctcactacttagcaaggcccatcagggcaagaaactctagtaaaatcggcgcggcatgacgccgcgccggcgtacaaacttaacaacgtgtgcaatgcaggatttctcccgcggggcagatcaaaaatctgtcatccattcggatgcgcacaaaaatcaacatcatcaatataccacaggatttagtac

SEQ ID NO: 13658 - DNA, 421 bp, Unknown
  gut microbiota DNA sequence
caagctgttcaccaaggcgatggcagtgtgctgcaagcagaaatacgccaccggtgtctacaccagcggcgtggtatttgagcctcgtttctatgagggccttgccgatatgctcaaagaggacgaactgcccatcttcaactgggtttggttcggcctgtaccggagcgaggggggcctaaacggctacacctacggcatggatgtgtttggcaaggaggaaatggaggtgttgaacaccgacgctgagccggaggaactgcgggactttttggccagccttgcctcctatgtgctggcgtgtgatgtgacactgcaagacggcgagaccatcggtttttctgcggacgataagcacaccatcacccgcagccccggcgtctccctgccggaggaacagatgaccctgaagatcggttac

SEQ ID NO: 13659 - DNA, 319 bp, Unknown
  gut microbiota DNA sequence
aggcggatgggccagtaccacttttcgtctttcatggactcctgatccagcttccagtccgcaggcagggcaatggccagctccgcccgctccagcttatattccgccagttcctccggcacattcatccggtgagcgcccatgcccatggtgaccagggtgcagtagtcccgctcctcagagggcggcaccacgcagatgtccacatggatgtcgggagaaaccagctcatggaacacattctcgaacttgccgaaatactgctcaatgtgcccctcgacggcttccatctcctcctcggtgtagacttcgggattac

SEQ ID NO: 13660 - DNA, 10722 bp, Unknown
  gut microbiota DNA sequence
cgcaaggttttggcccatattttatttataagagtatctgtgagttgtggagatgggaaagaaaatacacaagatattgtgaataaacgggagttgaaaaaaataaggaggattttgcgcaaaaattcattgacacagctggatttcttagtctataataggtgacgctgtcctgtgagagcgggtctttctgcccttttttgcgggactgtttgtgtacagaccgcagccgaaaggctgttgctggaccggaacgccggtctgaatgcgccgtccaatggacggtgtctgaacttgaacgaggaggtgtcccccatgcttcgtacctatcagcctaagaagcgccagcgctctaaggagcacggcttccgcaagcgtatggccaccgcgaatggccgcaaggtcctggcccgccgccgtgccaggggccgtgctcgtctgacccactgatgtggggaaaggggaggcattccgcctctccggacgaggatcgagatctcctatgagatacggcagcgaggacacaatcgaccgatatgcagcttgaggggcgtgggagaaattcccccgcccctgcggtgcatatgggaaaaagcggggcatcgatgccctattggaccgggtcggtgcccgggtggagggatgaccgtgaagcataccgtggcattgaaacagaatcacgagttccgccgcctgtacagcaagggccgcagtgcggtcagcccctattttgtcctctactgccggcccaaccgccggtcatacagccgcttgggcatcaccaccggcgtcaaactgggcaacgcagtcaagcgcaaccgggcacgccgccggatccgggagctctaccggggggaggagcaggctctgcttcccggctatgacattgtagtggtggcccgcacccgggtgatctatggcaaatacgccgaccttcagcgcagctttcggagattgacagaaaagctggagctgcgccggggccgggaggcgggtgaagcgctgtgaagcgtatcctcatcggactgatccgattttatcagaaggccatatcccccatgcggccgccctgctgccgctttatccccacctgctcggcctatgccgtggaggcggtggagaagtacggcgcgtggaagggcggctggctggccctgcgccgggtccttcggtgcaatcccttccatcggcagaagtccatccaatacgaccctgtcccgtgagaggggctcccacgaaagaatttgagacggaggcacatcatcaatgggcgttatgtactacatcctgtcccctttcagctggctgctgaactttttttacagctttaccgacagctacggtatttccctgatcctttttgcactggtcatcaagatcatcctcttccccctgaccatcaagggcaaaaagggtatgatccagatgaacctgctctccggcaagatgcagcagctgcagaagcagtacggcaaggaccgggagcgctacaatatggaggtccagcgcctctatgagcgggagaaggtcaaccccatgagcgggtgtctgtggtccttccttcccattctgatcctgctgcccctgtatgccatcatccgccagcctctgctctacctgatggggctggacagcaatcagatcgcccaggtggccgcctccgtggactggcagacgctggccgtgaaccacggctgggtcactgccgatgccatggccaagctggtggagcagttcaacgcgggggagatcgccaccgtgttccagaatgtgggctataaccagctgtatctggcctctctggtcaatgagaacaccctgcccgccatcaccgccgccctgggagagggcacccgggtctttgtgatgaactttgattttctgggactggatctggctatgctgcccacctggaagatctgggagcacctgaactggcagtacatcggcgccttcctgctcatcgtgatatccgctttctccagcatcttcatgtccaaaatctccatgaagaccaaccagatgaacaaccagagcggcaacgagcaggtggaaaagaccaatcggatcatgatgtggaccatgcctttgatgtccctgtggatcggctttatgatgccggtggccatgtgtgtctactggatcgccaacagcctgttctccgtcatccaggagctcattgcaggaaagatactgaaaaaggactatgaggccgcccgagccgccgccgccgagcgggagcgccaggagaaagaagaggagaagcgccgcaaggaggaggcccgcctggagcgtcagcgccgcctggaagaggagaagaaaaaccgtggcaaaaagaagcccggccagaagaagagcgactccgatcagcctggcatccgaaagagcgacagccgggtggggatgcggacctatgcccggggccgtgcctatgatcccaaccgcttcggcggcgtgactccctaccacgaccccaacgccccggagatcccggaggatgcggtggaacaggcgcgcagggagaagggagaacaggcagaaaacgccctggccggagaggagctggcctccgcccttccagagaccagcccgattgaggaggagaaggagaccgccgccctggagtccgtcagtgaggctatagacggctctgaagaggaactgtccggggaagaagcggaagaggctgagcaggatgagtccggggaggagcctgacgaggacaagtccaaggatcaggccgaataaggagggttctgacaatgttgaaatggattgagaccaccggtcgttcggaggaggacgccattgctgcggccctgtttcagctgggcatggaccgggatgacgtctcggtggaagtgatcgagcgggccaaatccggctttttgggatttggcggaaaccccgccaaggtccgggtgagctatgaggtcccggacgaggagcagaccgcccccgcggccgcggaggagacggttcaggaggccgccgcctccgcagcggaggagcaggagccggctcccgcaccccagagggaggatgccaaccgtctcctgcccggggatgagctgctgatcgccgctgaggagcccgcccctgttcaaggggatgacgggaaggcggagcagatccggaccttcctcactgggctgatggaacacctccatgtgcaggccgtccctgagatcactctgacccctgagggaagctataaggtggtccttcagggccagggcctgggggctatcattggccgccggggcgagactctggatgccattcagcagctgaccagttactctgtgaaccacggccagtctaagcgggtgcgcatccatgtggatgccgagggctatcgggccaagcgggaggagtctctccagcggctggcggtaaaggtggccggcaaggtggtcaaataccggaagaatgtgaccctggagcccatgaacgcctacgagcgccatgtgatccacaccgcactccaggatcaccccaacgtgaccacctactccaccgggaccgagcccaaccgccgcacggtcgtggcctatgcccccggacagaaaaagtagagactcacaggcgcggcgggaatgaaatcccgccgcgccttcttacaccggaaaggagaccagtcatgcccacaccgctctatgatgccctgagaggatacgccgcaaaagctcccctccgcttccatatgcccggccacaagggagcctttcttccctgccccgagctggcccccctggcgcggctggatgtgacagagatcccgtctacagggaatctgtatgaggatctctctcctatccgggaggcccaggccctgtgggcccgccgcatgggagcggagtactgccagtttctcaccggcggctccaccatgggtatccataccgctctgaccctgtgctgtcccccggggagccgggtgctggtggaccggagctgccaccgctccaccttccacgccctggctcttctggatctggacccgatatttcttccacgcccctggctggcggaagagggggtggccggcccgttttcccccctggatgtgaaaaaaatgctggatcaagatccaactatcaaaactgtttgtattacatcaccaacttattgcggattgttgtcggatattcccgccattgcgggagtagtccacgcccacggtggaaaactggtggtggacggtgcccacggagcccatctgcaatttttggggatggatgcctaccggggagcggacgcggtggtggtgagcgcccacaagaccctgcccgccatggggcaggcggccctgctgttcaccaacggcatcgacccgggacaggtgcggcgaactgccgccatctacggcacctccagcccctcctaccccatcctggcctccctggacacggcccgtgagtggctggagggaccgggtgccggagagtatgggcgggtggcccggcggaccgccgccctgcggtgccggttcccctccctgtgccctcccctgcccctggaccccacccgctttactctgaaggtgaagaacgggccggccttcaccgggcagctggagagccgatgcaatatctggccggagatggaggacgggggccatgtggtctttatcctcaccgcctgcgacggggaggaggctctggaccgcctggagtccgtcctggaagggatggaggagcagatgggggacagtgcgcccctgccgccccctcccctgccggagcgggtgctctccccccggcaggcccagttcgccccagcggaggtccttcctctggagcggacagaggggcgggtatgcacctgccagctggccccctatcccccaggtgtgccggtggtggcccccggggaacgaattgggaaaaaagagctggcctatttcagacaaataggctataataatcgggaagtaaccgtcgcggccatgccatgaaaagggggcggcggcgcaagtgaggaagcgaccatggaattgacagccctggcgggcaatgcccagatcaaggcccagctggcccaccgggagggggacctggcccacgcctatatcgtcgccggcccggcgggcagcggccggcataccctggccgcccagatggcggcggccctggtgtgctccgcccagcctcagctccggccctgcggccgttgttcccattgcagaaaggccgccgggggcatccatcccgacatcaccgtgatcgctggcagcggcggaaaacccattaccgtggatcaggtccgtgccctgcgcaccgacgcctatgtccgtccaaacgaggcggagcggaaggtgtacctgctggagcgggcagaccggatgaacgccagcgcccagaacgccatgctcaagctgctggaggacggccccgcctatgcggtctttttccttctggcggagaacggctccgccctgctgcccacggtgcgctcccgatgtgagaccctggagctggcccccgtctccccggctcaggcggaggagtggctggccaaggcatttcccgggagaacggcggaggaaatccgccgggccgctctggagtgccagggcatcctgggccgggccgcggcgctgctggagggcggtcaggaggaggacggactggaggagaccgcccgctccctgtccgccgctctggagggggaagatgagctggccctcttcgaggccacccaggccctggacaaactgagccgggaggagcttaccgctgtactggaccggacattgatccagatcggggcccgcctgcccggctcccagcggccccgccgtctgctggcggccgccgagctgctgcgccgcctgcgggacggggcggacctgaacgccaacccgggccaggtggccggatggctgtgcgcagggatgtttctgcgcccgtgactccctcgcgccggggtgccgttcccaccccgtgcgatccccaatatagcaacaggaggaccttatggtagagatcatcggcgtccgcttcaaaagcggcggaaagcaatattattttgaccccgccgggctggaggtgcagcctggacagggagtgatcgtggagacctcccggggcctggaatacggagagtgtgctcaggggaacacccaggtggaggaggagactgtggtccagcccctgcgcccactggtacgcatcgccacggaggaagacgagaagacggtggaaaaaaaccgggagaaggaggcaaaggccttccagatctgtcaggagaagatcgccgcccacggcctggagatgaagctggtggaggcggagtacagctttgagggaaacaaggtgctcttcttcttcacggcggaaggccgggtggacttccgggccctggtgaaggacctggccagcaccatccatgcccgcatcgagctgcggcagatcggtgtgcgggacgaggccaagatgctgggcggcctgggcatctgcggccggcccttctgctgtgcccagttcctggacgagttccaaccggtatccattaagatggcaaagacccagaacctctccctcaatcccaccaagatctccggcacctgcgggcggctgatgtgctgcctgaagtatgaacaggaggcctatgaggacctggtaaagcatacccctaagcaggagtcctttgtggagacgccggacggggcggggacagtttcctcggtgaacctgctgcgccagcaggtccaggtccggctggactccgcgcccgatacccccaagtgctaccacaactgcgagatctgcgtagtgcgcaatggaaagggcaagcgccccgagggctatgtggagccgccgctggaggagctggccaagctgcgccgggcgcctgaaccggaggccgccccagagcccacttcctccaacccactggccgccgccctggaggcggtgttcaatggggagcgtcccccggagccggagggagagcgtcccagaggcgagggcgagggacgccgccgccgccgcagaggcggccggagcgagggtgcgtccggcggggagagccgttcccagggtgagggccagcagcgctccagaagagagtgggagcgccggccggagaagccgagggacaaggagcccgggacagcggaggcggagggcgtccaggagggcggagagcggaagcccagccgccgccggcgccgccggcccagagggaaccggcccgctccgggaccagaggggaatggctgaaagagaaaaaagccccggacatcataggagagaggatgtccggggctgacccatcttggatcgataaagtgaggtgtcccggatgctgggagaatttttaaatgcggtctccgccgtggtggtcctgctgatgcttatggcggtgggctattttatggggaccaagggctggatgaaagcggaggagaaaaagttcctgagcaagtacatcattaacatcgcggtcccctgcaactgcatcaacggcctgctgaacaatctggaccagagcatgctggcccaggcggggctgatgctggtatccgccatcattggagtggtcatcaccatcctgctgggcatggggctggccaccctgctgcgcctgcccaaaaaccggtggggcgtctttgccgccatggtgggggtgtccaacaccctgttcgtcgggctgcccctgtcaacccagctgttcggggacgtgtgcgtcccctacgtcatgatctactatctggccaacaccatcttcacccagtcggtaattctgatgctggtggagcggtcgggcaccgcctcccacagccggggaatcaagggctttttgaaggatgtgttcaccaaaccccccatcctcactgtgatcgcctcggtgctgatgctgatagtgggcttccgtcctcccgaggtgttcatgagctttgccaagtacatcagcggctccgtctcccccctggcgctgatctactgcggcttcatcatctatgaactggggctgagcaacctgcggcccagccagctgcggcagatgaagggcctgccaaccatgctggcggcccggctggtgatctcaccgctgatctgtgcgggcatgtgccgcctgttcggcattaccggcctggcctatcaggtctttgtagtggagagcgccctgccggtggtcagtcaggtgaccgtaatggcgggggacttcggggcggacgacaagtatgccgccaccggtgccaccctgtccaccctggcctgctttatcaccatccctgtgctgatggtgctgatggggtgagtggatgggatggacacttttgaccgtggccgccgcagcggggggcggcctgctgctgatgaggctgcgggtcccaggcgggatgctggtaggtgccatcctgggcgcggtactggtgaacctgactacaggacaggcgtacatctggcctcagacccgggtggtggcccaagtgctgaccggggcctacatcggctgtctggtgactacggaggacctgagacatctgccccgggtcatccggccctatctggcggtgatgtccacctttctcgccttgaatctggcggtgggatttttcatctggcgggtaacagacctggatctgctcacttccctgttttgtgccgctcccggcggtatgacggacaccccgctcatcgccctggacatgggggcggacgcctccatggtggcggtgatgcagttcgtgcggatggtattcggcatggcctgtctgccctccatcattgtcctggccgaccggaagatagagggggaccagatggtgccggaggagggtcagggaacgcactccctggaaagaaaaaaggcgcatgtcagcctgcggaagtttcttcctaccttcgctgtggcgctggcagcgggcatcctgggcaagctgtccggtgtgccggcgggtaccctcagtgcctctctgatcgcagtgatcgtgctgaaatttgcgggcagcgcgcccccaatgcccatgtgggtgcggcggctggcccaggtggtgtcgggctgctgcatcggtgccggaatcacccgggatcagatcttccagctgcgccagctgatcctgcccgccctggtgctgatcgccgggtatatcctggtctgtgtggggatgggccgggcgatctccagggcgtttcggatggacttgaaggagtccatgctctccctctcccccgcaggagccacggagatggccctcattgccgccgacctgggggtccacagcaccaatctggtggtgctccagatctgccgcctgcttggagtgacggtcatctttccccagatcttcgccctgctctccaatttgataggataagatatgctgtgcccgcctccataggaggcgggcacagtttttccgcggagcaaaaggacaggcccgtcataaatctccccgtctgggcataggatgcttcaggcttgcttacaaaaggagtgatcgcatgggcggtaagaggagggagagcggactgcgcgctctgcgccggggagcggccctggggctggcgctgacggcactgtggatctttggattgacggcagatctgtccggggcctgggacgccctggggcggctgggacagaccccctccttcgttctgggcgcgctgagtcaggaactggagggggccccagcgggggacgggctctctcccgacctggaccgatggggccggctgctgttggcccagtccgccctgctctccggcggccgcccggcggtggacgcctttctggcagagcaggcgcaggcggaggagccgcccgccgagcccatcgaccaggaggagaacgaccaggaggagccggagctctccccggtccagcacggcgaggtggtggagtacaccaatctggggaaggacgacggcagctacctcaccaccgaccagatctatgtgaagaacagcacccagggccaggaggtggacgtggctgccctggccagccagccggtggacctgaaactgggggcggggccccagatcctgatcgtccacacccacggcagcgaggcctatactcaggacgaacaggacgtctatgtggagagcgacccctaccgcaccaccgactgcaccaaaaacgtggtccgggtgggagaagagatggcccaggtgttccgaagccagggctttgaggtggtccacgacaccaccctgtacgactaccccgcctataacggggcctatgagcgctcctgcgcaggggtggagaagtggctggagcagtatcccacgatcaaacttgttttggatgtccaccgggacgccctggtgtcggcggacggggcggcctataagctggtgagcgaggtggaggggcagaaggtagcccaggtgatgctggtggtgggcagcaacgactccgggatggagcaccccaactggcgggaaaatctggccctggccgtcaagctccagctggagctcacccgggactggggacagctggcccggcccatcaccctccgctccagccgctacaaccagcacctctccccgggttcccttctggtagaggtggggggacatggaaatacgctccaggaggccatcgccggggcacgcctcttcgcccagagcatagggcaggtgctcaaaaccatggaggagccgtaaaaagggctgagggcccccgcttaatggcgggggccctcagcatgtcaaaaaagttacagtctgccgcgcgcagggtttgtccgcc

SEQ ID NO: 13661 - DNA, 489 bp, Unknown
  gut microbiota DNA sequence
tcatgagtgcggagtgagaactgctggaggagatagctgttgttcagcaacagagtatcattggggcagaggacctgctcataggtcatccgcttggcacccagagagaccgtttcgaggatctccccgctgccatcgaagtgatagaggatctcgtcctcaaaatctccggccatcctcgtcaggaagaagtcatcccgtgtgagggcggcagccaggggcataaagccgttgctgtcctttccaacaaaccggtggcaccgcgcctgcccaacagcggcatccggattctgatagacaaatcctttccgcatctggcccatcatggcgctggcagccttgctcttgacctggaaggcggagtcgcacaggatctccttgaccttaccgccattcaagcaggttcggatggtatgctcgtcaatttcgatccgccactgcttatttgtggcagggttgagaaaggttttttccattggtgcaggcacc

SEQ ID NO: 13662 - DNA, 15679 bp, Unknown
  gut microbiota DNA sequence
accgccatggccagagacagcgccgccgcagtggacacagtcacaaatctctgcatctttcttttcattttgtttgcttcctccctaaatttgttcacgctctgcaaaatagatgtcttgttcctccgctttaccgcctcccatttttcgttgttttccataatttttgctgcttggactgatgtctttcattatatcctgttcaatacattttttctagtgttaaattatagatagtaccatgcaaaagattcattgaatcttttgcaaatgacaggcgggggaggccctccggcctcccccgcccgttccctttcaacccccggtcagtcttttcagcccctcccagagctcgatggccttgaacttcagcacatatccctgggtctcgccagtcatcagggcggcctggtcatcggtgaagcgtcccgcctgggccgcctcctccaccgtctcgctggccgcacccaagcacaggggcgggaaggccacgcaccaccagttctgccccgctccctcgccgatgaccacccgcagggccgtgtattctcctgccggaagggcaaagtcctcatactccttggtggggaaccaggtctctgtcagctccgcccggaccgcgtagtcgcagccccgctcctccagcacccgctgtcctgccgctgccagctcaggcagatgctcctggatggccgccgccgccgccgtgcggtctgcccccgccgggtacagctcctccgcgtgggccaggacctggtcccgaacctccagtttcaatgcctggtcctccgggctgtctgaattggcgatgacatggaggcggatcacctggtccgccagccgctcctgctcccggtccagccatccccccagtgccagtgcgcacagcacgccgcacatcagcgccaactcccagcgcttcatttttcggtccatatacaacaccatccatacctttcgtattttccgagtggaattctacgaagagtatggacagtgtctttccttcttaaaccgtttccgccaaaaatgtatcccggttctgctctgacagaagggcacaggcctcctctgccagctccttccgttggaacaggccaaaggcggtggggcccgtcccgctcatggtggcgcccagggctccgcactggatcagtgtgtgcttgatctctgccacccttacctcctgccgctccggcagcactttctcaaacacgttgtacatgcgccgggccacaccaggcaggtcccccgccgccagcgctgccagcagtccggcggtgtcgggccggcagcggacccgcatcccgtcgatgcgtgcaaacagctctggcgtggagacggggaaatccggcttgcacacagccacccagcaccggggcagcgggggcagtggggtcagcatctccccccgcccctcggccaaggcggtgccgcccagtacgcagtaagggacgtcggagcccaccccttcccccacccgtgccagctcctccatggagaagggattcccctccttctcgttcagggcccgcagcacagcggcggcatcggtgctgccgccggccatcccggcgcacaccgggatgcgcttgcggatggagatctccagtcccggcaccggtcgtcccagcgtctcatagaagcggagcgcggcggcggcggccaggttcttgggccccgtgggcaggaaatgcaggtcggtctgcacccgcacgccctccccgcccggctccagggtgagggtatcccccagggtgatagactgcatcaccatcttcaggtcgtggtagccgtcaggccgctttcccagcacatccagcgtcaggttcagcttggcgggggcaaatcgttccatcgtccgcacctccaccggttcacagccggatcttccgggcctctaagtaaaagcgcttgtcgtgggcctcccccatggagaaggtctttcggggcagcactccgtcgtggatcacggtggggaacagctcctcctttttcatgggcggcaggaggaagccgatggccttgggccgccgggtcagctcttccactacctcggccccgtggatatagtccaggctgacgccggaccgcccctccatccaccggtccaggaaggactgaagggttcccaccgccagctgggcggcggggtcagggacggtgagagccccccgggcgttcccgtagaggtagcggatcacatgtccgtccccctccccctcccgggcatcggggtaagccatgcgcagggcggagagcacctgggccggctccgcgccgaagaccacccggtggatgggctcgaactccaaggactcgtcgtggaggttgaccagctccgccagggcgtaccgggagggcagggtctcccactgatcctggggcgtgatgcgcttctgccgctcatagcactccttggcggtggccagggagtggttcccgtctcccacagcgaacaggaggacaggctggtcctgggtcccgtagcgggcgttgaaggcggcgggatcagccagagcctggagggcgccggccacggcggagagctgctccctccccagcttccaaccggccaggtggccgccccgctccatcaaatcgaagtcatagacctgctccatgcccgccttctcccgggccaggggctcgatgacggtgcgctccggatcgtcagtgaggagcatgacgtgaggcagctcaatgggggcgttcttccgcaccgccactcggggcgggatacgggagaggacggtgccctcggtggcccgcacctgggccggggagcccggctcatagtcgtactgctccaggtccaccatgcccaccagtcctctgcggagctttccgttgtgcagggtgcgctctacatagatcatggtctggggcagaagggcaaacctctcctcccgcagatagcgggacatggtgttgttgatctccatgatgtcggtctccacgctgggaccgtccagacagctctccggcaggatgagccgcagggatgagggagcccgccccaccctctcttctacccgctgccagtattccggctgtgaggtgtactggtcacaggccaccacgctccacaggcccaagtcgcagttttgggggagcaggatatccgccggacgaaaggggagggtttcaaataaatcattcatcaatggtcactcactttaatcgttctcttgatgcagggggatttttccggccttggccgttttggttctttccgcagggcgcgatgacgtggcgcgccgtcttgggtagttttcgcaggtgggtcgccgcctgcgggcggcaagtgactttcccagcgccgggaaagtcaccaaaggatcgccggggggcagctcaggatgatcgcttcacgctcatatccgccttaccccgggtccttcattacggggacacgctcctgtttggtcatacgttatttccggctcgcaaaatctgagtggctggtctaaattcccaccgggccactgggccctggtctgcagaaattcagggcgcatgcaattccacaactgcgcctggctttgctaagccgacactcccggtgcgaatcctggcatgccggtctgggaccggcctctacggtatcaccgaagaggcccctttttgcaggagcggcacacttggacggcacgctgtgggaaaggttactttttgagacgctgccactcctccagctgggagattatggcatccagcttttcttccatccggtcccactgtttcttgaccttccagcaaaggaccaccagcgctcccagccccacagccttcacagcaatcaggagcagggccgcgatgcgggccgccatgtcaaggctgcccagccaggccgccaggtagacgaggaaaataagtccaaaaatgaccgccacggtcttcatagggcccactcctttcgcaacacctatctttgcttctgctctgttgggggcactcctcaatgtgatttgaagtgcggtctgatttcgtcttctccgttctttagacagagagctatcagcctatggcccccttgatggcttccaacaactcgccgaactcctcaaaggcgggcagctccgggtggtcggccctgatggcctgggtgctcttgaacaggaagcccgccttgctggcctggatcatccccaggtcgttgaagctgtccccgctggcgatcgtctcatagcccatggactggagggccttcaccgtggtcagcttggactgggggcagcgcatccgatagcccgtgatggctccgtcgggggccacctccagggtgttgcagaagatggtgggccagttcagcttggccatcaggggcttggcaaactgctcgaaggtgtcgctgaggatgaccacctgggtgagggtgcgcagctcgtccaggaactccttggcccccggcagggggtcgatcttggcgatggtggcctggatctccttcaggcccaggccgtgctccttcaggatctccaagcgccacttcatcagcttgtcatagtccggctcgtcccgggtggtgcgcttcagctccgggataccgctctcctccgcaaaggcgatccaaatctccgggaccaggaccccctccatatccaggcatacgatattcatggtcgattctcctctctgtttcccggcctgatgtccccgaccgagtcccttctcttgtgtggtccccgacccacagggtgcagggattacatggggctcgtcccagaggcagaccaaagccgggcgcttttcaatacgatttgtaatttttttcgaataatatcctatttgagttcattttcaacccctgccctggctgcggcgcaggttggtcaggaagttgtccatccgggtgatggcctcggagatatccttcatcgaggcggcatagcaggcccggacgaagccctcgcccccggggccgaaggcggaaccggggatcaccgctacccgctcctcccgcaggaagcgctcacagaactcgttggaggtcaggccagtggaacggatatccgggaagacgtagaaagcgcccttgggctcaaagcagctcagaccgatgcggcgcagattctccaccagatagcggcggcggctgtcgtactcctcccgcatgtgctcgatgtcccggtccccgttgcgcatggcctcgatggcggcatactggctgacggtgggggcggacatgataccgaactggtgcagcttggtcaggcactggatgataggcttgggggcgcagacatagcccatccgccagccagtcatggcgtggctcttggagaaaccgttgaccacgatggtgcggtcatacatctcctccagattggccatggacacatggcgctggccgtaggtcagctcggcatagatctcatcggagaccaccatgatctccgtgtcccgcagcacctgggccagagcctccaggtcctgccgctccataatgccgccggtggggttggaggggaagggcagcaccagcgccttggtcctgggggtaatggcggccttcagctgctcaggcgtcaggcggaactggttctctgccttcagctccacatagaccgggacaccccccgccatctcggtgagcggtccgtagcagacaaaggatgggacggggatgataacctcgtcccccgggttcagcagcacccgcagggagagatccagcgcctcgctgccccctactgtgaccaagatctggctggcgtagtcgtatttcaggccgaaccggcggtccagatagctggcgatctcccgccgcagctccgccatgcccgcgttggaggtatatttggtgtacccccgctccagggaatagatacccgcatcccggatgtgccagggtgtcacaaagtcgggttccccgatgcccagggaaatggcgtccttcatctcctccagaatatcaaaaaacttccgaatgccagagggctggatgccctggatcttctgattcaagatcgtctcataattcatacaaagatatactccctttcctggggctcctgaggccggaaaatcaggtgcttctccttatattttttcaaaatgaaatgggtggccgtgccggtgaccccctccagtggggccaggcgctcgcccacaaactgggctacctcccgcaggctgcgtccagagatgatgactgtcaggtcgaaggagccgctcatcagatacatgctctccacctcgtcatactgatagatgcgctcggcgatgcggtcaaatccggccagggactgaggcgtcaccttcacctcgatcagggcggtgacattctcccgcttgacccggtcccagtcgatcacagcctggtatcccaggatcacgccctcctcttccagccggcgcagttcatcctttgcctctgcctcggtcatgccggcctgtgctgccagctgtgcgggagactgtgtgcagtcctgttccaaaagctccaaaagtgtgttcatgtcacggggacctccctttccgaaatctttgactgcggagtccggcagccggtgctccctgtcagaaatgaatatcgtatttattatatctcatttaccacccaagcgcaatgctgccttttagatcctccccaagatacaccaggcccccctgcggccataagacgcaggggggcctgtgtttgactggtaaagatccaggctctgctctttctgcagaatcaggccgccttgacagccttactgccctttccggtaatgatctggaacaccagcaccacgaccagaacgccgataccgatgatgtcggtcagagtgcccggatggatcagcatcagaccggcggcgatacacacgatccgcacgccccagttcagatcccggagcatgtagccgatcatgccggcggcgatgaggaacatacccaccgaggaggtaaggaccacctgcaccacgtccagcgggccgaaatcgccaatgaacagcatcgtgttattgaaagcaaagatgtagggcacgatgaaggccgcgatggccagacgggtggcgttgaaggccgtcctcataggcggcgctttggcgatggcggagccggcataggcggccagggccacgggcggggtgatgtcggccacaatgccgaagtagaacacgaagaagttggcagccatcagatccatgcccatgccctgcaccaggataggggcacaagtggtggccataatgacgtagttggcggtggtggggacgcccatgcccagcacgatgcagcacagcatagtgaggaacagggcgatgatcagctgaccgttggcgacctgtacgatggcggtgatgagcacattggccagaccggtcatcgtcaccacgccggcgatgatgcccgcgatgccgcaggctacgcctacagacagggtattccgggtcccggcggccaaggcgtccacataggagggggccgcctcacggttgggcttgctcattaccgtgaagagaacgaacagcaccacccaaaggcccatacagatgttatccaggttctccgggatccattcgtaggacttgttgcccaggatcacgatgacagccagggggatgaggggcagggccatgagcagctttttgccgcccttctcccggtccaccatacccatggtgatagcggcgaaggtggcatacacagcgctgcgggacatggtgaagcccacgatgatcatgtacaccagcacgatcagcggcaccagcaggtagatcttgggaaggatatccttggccttgggcagggagtccttgggcagaccgtgcagccccatcttcttggccttgaagtggaccataaggaagatgcccgcgaagtacaggaaagcgggcaggatggcccggatcacgatctcagagtaggggacgccgaccatctcggccatgaggaaagcggcggcgcccatgatggggggcatgatctgtccgccagtggaggcggcggcctcaacggcacccgcgaactccgggggatagccagtcttcttcatcagggggatggtaacggcgccggtggtcacggtgttgcccacagaggaaccggacaccatgccgcacagagcggaagagatgacggctaccttggcgggaccgccggaggcggagcctgcgatggcgtttgccccttcaatgaagaagttggcgatgccggtggcctccaggaaagcgccgaagatgatgaacagcacgatgtaggtgcagcacacgctgatgggggtaccaatgacgccgttggtggtgtagaacaggttgtacacaatgctctgcaccgtctttccggcaaacatgggcagataagcataaagaacgaaggccgtggccacgcataggatggggatgcccaccacccggcggcagcactccgccaggatcaggatgccgatgatacccagcaccacctcagtggtgccgatccgggtcatcatggccacgatgctcttcaggttgatgacatagttaaagtagcaggccgcgcccaccactgccaatacgatgtcataccaagggatgtgattcaccttctgtgttccctttttcgcagggtacagaatgaatacaaacaaaatgataaagcccaaaaacaggcagtgccggacgcggttgtcaaagctggcaaacaggttcatccacaccatgaacagggaaaagagagccagcatgatccggatgactagctccgggactccggtccagatccgggtgttggattcgcggtcgtacttcttcatgaccgcttccacgtcctccgccgttcccacgtctacgctgggatcaccggcaggagccgtgttgacgctgcgatcttccaaatcgcccattattctcctccttagtcgcatcgttctgacgccgcccctagcggacaaggcggtcagaacagccgatactcgtacccgatggagaccaccgagcttcttccaaacagtgcgctcaaactgatgactcgaatcccgctctccaaagtcacctcctccatcccatcttccgggaacaccccgaccagatcacggacctggtcatagtcctcccggatgtcgcccaggatcagcgtgtgatctgatcgggagcctacgatatattgcagggggatcgtctcaaaatccttgtggatattgctcactacaatggagccgtcctcgcccaatgtcatggactccccttcgttcagctggctctgtaccccggcgccgaagctgtaatagtaggtctgctccacatagatcttgtgctcctggatctgatagcagtcgatcagcggatttttatggaccgagtggataaagcccacgcagaaccagtctccctcgtccaggcggtagcggacgcaggtctcaccgttttccccgccgcgcagggtgagataccagcccgcccgcacgctgactgttgctagaagagccgccgcaataatgatgattatcgcggcggctcccattaccctttttttcatcagatcccggtgtcactcgtcaccggaacttgaccggcgggccgtgcggcgaggtcggtcctccctcacaggacacccttctcggtatagaacttctcagcgccgggatgcataggcacatcacccacaccggccaccgcgttctccagggtcaggaactggaacttggcctgagtagcggccatgctctcctgattctcgaacatctgggtcagcagttcatagacgaagtcctcggacaggtcctcagaggccaccagaactgccttcacggccacgcaggtcacatcatagtcgatgttgttggggtaggtgccggcgggcaggtcctcctggaccaggaaggggtagttggtggtcagatactccacggcctcgggagtcaggctgatcatatcgaattcagcggtggcatccagctcagtgatcgaggtggtgggggcgccggccacggtgaaagcggcgtcgatcttgccgtccttcaggtcgttggcggcgtcgccgaaggaaccgttggtggcggtgatgtcggcggtggtcatgccgtaggcctccaggacctggcgggcgttgacctcagtgccggagcccacgtcgcccacgcagacggtcttgcccttcagctcggatacgtccttgatgccgggggcggaaatgatctgcacggtctcgttgtacaggccggccacccactggctgctggtctcagcctcggtgaacaggtcggtgccgctgtgggcataggagagcacgtcggactgcaggatggacatctgggcattgccgtcagccacctccaggatgttggcggaagaggcaccggtggaagtcacattcagctggccggtggtcagcagggggttgagggtggtctgcatcacgccgccgtaggcgtaataggtgccggaggtgccgccggtcgccagggtgacggtctcgccggagccgccggccggaggtgtggtggtggaagtagtgccggtagaagcggcaggagtagaagtggtaccggaattgctgggctgattgggattgccgcagctggccagcgccagggacagagacagcgccaggatgagagcaagtgttttcttcatattctctttcctccatttcaagctttactcggccttccgcccgagggatgcggccgacctatttgcagagttattatattacattttgcctataattgcaagtcgcttttttaattttcggtcattttgcataatttccttcatttttgcagtttttttctctgtttttctcttttttcttttggatttcctcatttttccttcttttcaatataatgatgcagtatttgcatcattccatttttaacattttccccctgcactccgacgcccttactcccgcatagcctgttccagcttctccagcgcccgcttctcaatgcgcgatacataggaccggctgatgccgcagcgggaggcgatctcccgctgtgttctgggagggcggtcatccaggccgtagcgcagggtgatgatggaccgctcccgatcggtcaggcaggtggccacgcagtgccgtaccttgcggcaggcgtcccgggtgtccagttcctccagcatgttgtcgtccacagcgatcacatccatcagcgacagggagctgccgtcgtcatcgccatccaggctgtccgccagtgacacctcccctgccagctttttctgcgcccggaagtgcatcaggatctcgttttcgatgcagcggctggcgtaggtagccagacggacgtttttatcacttttgaaggtagaaatccccttgatcagcccgatagtcccgatggagatcagatcgtcctggtctccagtctgggcatagtactttttcacgatatgggccaccagccgcaggttatgctccaccagcaggttgcgggcctccaggtccccctgggcggcccgctccaggtattcccgctcctccgcggccttcagcggccgtgggaaggacccgctcccacccgagagccgcagagtaaaaaacagaccgttcatcattagatagatccatggcgacaacatatgccaacacctccgccctactctattccccccacgcaagtccctattctcccggtccttcccctctgtcgaaagttccggcccacctgcccgtgcaaagagttcccccggacacgccctaaggcgcgtccgggggagctctctttccgttcccggtgttactgcttctcctggagggacaggctggcgatgaactgctgggcggtgcgcggggtgcgccccgcgtggcggatctcccaggtcatggcctgggcgtggagcagctcagcggacatggccaccccggcccgggcagccagatggtccactagggccagataatccgccttgctcatggtgaggtaggggatacgcagtccaaaccgctccgccagggcagtcttctccgagatggtctcaaaggcgtccacctcatcccccgcccggtcgctgaaagactgacggaccaggtggcggcggttagaggtggcgtagatggccacattggccgggcggcgctccagcccgccctccaggatagtcttcatgatggaataggtattgtcgtcctggtcgaaagccaggtcgtcgatgaagaggatgaacttctgccgccgtcccgccagggagcggatcagccggggcatctgggccagcccctccttctgcacctcgatcagccgcagatccccgaagccggggcggaacagcatagactttacagtggctgacttgccagtgccgccgtcgccaaagaggagcacgttgttcaccaggtgcccctccagcatggcctgggtgttggccaccacctgtccccgctgcagctcgtagcccatcagctcctccggccgggggcagtccgggtcggccaccgggatcagctccccgctgtcccagacaaaggcccggtagcgggcgaacaggccgcagccattctcctggtaaaacgccgtaaggccgtcaaagtcaaaaggggcagacgcccgccaccggggcagcccagccagcaccggagcgtacaccgggggcagcagattggacagctcccccacataccggtcgcagtccatccgggccagaaggaggaaggtctccacctcccgccgggctgcgttctccagggcggggtcgctgtcccctcgctccgccagcgttccataggggctctccacatagcgcaggccgtcccagagccagtcacccagtccctggtatccctcccgccgcagcaggtggaagagctgcgtataggcctccagggcctccgttccacgcccctgggccagactgcccaccagggcccggctctgctccatcaccggcgtcttcagcagctccgcataggcagatacgccatggagggccgcccaaagtacatcaaattccatcttatttctcccagttccccctgcttccacaggtgatcttttttcattgtaaagcggacagggcggccttgtcaaccgggtgggggtatgatacaataaataaatctgactcaggaaaggaagacagaggatgcggcgcgtgaaacggcggcctgctcgggccccgccccgctgtccttgcccatatgctgtccattggaggcatccccatcgaagcgcccctggccctgggccctatggccggggtcactgatatggccttccgcaccatctgccgggagcagggcgccgccctgacctgcacagagatggtcagcgccaaggccttgtgttatcaggataagaagtccatccccctgctccagctgggggatggcgagcatcccgccgccgcccagatcttcggcagcgacccggtctgcatggaggaggcggccgccatcgcccgccaggtctccggcgccgacttcatcgacatcaacatgggctgcccggtgcccaaggtggccaacagcggggacggctccggcctgatgcgtaccccggacaaggcggttcgggtggctgaggcggtcatccggggggccggctgtccggtgacggtgaagttccggctgggttgggacaagggctccatcaactgcgtggagtttgcccgggccatggaggaggccggcgtggccgccgtggccgtccacgggcggacccgggcccagatgtacgccggccgggcggactgggaccacatccgcgccgtgaaggaggcggtgaagatccctgtgatcgccaacggcgacgtgttcaagccggaggacgccccccgtatcctggcctacactggggcggacatggccatgatcggccggggggtattcggcaacccctggctgttcgcccagtgccgggcagctctggagggccgcgagatccctcccctgccgccgctggcggagcgttgcgacacggcggtgcgccagttccagctctccgccgccaacaagggggagaagattgcctgtctggaggcccggcgccactacgcatggtatctgaagggggtcccccacgcgggatattataaggagcagatcgtgaagatcactaccctggaggacgtgtaccgggtgacaaaggggatcaagcgggacctgtgctgaccccggccgcggggccggagggtttggatttggaaggggtgaaggtatgactgaccaggagctggcggcccgcgcccgggacggggaccaggacgccttcgaacagctggtccgggacaacgaaaaacggatctatacccttgcgctgcgaatgacgggcagccgtgaggatgctctggatctggcccaggatgcctttttccaggcgtggaaagccctccccacctttcagggggagagcagctttgccacctggctctaccgcctggccaccaacctgtgcctggaccatctgcggactcagaagaggcggacccagtccatggggcccgccctctccctggacgacgaggaaaacggtcccgtccaggtggcggaccagcagctccagccccaggaggcggtggagcgctcagagcgccgccgggccctggaacgggggctggcctccctcccggatcaccaccgccaggtgctgatcatgcgggagttgtccggactctcctaccaggagatcgcccaggtcctggacctggatctggggactgtgaaatcccgtatcgcccgggctcgtctctccctgcgaaaaattttgctggaggatgggaacttttttgactctccggcgtctatggagatagaacgacacagaaaggagtgacccggcatgtcaggctgtgaacgtgcgctggacctgatcggcctgcgtcttgacggccccctgtccccggaagagcagcgggagctggacgcccacctggaacaatgccctgcctgccgggccgccgcccgggagctggaggagctggagggggccctcgtccagctgggtgagtgcgatcccccgccccagctcgtctccggcgtgatggagcgggtacgcgccgacagcgcccccgccaaggtcgtcccgctctggaaacgccctgccttccggggagcactgggcatggcggcctgcgccgccctgtgcatcggcctgcttccccaaatggcgggtctctcctccggcggcgggaacagcaccggcgccgcccctgccagcgcctcggagtcccaggccgcttcctccactcccgctgccggtgcctatgctgccggcggggagtcctccccctctgctgaggtccgctccagcaatgcgggccgtccggaagccgaggacaccgccccgatggaggcggagtcccccgcctccatcgctcccttctccctgcaggaacagggagcgggcgcaccggaggacttctccgcccttgcccccgccctgtccgaagacctggccggacagctgggccagagtcccggccggctgctcctgttctccaccattccagaggaactggaggaccgggactggcaggagacggacggctttcgctggaccgccctggaagcggagggggaccactccctgctggacgccctgaccgcccaggccgccgccctgtgggagagcggggcggagggccccgcagtggctctggtgtatccctgaatcttacttcagccctggaccgggcgcgatttgcgcccggtccagggctcttttctgctttttttcgtgggagagccgctttttcttcatttttgtttcattttacgtctgcgacaaaaaagaggttgtcagatgtgcattttt

SEQ ID NO: 13663 - DNA, 44952 bp, Unknown
  gut microbiota DNA sequence
gactcccgcccgaggaatcaaagagcccgggaccccgccgcgggccggcccgcggtgggcgatcgaccacacggtggcggcgcgaaatgtatttcagatcaagattaaggaggcagcaccgggctgcagcttgaagcagtagtgcggcccactccagcgagaaagaattattgtaaggtgtgatacgagagatgagcaatatgatccaggccgcgcgggctcaggtcgctgagctgacccaggccgcgtacgagagggccgctgcagcaggtgtgctgaccggcggagcagaggtgaaggccaccgtggagatccccaaagacaccgctcacggggactatgcctcctccttcgctatggcgggggccaaggccctgcacatggccccacgggccattgcccaggccattgtggaccacatggacctgacagggagctatttccagaaggtagacatcgccggccccggttttctgaactttactctggggcccaagtggtacggccaggtcctcgcccaggtggagcaggaggggcctgagtacggctccggcagcgaaggaaagggcgagcgggtgatggtggagttcgtctccgccaaccccaccggccccatgcacatgggcaacgcccgtggcggcgtactgggggacaccctggccaacgtgctgaagcgggacggctgggacacctggaaagaattttatgtcaacgacgccggcaaccaggtccacaaattcgccatgtccatctacgcccgctgcatgcagctgacggtgggggaggagaactaccccttcccggaggagggctaccatggggacgacatccgggagctggcccggggcttcctggcccaggcgggagagtttccaggccagacctctcaggatgcgtgggagaccgctatggcggaatatggcctgtccgtcaacatccccaggatgaaagcggacctgaaaaagtacggcatcgagtatgaccagtggttcctggagtctgaactgcacaacagcggctatgtggaggagactgtacagctgctcaccgacaagggctggacctatgagaaggacggggccctgtggctgaacaccacccagctgctgaaggaaaagttcatgcgggaggggaagagccaggagcaggtggacaagctggacctgaaggacgacgtgctctgccgggccaacggcttctatacctactttgccgccgatatcgcctaccaccgcaacaagctggaggtgcgggggtttgacaaggccatcaacatctggggcgccgaccaccacggccatgtggcccggctccaggccgccctggatgggctgggcctggacggctcccaccggctggtggtggtgctgatgcagctggtcaacctgatgcaggacggcaagccggtgcggatgtccaagcgctccggcaaggcgatcgccctccacgacctgctggacgagatctcagtggacgcggcccggtacttcttcaactcccgggccagcaccagccccctggactttgacctggacctggcggtgcgggaggacagcgagaacccggtgtactatgtccagtatgcccacgcccgcatctgctccttggtgtcccggctggcggaggagggggcggcggtccccgccgctgcgggggtggacgccggtgtgctgaacgccccggaggagctggcccttatcaaggctctgtcccagtatccggaggagctccatctggcggctcgggattatgaccccagccgcattaaccggtatctggtgtccctggccggggacttccaccgcttctacaacgcctgccgcatcaagggggaggagcccggcgtgctctccgcccggctgaagctggcggacagcgtgcgggccgtcctggccaacggcctgggtctgctgggcgtcaccgcgccggagaagatgtaacgatctggacgttgagccggccctcagcccccagggctgagggccggctttttccaaaccatgagagaggaacgtgataccatgccgcagaaaaaaggggccctggaccggatccgggacagactccaggccaaccggaaccggctgacctacgtcctgctgctgctggggggcctgctgggactggcggggtgggccctgctgccggaggtggtagccatccacgtccagcaggcggccaacatcgggaaaaacaccatcctgctggcggacctggccctgacctggggattcaccgccgccttctgggtccgccctagggagatcatctattttgtagcagcatgtttgggggcgttcctgtctctgagcgtgctcatcatcaatgtgatgctctgaaagaggtggggaacggaatgacgctggaacagctggaggagaaactgaagggcagagagccggggctgatggacgcctcgggacagtacgcagttctggtccctctggtggagcgggaggggaagctgcatatcctctatgaggtgcgctcacaggacatgcgccgccagcccggggaggtctgctttcccggagggcggatagagggagatgagaccccggaggcctgcgccatccgggagacggaggaagagctgggcatccccacagcatccatcaccgttctgggacggctggattttgtggcccaccgagccaatttcatcatgtatccggtgctggccagggtggagacggctgcggcagagaggatggccctgaacccggcggaggtagatcacacctttctggtgccgctggagcacatcgtgcacaatccgccgctggagtacagctacgccctgaagccccgcccgccggcggacttcccctatcagctgatcggcatcccacggggatatcggtggcagcaggggagggagacggtgcccgtctatctgtggcagggccacgccatctgggggctgaccgggcggatcacacggcatctggcgggcctgctgggcggagagatgggatgagcggggcggagcacctgggcccctaccttctgggggtaaaggagggggtctttcccctggggggagacagcctggccctgggggccttcgctacagtgaagcggggctggcgggtgtgcgacctggggacggggagcggctgtctgctcctgatgctggcggcccgggagggggggctctctctcacgggagtggagcgggaggagcgggcggcccagtgtgcccgggagaacctggcccacagcggcctggaggggacggtcctccaggcggactggcggcaggtgaccctgccggctggcgggttcgacctggtcatctccaatcccccctacttccagcctggacacggcggggacgggggcggggcccggcaggccgactgctcccttgaggagctgtgccgcaccgcggcccgcctgctgagaaacagggggcggttcgccctgtgccaccggccggagcggctggcggacctgatgtgcgccctgcgggggagcggcctggagcccaaacggatgcggctgctggcccatgggccggagcatcccccctcctgtgttctgatggaggcggtgcgccgggggcggcccggtctgcggatcgaaccgtgaggggcgcaggtgctcccaactggagtgctgaaaaatttcagaaaaattttgggccccatgcaataaacgagacctcccatgcattatgtagttgaacggcaaacagataagcccgagatacagccggacacaacataaaatgacatttgggaggaacatgaaatgaaacggaactggaagagcctgatggtgagcggaactgtactgacggtcctggcgggagcgctgactctgcctgccctggcctccgtgggccagcggacggccgccctgcattatcagaacatcaaggtgacgctggatggcaggaccctggatctgacggacagcaggggcaacgaggtggagcccttcaccatcgacgggacgacctatctgccgctggcttccatcagcaaggcgctgggaatggacgtgcggtgggatgccgataccaacactgtgatcctgaacaccaagggcaccggcaccactgccgctgagagctacatcggggtggaacgtgccaaggagatcgccctgaaggatgcggggctctctgcctcccaggtcagctttgtccgggcggggctggactgggataacggccgcatggagtacgaggtggagttctggaaggacaacgtggagtacgactatgagatcgacgcctacactggcaccatcctccacagcgaccgggacatcgaggggtacagcatccccgcccagtcctccgccgacatcggcgccgaccgtgccaaggagatcgcgctggaccacgccggtgtgtccgcctccaaggccacctttgtgcgggcccatctggactatgaggacggacgccgggtgtacgatgtggagttttacagcggcagcaaggagtatgactatgagatcgatgccgccagcggcgatatcctgagctgggactacgacgccgaatactatacaggtcaggccgccggtcagaccggcagctacctcagtgaggcggaggtccgccagatcgtggaggaccgggcgggggtctccgggaccttccgggagctgcatctggaccgggacgatggccgcgtagtctacgagggcgagatgcgggacggctggaccgagtatgagttcacgctggacgcggtgaccggtaccatcctggagtgggacgtggaccggcactgagcattggtttcatgacagaacggcaagaggccgccgcggagttccgcggcggcctctttggctgagcggaggcatgtcatatgggagggggctgctttgagcgggaaagggaacggagaaaaaatgggcggcccggagctccgttcggggatagaaaaaaggcgggtcctgtgttataatggctccatggaaacaaaccgagccgccctgtcccagggtgggcggcggcggaaaggagcataaggcatggcaggaaccctctatctggtcccgactcccatcggcaatctgggggacatctccccgcggatggcggatactttggcgcaggcggacttcattgccgcagaagacacccgggtgacagtgaagctcctcaaccatctggggttgaagaagcctatggtcacctaccaccggcacaacaccgcagccagcggtcaggcggtgctggaccgcctgatggcaggggagagctgtgctctggtcacggacgcggggatgccggccatctccgacccgggggaggagatggtggccctgtgtgccgctgccggggtcccggtggtacccatcccgggtccctgcgccctggtcacggcgctggcagcctccggccagcccaccggccgcttcacctttgagggctttttggccatgaacaagaaaaaccgccgggcccacctggagtccctgcggggggaggagcggaccatgatcttctacgaggccccccacaagctggttgccaccctccgggacttggcggacacttttggccgggagcgggagatatctctgtgccgggagctgaccaagctccatgaggagatccggcgcaccactctgggggaggcggcggactggtatggggaggagacgccacggggagagttcgtcctggtagtccggggtgcccagccggaggaggagggggaatgcactctggaggacggcctgacattggcggagcggctgcgggaggaggaggggctctccctgcgggacgcggtgcgccaggcggccaaggagctggggctctcacggaatgagctctaccgcctggcggtggagcaggaataaaaatggcccctgcccgggaaagggcaggggccgtctgctgtgggggtcatggtttgcactggccgcagggggaatatccctgagcgatcagctcctcacggctgccggaaaaggcctggcggttctcctctttcatggaggcggcgccggagcaggaggggagatgaaattttccagagctggtgttcaggatgtacagggtgtcctccggctccttctgggtgctgtcctctggaagagcatccccctccagggagctggcaccggtagcgtagtcgatggtgatgccgggctggtcattatagacatagacgttgaagcagatgccctcgccctggtcctccaccgactcggcctccatctgcacgccccgggccaccagctcagtgccctgaaagatgggagtgacccggtagaggacgtggttgccggtctcctggacgtaatccgccaccatgttttcaaaggggagcatcccctccacgttgagatagcgggtgccggtgatgaggttctgctcattggcattctcaccgctgagctgatagccgatgagatggcagcggttgtacaggtacttgccgtccacgatgtcatatttcaccgtctgccagccgctgggcttgacttggccgatgctgtcccgttcctccgtgggcatcaggtccagaccgatgttggcataggcggtgccgcaccggccaagcagatccaggctgctgtaagtctcgaaagagtcggtggtgaagtcctcctgggaaaagccgggctggttgtcctggagcaccacatagggctcgccggagaagggcgggacgtcctccagagagaaggaggagggcgcggcctgaaggagctggccgcagccggacagcgccgcgcagagcagcaggaggagggggatgagatggagcgtacgtattttcatgggcggtagacttcctttgtgatttttttatgggaggagccgggaaattcctcccggcccaacagggaccaccccagggcggccgggtccaggtccagaaacaggtccgcggggtagcggcggttccagtgatagaggaccatggactccacccggtccaggaagggcaggatgggccggtcctccagaaagcagaactcccccggggcggcctgggcgagaaagtcctccgaggtcaggatggagctggagaggccgtcccgcagggaggagaagagggagcgggagccgggggccatccacaggggggagccggcgcacgtccggagcacgtcttggcagagcacccggtcccggctgagccggcggccatggaacagcaggccgccccggtcatcgatgcaggagatcaggatcatggtccaccctctttcttcggaaacagtacatttgttctggtgtgcttgttgattgtagcagagatggggccaaaattccagaggaaaagaaaaaatttttctccgttccgagaaaaggcggccctccctaggaccttgtatccggggcgtccgatgtggtatgatggagacgtccggtacatgatcaggactggaaaggaatgtttggatatggaactggaaacaaaggaacttttggacctctcccacaccctggcgggggagtatctggcgggatttcaatacccctggcaggccctggacgggatcaaggagctgatcctgaccctgggggctgcgctgccgccggaggaatatgaccagcccgccccccaggtctgggtgcataaaacggcggtggtgttccccacagcctatctgggggcgccctgcatcattgggcctgagactgaggtgcgccactgtgcgtttatccggggctcggccctggtgggggcccactgcgtggtgggcaattccgtggagctgaaaaacgtgatcctgttcgacaacgtgcagaccccccactacaactatgtgggagactccatcctgggctataagagccatatgggtgccggctccatcacctccaacgtgaagtcagacaagacgctggtgacagtgaagaacggagcagagcggatcgaaacgggcaggaagaagttcggcgccatcctgggcgaccatgtggaggtgggctgcaactccgtgctgaatccggggaccgtggtggggcgggggagcagcatctacccggtctcctgcgtccggggtgccatcccggcgggcagcatcgtcaagaccgggggcgtggtggtccaaaggagctgagtgccgcgggggatgcggaacaagacagagggcgcggcgggatctgccgcgccctcaagctgtttgtgggagccctctctcccacggaccggcggaggcggagaccaaaagaaaaacgccccaaatcctggctggatccagagcgtttaaaaaaccgcataaaatttgtctgctgtttctatctgggctgctgggggatcaaatcagaactgtccgcactcctggagtgccttgatgcacttggggcagatattcttgccgcggaaaacgatgacatcccgggcgtcatcacagaaaatgcaggcgggctgatattttttcagaatgatggacggtccatccatatagatctccagggagtctttctccgcgatatccaatgtacggcgcagttcgatgggaaggacgatacggcccagctcatcgaccttccggacaatgccggtagatttcaatgtgatcattcctttcttccttcttcatgtcccagtcgtcaaaacgatcgatgcggtttcgcagtcataatgtacgattttggaaactaaacattattatactacaaagtgcgactgtgtcaaccataatttgtgaagattctgcaaaaagtgttcggaaagagcaaaaaatgatgggaaaacagggaaatcagaaaaatgaacaccacggcagagaatggttatcttttccagacatgtcccgtatatatgatttgaaggggggacaggggtatgacgatgacgatcctctggacggggatggtggtgctctccatcctgtgcggactggctacggggcagtcggcccaggtggccgcggcggcggtggaggggacccaggcggcggtggagctgtgcctgtccattgcggggatgctgtgcctgtggaccggggtgatggaggtgatgcggcggtccgggctggcagaaaagctgtcccggctgcttcgaccgatgctccggctgctctttccccaggtagcccgggaccgggagaccatggacagcatcgcggccaatgtgtcggccaatttgctggggctgggcaacgctgccacccctctggggctggaggccgcccggcggatgagccgctgcagccccggggtggcttccgatgcgctgtgcatgctggtggtgtgcaatacggcctccatccaactgatccccaccacggtggccacggtgcgggctggggcagggagcgccgctccctttgacatcctgcctgccgtttggctggcctccgggctgtcggtaggggtaggagtgctggcctgcaagatatgcgcgcggatatggagggattgacatgctggacctgatgatgaccctggtggtgccgctgacgctggggctggtggcggtctacgccgcctgccgccgggtggacgtttacgatgccctgatccagggagcaggggagggactgggcaccttggcccgtatcatccccagcctggtggggctgatgacggcggtgtatatgctgcgggcgtcgggggcgctggatctggccgctcaggccctggctcccctgctggaccgggtaggggtgccggcagagctgctccctctgatgctggtgcgccccatcagcgggagcgccgccctgggggtgggggcggagctcatcaccagcagcgggccggactcctatgtgggccgggtggcggcggtgatgcttgggtccacggagaccaccttctacaccatcgcggtctacttcggcgcagtgggcatctcccggacccggtacgcggtccccgccgccctgtgcgctgaccttaccggctttctggcggcggcctgggcggtccggctgtgctttggaggcggataaagctctcacacgccgcgtcaggcggcatgtgagagctctcttactatggggcggacaggagagtcaggggcggcccgtccaatcggatgacccggtccgcccggtccagaacggcaggctcatggctgaccaggatgacaggggcggccagctcccccagggcggataggatgcggtctgcccgctgagggtccacccctgcaaagggctcgtccagcagatagagggaaccgcccagggccagcgtgcggaccagggccagacgccgtcccatgccgccggacagatgggcgggataggtacgctcttccccttccagctctgccagccgcagccagcgggggacctccacccaccgggggcgggggagcacgtcggtaaggtgctgctccacggtacgccaggggaagaggcggtcctcctgaaagagcagggcagcggaacggagggacaggccggtgatccggccggagatggggtgctccagcccggccagaacccgcagcagggtggtcttgccgcagccggaggggccggacagggcggtgatccccgtctcaggcagggtgagggagaagcggtccagcacccgcttctctccaaaggtgacggtgacctcctccaaacagatcatggcgaccacctcctgtttatccggttcagcagagcagagagcagtttttccagggtaagggacagaaggaggataaccagcgtccaggcaaacagggagggggtctccagatagtcccgggcctggacgatctgcgtgcccaccgcccaggcggggcggcagagcacctcggcggccaccccggacttccaggcaaggcccagagaggtgaccactgcgctgagaaagtagggccgcaccgaagggagatagaccagccggacggttttgaggcgggagaaccggagcgctccggcctgttccagcagcttggggtcggtctcccggatgccccggcccacgttcccccacaccaccggcagcaccatcagggcggagaccaccacaggcaccagaccacggcgggtccacagcaggacgaagaggatgaaggagaccactggcaccgcccggatgacccggacggcgggggaaaggaggacatccgcccatcggctggcgcaggtgagggcggcggtcagcgcccccagcagagtgccggccagcagtccggccaggacccggaccagggagagcagggcggtctgccagaaactgggcacccccgccagctggatcagcgttcccaggaccgcggcagggccgggaaggatgaaggactggcccacagccagggcggccagctgccacaccaccagccagaaggccaggggaaggaggggccgcagcagacggtcagggcagatagtacaggctgtcataggggatgctgccgccgatagcggcggggtcggcgcggtacaggacctcgtagtaggcctggacggtgtcctgcatctcctccccggtgagcagggtgagattgcactgggggatggcggcctccgcgatctgggcgttggcggtgatgccgtatttggccaccagctccgccgcctccgaccggttgccctcgtcagacatgaaggagatggagtcaccgtacaggtccaggaaagcgtccacggcctcaggatgctcctccacgaattccctgcgggctacgatgcagcccatgggcagaggggtggaggagacggcatcccactcagcgctcaggtccagggcttggcgcacgccggggtccttcatcagcagggcagtggcggcggggacgggcagcatgcacacgccgtcctcggcggaaagcatgttggcagtgacctcctgggcggtgagccactggatggtcacatccgcggcggggtccagcccgttctgggtcagcagatagttgaggatgtactccgggttggccccctggccggtggcgtagatggtcttgccccgcaggtcggccatggactggatggagtcccccttctccaggatgtacagcacacccatcgtgttcactgccagcatctgaatggagccgtcggtcttgtggtagaagttggaggccacattggtggccacagcggcgatgtctgcctcgccgttggacagcagggcggtggcctcgctgttttccgtcaccacgacggaactgacggagatggggctgtcagcaggaacgtgttccggggcgtagtactccattagataggcagcccctacaccggtagggccggaaaggacggccagatcgatggggaggacctcatcgttcggggcggggatgccggaagaggaggtgctggagctgacggaggagatggcgccgccagactgggagggtgcctctgcgggacggcagcccgaggcagagaggaggagcagggcggacaggagcaggggcagaagcttggttcgtttcatggcaggattcctttctcagatttggacggatacacctattctgggcagagacggatcgttgactggatttgtacaccgaaggggaaattttcttacccggagccccggacaccctccagagcggccggatcggggacgaggatggcccgtccctcccgccggatcaggccggcctgttccaagtcctgaaaggcccgatacaccgaggcgcggctgatgcccagctggcgggccagaccggaggcggagcactccactgcgccataggagaggctgctgagcagatagcggaccacccggccctccgtatcccccacagccagggaacccagccgggcgttgaggaagcggatgcggccggtgagataggtcagatagttccggcgcagcagggcctcctcccccagaaggcggtccagcagctcctggtccagtaggaggcagcggcagatcccttgggcggtgagggtggtggcatagtcgggggcgtcgttgtagagggcggcggcgccgaagagatcccctggctccagggtgctgacggtgaggctgcccttggtcaccagtacccgtccggagaggagcagccccagacaacggcggaagcggtcgggtcggtagatctctgcgccggaggagaagtcctccaccgaacagccggaccgcgccaggacatcccggaccagtgcctcgggacatgcctgaaacagggggcagcggaggagcagatcccactggtgcggagggagagagacaggcatggaggtcagctcctttccaaaactgtctcatttgagacggttttattgtagaacagctggagggaaatgtcaagggaaagagcatacgccatgaaaacatgtaagaccggtatatgaggaggggcgcgcacggaagggagagggaattacctgtatggtaaaacgcctggggagacagacgaccctgtctgcctccccaggcgtttttaccatatcgttccgccccaggggtcagcccttgagcagatccttgaaataggtgtctgcgtagtggatggcgcccactgggttgtgggccagcacccggtcttttaccaccagggtggtaaccagtgctttggagtattgatagaagagggagtcgtggcccacacaaagccccagacaaatattgaattgggtgtcctggctgttgagcagctcggcctgggcaatggggttgcacatggcctcaaactggccgggctggagcttgcactcctccggcaccccggcccgggacttgtccagtccgccggtcttgcagatgacggacaccacctggaagccgttattccgcaggacccgctccaccacagcggcctccttcttcagtgccgcacagaaagccaggcccagcttttgatagtgcatggatcgggagaactccacgatctccttcaggcggggccagcggcagtagccagccgactcgatggcggcgctggtgacaaaaaagtcgtggttttcctctgaccagtagcgctccaaaagccggtcaaagaactccgggtcccgcatgggacagttccggggcaggtccccgccccccttctggcaggagcggagggtacagctggcacaggtgtacatacaacagatcctccttacagtctctcattcttcgtcaggctgatacagctccggacggaacactccgctctggtcccggcaccaggcggtgcctggttcggagtccagcagagggatgatgtccgggtcgtagttgcacagggtgttgaggtgatagatgccgctgcggccggggtcgtccatatagctgtcgctctcatctccggcggtgaagcgccagccgctatcccaattctcgtccccctcctccggctcctccctgtagcagtagcccacccggcagccgtccaccaggatgcggtcagtggcgaagcagccctgggggccctccccgtcatagaggtgccggagctcccgctgggggatggcgaactccttctgggggcggtcggagaggacgctggggcggtccacgtccaccgtctccaggtcctcctcgggaaagaggtccagcagctctccggcactgtgggagagcttgaagtccatctcctcctgatacagagggaggagctgatagaaatttacctcatcgccgccggagaggggacagaccgacgcctcctgggggaaagcaccggggttgaccagcatgatgccgttgaagcgggtgttttccgcaaagggggagccgtccgggttggcaatggtatggccccagcccagccagctgtcctcgttgatgggcaggcgggccaggattttcagccagcggatgggccagtaccacgcctcgccctcttcgcccaccttccagtcggggggcaggcagataaacagctcagcccgctccagcttctggccggccagatcctccggcacgttcatggcgtgggcccccatgccgtgggtcatcaggatatagtagttccgctccgggcttggggggatgatgtagatgtccacatggatattgggggagacgatctcgtggaacacgttctccgacgatccgaaataggtgtggatatgctggtccacggtgtcccagtcctcctggccgtacacctcgggacagcactgcttggcggcgatgtacttctggcactggcggatgaactcaggggcatccgggtcctggggggccagctctgccgcccgctggaagtggggcagggcttcctcttcacggtccagatagaacagggcgtagcccagccggtagtgccacagggggtcctcctgtccctggtctgcgatggactccagaagggagacggacttttccagcggcccggcctcctcgggcccggccaggttgttgtaggcccgggccagctggcaggtgagctcatagccccgctccggctgggggatggcctcgatggcgtcgatgatccgctgatattggtcctcctcgtgccagcgctgaagctggccgagcagttccgtatccaggtcctccatatttggaacctccttcttctgactctgtccggcgccggatgtcaggccagactggccagataggcggccgggccgctctcgtacaggtcacccccgtgggcgtccaggataacggtgagggggaagtcctccacctccagacggcgcaccgcctcacagcccaggtcctcccagcagatgacctccagctccttcacgctggcggccatcagggccccggcaccacccagggcggccaggtagaccgccccattgcggaccaccgcatccttcacggcctggtcccgcttgccctttccgatcatgatgagctggcccaggtccagcaggcggggggagtaggcgtccatccggccgctggtggtgggaccggcggagccgatgacctgaccggggcgctccggagtggggcccacatagtagacggcggagccctccacggggaagggcagggaacccccggtgtccagcagctccatcatccgcttgtgggcggcatcccgggcggtgtagacggccccagacaggagcacggtgtcaccggtccgcaggggggcgaggtcctctcttgtaacgggggttctgagtttatattgcatggaaatccctcccaaatggcttggtcgatattttagatgggtattacagatgatccagcagaaaacggtggaccgtatccgcaatctctttggggcgctggcggtatagatcatgggggagctcaaacagatggaaagaggaggtggaaaaagcagagagataattcctcgcacacatccgccattcttctttgggaagaggagtgcctttgccgttggaaagcagaaacagcgtggggacagaggcaggcggtccctcctgacgtatctgacggatgctgtggggaagggcttttgcctcgttgatccagacgatgctggcaaagttccgacgggcggcgggcaccaggtccttccgaactgaggcgggacaacgcctcagcagagagtgggaagcgagctggaaaagtatggctcgcttccagtcggggcggcccagatgttccagatggtgcaggacagaggcaagatccatgttctgataggcatcgggagtggcggggtccagtcccacaagggcggaaatctcctctggatatttagaggcccagtgcagtgcctccagaaaccccatgctgtgggccgccaacaccactggaaaagggtgcttcagtgcggccaataccctgcggtactcctccaccacggtgtccacatcccggggggcctcggtcagatcactgaatccatagccgaatttggaggggatcaggacggagtaccattctctcagggcatcggccagaggggcgtattccagtccagggaagaggatattggagccggacaggatcacaagtgtgaccggccctgatcccccagaggatacctggaaggcccggccgcctacagctaccatttgctcgtccatgacaacacctccatgggcggtcagagctgggcggaggcccggcgggtcacatggcagctcacattcaccgccacgggcaggccggccacgtgggtgggggcggtctcgatggacaggcccaaacaggtggtccggccgccgaagccctgggggccgatgcccagggcattgatttcctccagcagctcctcctccagctgggcatagaaggggtcggagttgggctggtcgatggggcggagcagggcatgcttggccagacaggccgccttgtcaaaggagccgccgatgccgatgcccagcacgatggggggacaggggttggagccggccaggcgcaccgtctccaccacgaattttttcacgccctccaccccgtcagcgggcttgagcatccccaggcggctcatgttctccgagccgaagcccttgggagccacggtgatccggcacccgtccccaggcaccagccggagggtgatggcggcgggggtgttgtcctctgtgttcacccggcgcaggggatcacccacgatggacttgcgcagatagccctcgccgtagccccggcggaccccctcgtggacggcctgctcaaagtcgccctggatgtggacctcctggcccagctccacaaacacacaggccatccctgtgtcctgacagacaggcagttcttcccgctccgcaagctccagattgtcccacagcaggcccagggtctctttggcaagaggccagggctcctcccggcgggtgcggtccagggcggagacgatgtcggggggcaggtgagtgttggcttggatacacagctttgccaccgcgtcggtgacggcggcggcggaaatggtacgcatacagacgccctctttcttcgggttttctccattgtaccaaatttcgcagagaggggaaagggctggacgaaaaaaatgccccgccgcaggcggggcatcctgttcttgtggtgtgaacgggcgggaaatttgcaaagaatgtccgtagctgcgctgaccaaaagatcaaaagtggaaggaaaatacagcgtgaatggtctggataggaccggaccggccggtataggaggagccgccatagctggagatagaggcaaatgggtagtggagccaatgggtctggtggcggagaaagacgctccaggtgtcagtataggaccactgctccgggctggagaagtgaatgtcagaaggctggggcatctggctggcgtccaccgtgtaggccaggtagccccgcagattttccgcctgagcgggaatggagaaggctatccagggataatagcgcaggtggccgcccaaccgctccagctccattctggtggtgtctataagtgggtagacatatggatgctcttccacatattccgccgtctccccgccggccagccggacccggggagaggcacaccagagctgtccctcctcgtgccataaaagccgtccggcatagtctgtcgtagggtactggccggaaggggacacggagaactgctcctgaagacggaggcggggaaggactgaataccggaaccagtggatctgccgaacctgtccctccgggagaaagatgagccaggaggacagctctgctattccgtcagtcagagcttgagcaggaaagggggtgtccgtctccgtcccaggcccctccggatcataccagaagacccctgatactgccgaagcgtccgcacaccgctccagttccgcggcatccagtgcagcggcaatgtcctccggcagccccagagagaccagctgggcctggacagccgcctgctccggggtgaggagcgcggcaggtttgccggaagttgggatatgtccactgacccatagcgcgatgggcagggagaggaggacggcggcaaagctgcccgccaggacagtgcgggaagagagacggacagggacaggggagatgtggtaaccaaatccggatagagtttcgctctgacgatagatacagatcagaaaacggagctccagcaggatcatgaaaatgggccggccatagtagagccactcgttggtgatggagagaccgagcaggccaggctgagaggcggggaccagctggtcccacagtgccacagccaaggccagcaggtggcagagaaggccctggcccagccagtcacggggcagattttctgtcccggaggagagaaagactgcccgggtcccccgccacagggccagcagcatgagcagggaggccccttgaagcagccaggtaagggtcccgtccacagcgggagacgccgcaagcatcgccatcacaggcgtggcggcgagcacgtcgagggccatatgggacgccagcagaagggcggacaacagccagccgagacggaaccagcggttctcaaggcggagggagcggtagcccagatacactaggacagcgcccagcagcgggaggagatattgcagatagaagaactggaaccggaaagtgagcagggccgttcccactacgatacggtccatagcggggcgccacggggtgaagcgcggcagctcggcgggcgggatctgagagagctcctccatgatatggcggtcaaagtcgtctgttcgcatcacagctcacctcccagcagatgttgcagctttttccgcaggcggtagagcctgccctccaccgcccgctccgtcaccccgagctctgccgcgatctgggcggtggactgaaggtagtaatacttgcggtaaaacagcagatagtccctccggctcagtgaggagagcgcccgggacagttcgttggcccgctcctggcggagcagggcctcctccgggccggggagagggtcggggtggtcctcttccaatgatcgcgtgcgcgcctcctgccgccggcgggcccgcagccggtcataggccgcgttccggcagagcgcggtgatccaggcggcgggagaggcgcgtccggggtcatagagcaggcggcgttcccacagcttagcccggacctcagcgaggcagtcctcccgggcgtggacgtcagagaggatgccccggacgatgtagtccatcatggggccgtattccgacagaaggggttccatggcggcggggtcgccgtcacggagccgctccaaccagttgacagggtccaaccgactcacctccctgagttttcttctatctcaagatacgccgaaggggcggaaatcccacgaaaaaagatgcggccctctcatgaaagagggccgcatccgctgacaggggaaagggccgccgccagctcactgatggataccgcggttctggtcgccctcgggattgacgccgaactcgtagtcgttgccggggaggatggcgttgagcaggatgcccgccaaggcggcgatggccaggccggtgagcgtgatggaggtgccggccacggtgaaggtgatgccgctggagaagcccaggccgcacaccaggatgacggcggcgatgatgaggttgcgggacttggtcaggtccacgttgttctccacgatgttgcgcacgccgatggcggagatcatgccgtagagaatgaaggacacgccgcccacgatggcggagggcatagagccgatgatgtcggccatcttgggaataaaggagagcacgatggcatagacggccgccagacggatgacccgggggtcatggaccttggacaggaccaggacgccggtattctcgccatacgtggtgttggcggggccgccgaacatgccggccagggaggtggcgatgccgtcgcccaccagggtgcggtgcaggccgggctcctgaatgaagttctgacccacggtggcggagatggcggacatgtcgccgatgtgctccatcatggtggccagggcgatgggggccatcaccaggatagcggtgaggtcaaacttggccatctggaaggggggcaggcccaggatgctggcctcgcgcacggcggtgaaatcgatgagggggatggcctctcctgcggcgttcagcacagtgacgccgcaggcgttcatgatgagggcggcgatataggagaccaccacgcccatcagaatggggatgatcttgaacatccccttcccccagatgttgaagatgatgatggtggccagggcgatcagggccaaaggccagcaggtggaggcgttgctcaccgcggagggggccagggtcaggccaatgcacacgatgatggggccggtgaccaccgggggcaagaagcgcatgaccttcttcacgcccaccaggcggatgaccagggccagcgccaggtagagcaggccggcaaccacgatgccgccgcaggtataggccagcttatcctggggagacatgtccgcatagatgccggtgttcaggttggccatggtgctgaagccgcccaggaaggcaaaggaggagcccagaaaggcaggcaccctgaatttggtgcacatatggaagaacagggtgccgatgccggcaaagaacagagtggtctggatgtccaggggcagaccgtactgctggaccaggatggggaccaggatggtagcgccgaacatggcgaacatgtgctggaggcccagcaccagcatcttgggggtgcccagcttccgggcgtcgcggatgggttcgtttggattcatggataaaactcccttctcactttctctgacacacaaaaaaagacaatcacaccggtgattgcccgcctgcggaacagaagagaggcccccaaacccgatacagcgacccgtacagcacggtcatggacctctcctcccttccatttccgaacaatcataccagaagagcgggagacacgcaagtcttattgccgaatttcgtctttttttccggaatcaccaaaggagggcccgggtgggggaacaggttggaggttgtgttgattgacaacgtatgggggatacgatacaataaaaacgatttttttcttggggcggcgggctatccggcccgggaccgcctgacagatttgaaaaaggagcgtctgcccgtgaaaaagccctttgtcaccctggagcagctccaggccatcacagagcagtatcccaccccattccacctgtacgacgaaaagggaatccgggagaatgcccgccgcctgtaccaggctttctcctggaaccccggctaccgggagttcttcgccgtcaaggccaccccaaacccccagatcctgaagatcctgcgggaggagggatgcggcgtggactgctcctccctcaccgagctgatgatgtccgaccgctgcggcttccggggagaggagatcatgttctcatccaacgacaccccggcggaggagtttgccctggcctcccaactgggggccaccatcaacctggacgacatcacccacatcgactttctaaaggacaccatcggatccattccaaagcggatctcctgccgatacaacccaggcgggaccttcactctgggggagtctgaggagggcttccaggtcatggacaacccgggggacgccaagtacggcatgacccgggagcagctgacccaggctttccgccggctgaaggagctgggggcggaggagttcggcatccacgccttcctggcctccaacaccctgtccaacgactattaccccgccctggcccggattctgttccgggtggctgtggagctgaaggaagagacaggctgtcacatcaccttcatcaacctgtccggcggcgtaggggtgccctaccgcccggagcagcccgccaacgacatcgccgttatcggggagggggtgcgccgcgcctatgaggaggtgctggtccccgccgggatgggagatgtggccatctgcaccgagctgggccgcttcctgctggcaccctacggctgtctggtcacccgggccacccacgagaagcacatctacaaggagtacatcggggtggacgcctgcgcagccaacctgatgcggcccgccatgtatggggcctaccaccacatcaccgtcatgggcaaggaggacgccccctgcgaccacaagtacgacgttaccggggccctgtgcgagaacaacgacaaatttgcggtggaccggatgctgcccaagatcgacatgggtgatctgctggtcatccacgacaccggcgcccatggacacgccatgggctaccagtataacggccggctgcgctccgccgaggtgctgctgtgccaggacggctccacccgcctgatccgccgggcggagaccccggaggactacttttccaccgcagtgtgggagtgagctccccagaccacagatcgagagacaggaccgccgcgcgtgccgcggcggtcctgtatttgagtgcttcttgttgaggtgattttgttgcatatcctgactgaactcagcctgatctttgccctgtgcctggcgggggaggggatcgccgccctgcttccggtggccttccccgccagcgtcatcagcatgctgctgctcatggccctgctcttgaccggcgtggtcaaggagcggcggatccagacagtctcccgcttcctggtgaccaacatggggctgtttttcatcccctccctagtggggaccatggaatatgtggaggtcctgagggcccaggccctgccctttctggccgttacctttctgactacgccggtggtctatctggcggccgcctggacggtccagctgctgatgcggcggagcagaaaggaggcagggcgtcatgtttgaagcggtgacttcctccccgtttttcgggttagccctcaccctggggtgctggtgcctgggggtggagctccagagacggacaggactgctgatctgtaacccagtgctggtggcctccctgctggtgatcggggcgctgacagtattacgcgtccccctggagtgctacaatgccggcggcgggctggtaaagctgatgctgggcccggccaccgcggtgctggccctgaatatctatcaacagcggcaggtgctgcgggaacactttctccccgtgttggcagggtgtctggcgggcagcgccgccagcatgggctccgtgctgctgctgtgccggctgttccgcgccgaggagatgcttgctgcctccatgctgcctaagagtgtcaccacagccatcgcgctgggcatctcggagagcgggggaggcatccccggcatcaccgcggccgccgtggtcatcacgggagtggaaggagccatgctggcccctctgtttgccagatgcttccgcatcaccgacccggtggcggagggggtagccataggcgccagcagccacgccgtgggtacctccaaggccctggagatcggccccctccagggggccatgagttccatcgccatctgcgtgtgtgggatcttcacctcagtgctggcgctgttcttctgaagaaggcagcggagctggacacagagaggatagataagaaagcacagaaggccgccggcatcgccggcggccttctgctgtttatttgccttgagatcagtccagtacgatatagtccagggagacatagccgatagcggcctggccggactgagtgaggtaggagacgtggagccagccgtcttccggcggagcgaggaggatgaccctgcctccttcccgcagatagcccaccacagagtgggaggtgctggggccggaacggacgttcaggccgttctccgccccgcggacggtgccggcggaggcggcggtgtcgcagaggaccacagcgctggtgcaggcgtccccgcaggaggcggtaatggtgacgctcacctgcccgccggtggtgttcaggttggtgatggtgccgtcgctggtgactggcgccacagtgggcacgctgctggtccagacgacggtgccggcggctccctcaggggagagcgtgggggtgaagtgatagctggagccggcctggagggtcagttcgccggtgtccagggtgatgccctccacggggacagcgggctcctccggctggctggtctgtcccgggtcctccggctggtccggatcagcagtttggcccgggccctctgcctggccggggtcggcggtgccgcccggctgagggtccttctccggctggaccaggtcgccggggtccagatcggcaggaggcgtatagttggacagcttatacagcagagcggccatctcagcgcgggtgaggaaagcctgaggattcaggttgccgtcggtgtcgccgcccacgatctgataggccaccagggtggcagcgtgctgggcagcccagtcggagagggaggcgcggtcgccgaactgatccagaacggtgagagcgccgggctggcaggtgatgcccaggagaggcagggcctggttcagaatggtgaaagcctgctcccgggtgacatcagaggcgggagccagggtgccatcccccacgccggtggccagaccgttggcctgggcccaggacacagcggtgtagtagtagtcggagggggatacgtcagtaaaggaggcgggggaggtgacggccggcttacccgccgcgccgtagagcatcagcagaaagtcgccccggcggatgtgcaggtcagggccgaactcagtgtccgagatgccgcccaccaggccgttggcatagcagtagtccacggcggtgtaggcccagtgcccctcgggcacgtcctcgtgggagttctccagggagaccatgatggtctggctctgcccgccggcagaggcggtgagggttccggaggcgcccccggggccctcagcggtgaacagtccgtcctcggtgatggagccgatgctgccctccaccgtccaggagatggctcccacgtcccgcatggcagcccgggaccagtaggtaccctgggcagtgagctggacctggtctccaggctccagggtgagggaggtgagggcgtcggtgctgttctcccgggagacggtgaggccggtgagatggtccactacgtggatctgggcggtgccctccacatccagatccggggaccagagctccagggtatcggtgcccgcgtcactgccggcggtgtagatgttgtcctccacccggcccaggtcgtccagggaggagatctccacctcgcctgggtcatcccgaaggatgttcagaccgctgtccagcacggccgtctcccccaggtccacagaggtgccggtgaggaccaccagcccgtcatttttcagcaccagccggtccggatcgccgtcaccctcatcccgggagaccaggagcaggtaggtggcgcaggcccggggcttgccatcggaggggatgttgacgatggaggggccctcttggccggggacccagacactgatggcggtggagccgccgccgtccaggttgaccgcccagacgcagccctgggagagcatctcctccgccagatccagctggctcagtccgccggagtagccgctcctgcggccgtccacagcgtacaggaccagggtgccgtcctcccgcacgcccagggcggagcgggggtcgcggcccttttccacataggtccaggcagtggagtcagtgatctgtccgtcccggaccatcacatcgcccacgccgctggcccactgggcgtcctcgagggtggaggaggtgcagtcggtgtggagggtgacccggtcgcccacctggaagctctggaatacggactccaggccgccggcgtcggcggcagtcaatatgtactcgttctcgccaatgaccactgaggtgtcggtgcggagcagctcagtgacctccaattccagacggccggagacggagagggtgtcgtcgggatcggtcagctccatgcgcaccatccagccgggggtgctggtgtgggtggagacggtggaaaaatcgtagttgaacaggtagagcccgccggagtcggcccggtatttgttcaggtgggtcagaacggtctggcctccggtggactcgttggtgagggtgagggtgacctggggctgctctaccagctccacctcaccgtcggtgatgaccacggcggcctcggcctccgggctggatttataaatgccgtcctcaatggagatgcccagaggcacaccggtggagggagcaaagaagtcggtattgatggcgcccagcacgtggtagcccaggctctgggcatagctgaccgccagattgatggagccggccccgtaggcggtgccggatgcctggaggaagatgggctccacctcccggctgtccggagagagttccagggagaagctctccacccggcccgcggcggagtggctggtgatggtgttggaataggtcaggccgtcagccagctcccgggtggtgcgcagctggggggagcctgcggcggcgtaggccgagggcagtgccagcagcagcgccagcgtcaaggcggtgaggcggcgggcagcttgggtgaaatgacgatgtttcatggatactccttttcacatggttaggacaggtggtggggacagcaaaactaattccttattatagcagtggagcagggcactttcaatggaaaaaagtgtacagatttcgggaaaatgtgaacatcctatgaacacacgggccaacggttgaaaaagtcggaggggtggtgtaaaataaaacgattttattggggatccataggaggtggcgcgatggaggagcggcaggaccatgccacacggaccatcagcatcgtgatgatcatcgccctggtgggcaaggtgctggggctgtaccgggaccatctgctggcggtttactacgggacggggatggcggctaacgccttcaatacagccagccggatccccagggtgttttttgacgcggtgttcgcctccgctatctcggcctgctttatcccggtgttcagcgagtatctcacccggaaggggcgggagccggccttccgcttcgcgggctgcttcatcaccgtgatggggctgctctctgcggtcctttcggtgctgggcatcctgttcgcggggcccctggtcagcctgtttgccgacggatatgatgcccagacggcggagctggccgtctccctcacccgggtgatgttccccacggtgctgttcaccggggtggccttctcctttgtgggagtgctccagtccctgggggagttcaatgtccctgccctgatcagcgtggtgtccaacctggtcatcattctctattacctgacgctggaccagcagttcggcatctacggcctggccgttgcctttctggtgggctggttcctccaggcggcggtccaggtgccctcactgcgccggctgggcttccgctaccggccgggactggagccgcgctccgaggggatgcggaaggtctttgccctgatgctgccagtgatggtctccacctgggtgcagcccatcaacctgactatcaactccaagttcgggtcccgactgtacgagggggccggagtgtccgccatcgagttttccaccaacttgtatctggtgatcgccggggtgttcgtcctgtccgtcaccaatgtgatatttcccaagctgtcccgcctcaccggccgggagcaggagggggagttccgggagacgctgcggaccaccctgcacggctgtctgttcttcgtcctgcccatgtccgcggggttgatggtgctctcccgcccgctgatctcctttatttatggaggaggcgcttttgatgatttttccgtctccatcacctcccaggggctgttctgggtctcgctggggatgacgggatacgcggtccagaatatcctcagccgggcctacttcgcccggcagaaggggaaggtgcccctggcggccggtgcggcctccatcctggtcaatgtcctgctgtgcatggcgctggcccagaggatgggggtggctggtctggccctctcctccgctgtatcctccaccgtctacgccctgttgctggacatccccctggagctgcggggggagggggtcctcagccggagtttcctgctggacctggggaagatggcgctggccaccgcgctgatggcggtgggcgcctgggcggtggccggcctgacagagggcctgctgcccggcaaggcgggggagctgctcaccctgggggcttcggcggcggctggtgtggccgtctacttcccggcggcggtgctgctgagattggacgaggggcagctggccctgaagatggtgaaacgagtgtggaaacgaggctgatgcaatgaatcgagcgatagagatctggaacagcagcatactggggcgggtgctcaccgccatctgtctgtggttcagcggacagtggcagagaagtcgggtggtccgggccttcgtggccccaatggcgggccggcaggcggcggaatccagtgtctttttccgactgtgggacctgatccggggcgggctgtgcgccctgtaccgcaggctgggactggagcgcctgttcggggggagcatctttttgtgcctgaccctctggtgttctgcggcggtggtgctggcccccctgctgcccactatggcggtactggctctggcggcggtggccttctcctccctggcactgaatctggtccgggaccgggcacggcccctggtctactccccggtcaaccggtatatcctgctgtacgcggcggtgtatctggcggccacggccacctccgtcacgccccggcagagcctgttccccggcctgctgatggtctttttcatggtcttcgctttggtggtggagaacgccgtggacagctgggagcgggcggaacagctggtgtttctcatggtgctggcgggaggcgtggtggctctgctgggcgtgggccagtatgtgctgggcgccacgggggatgccgcctgggtggacagcgacatgttctcctcggtcaccatccgggtctactccaccctccagaaccccaatgtgctggccgagtatctgattttgatgatctccctgggcggggcggccctgctcaccgctaaggggaccgggaaacggctggtgctgctggcctgctgcggggtgatgtgcctgtgcatggtgctcaccatgtcccgcggcggctggcttggcctgctgatcgcggggatgatctttttggtgctcctcaacccccgggtgctggtgctggcgccggtggtgctcccagtggcgctggtggccctctactttgtgctgccggataccgtcatcagccgcttcaccagcatcggaaacctggaggacacctccacgtcctaccgggtgtctatctggatgggcaccatagccatgctgaaggactactggctgtgcggcatcgggccgggcaccggggctttcaatctggtctacccggcatacagctacaacgcagccaatgctcagcacgcccataacctctttttgcagatcatgtcggacggcggcgtggtggccctggtggtgttcctgctgatcatcttcattttctgccgggtgatctgctcggcactctcccggaaccggagctggcgggcccggtgctatctggccggcgccatcggcggcgtgggcgggttcatggcccagagcatgaccgactacacattttataactacagggtggccctgctcttcttcgcggtgctggccctgggagccagctttgcccggctggcggaacaggaggtggaggaccggtgaataccattttacaggtcatcagtgacaccaatatcggcggcggcggccgcagcctgctcaactatctgagctgtcaggaccgcagccagttccagtcccaggtggtgctcccacggggcagcgccctgaaaggacctgtagaggcgctgggggtgccggtccatgagatcgacgccatggcggaccggtccatggatctgtcggcggtggctcccctgcgccgggtcatccgcgcggtggacccggatctggtccacacccacggttccatgtccgcacggatggctgcccggctgtgcggcaaaaaggtgatctacaccaagcactgtgtcttccccctggggcgggtgatgggcagcccggtgggccgtctggcgggccatgtgctggatgcctgcctgtccgacggggccatcgcagtgagcccatcggtgcgggagctgctgctccagtccggcgtaccggatcggaagatccacgtgctcttcaacggtgtggctcccctggcggcccctacggaggaggagcggaccgcactgcgggcggagtacggctttgggccggaggacttcgtggtgggcatcctggcccgggtggaggagtacaaggggcacagcgtgctgctggatgcggcggagcagctgctcagtcagggacgccgggtgaaggtgctggtggctggagagggcagcgccgaggctgccctgcggctgcggacggtgtccttcccccaggggacagtgttttttgccggctttattgagcgggtggagcgggctctgtgggccatggacgctcagatcaacgcctccaccgagagcgaggggaccagcctctccctgctggagggcatgagcttcggcctgcccgccgtggtcagcgatatcgggggcaaccccctgctgatccaggacggagagaacggcctggtcttccccaaccgggacagccgggccctggccggctgtgtggcacggctgatggatgaccccgccctgctgcgcaggctgggagagggggccaaacggtcctttgaagaaaactataccggcgagatctttgccaagcatgtggaggacgtctaccgggacgtcctgaaaggagtatctcatggaaccaaataagccgaaattccgcttccgactgaacctgtttgacagcatcgtccttgtactggccctggcggtgggggcattcctggtgtggagcgccataaagccggcggccgcaccggcggaaggggccgtttccgcggcagggacggtgcagtacaccatccgatttcagaagatgatccagggagccagcgagcggatcaagcccggggaccagctggtggacaccgtgaagaactacgagctgggcacagttgtgtctgtggagacagtgccggcccaggctctgatccaggatcacgaggacaaggcctttgtcctcgccgggatcgagggttacgaggacgctttggtgacagtggaggccccctataccgagggagaggactccctcctgctgggcggaggcttcaagctgcgggtgggcgtgaccgcctatgtccggggctccggctatatgggcagcgggcccgtggtttccattgagaggggggagcagggatgaaaaagatcatcgaccgcaacggccgcctgttcggcttcatcagcgtcatcgacctgctggtcatcgtagtggtggcggtgatgggctttgccctgtacaccaagaacacccagatggccatcaccagcaccaacacggcggaccagaccatcacctaccagatcctggccagcgggatacggacctatgtggccgaagcagtgcgggagggcgaccagctctttgacccggaccggagcagcggcggcaccctgggcaccatcaccgacatccagctcatgcccggcaccaagctggccgagtttgacgacggcaccgtggcggccgccccggtggaggatggcgtggacatgctgatcaccgtagagggcaccggcctggtgagcgagtcggggcgctataccctgaatcgggtgtatgagctgggggtcaactcctcccggaccttctgcacaaaatacgcggagttcatcggcacagtgacagagattttttaaaaaggggcggcagacatgaagatcctgatggccactatgggcctggatatcggcggagcggagacccatatcgtagagctggccaaggagctgaaggcggagggacacgacatcgtggtggcctccaacggcggtgtctatgtccctgagatcgtggccgcgggcatccgccactaccaggtccccatgcaccggcgggacgccggatgcatgctccgctcccgaaagctgctgaaggagatcatccgtactgagaggccggacgtggtgcacgcccacgcccgcatccccgccttcctgtgcggcaccctccagagaacgatgaagttccccttcgtcaccaccgcccactgggtgttcaccaccaagggcgggctgcgctacctcaccaactgggggcagcggaccgtcgccgtctccgatgacatcaaggcgtatctgatccgggaatacggggtgccggaggagcacatctctgtgaccatcaacggcatcgatacagagaagttttctccacagacttccggccagtcagtggtggaggagttcggcctggaccggtccaggccagtggtctcctatgtgagccggatggacgaggaccgggccctggtggcccgacagctaatccagatcgcggaggagctggaccgggcggtgcccggggtgcagctgctcatcgccggagggggcaacgtgttccgggagctgaaagagcaggcggaggcggtgaacgcccggatgggacgcacctgcgtggtgatgaccggcccacgcaccgacatcaatcagatcgtggcagcgggggacatcttcgtaggggtgtcccggtcggcgctggaggccatgtccgccgccaagcccgtcatcgtggcgggaaacgaggggtatcagggcctcttcggtccggagaagctggaggaggcccgactgggcaacttctgctgccggggactgcccatgtccactccggagcgtctgctggccgatatggccgccgtcctgtccctctccccggagcagaaggcggcggcgggggcctacggccgggaggtgatcttccagtattactccgtgcgccggatggcagcggactgtctggccatgtatgagcaggtgcgccgccggaagtaccaggtggtcatgagcggctactacggcttttccaacgcgggggacgacgccatcctggaggccatccaccagagcattctggaggccagtggggaggtgggggtcaccgtgctgtccaacgacccccgcgagacccagcggcactacggcatgaatgccatcccccgcttccgtttctggaaggtgttcggtgccctgcgccgatgcgacgctctgctgtccggcgggggcagcctgctccaggaccggacctccacccgctccctcctctactatctgtccatcgtgcgctgtgccgagtggatggggaagccggtgatgctctacgccaacggcatcgggccggtgcagaagccggccaaccgccgccgggtgaagcgggcagtggagcgggccgctctggtgaccctgcgggaccacagctccgcccgggaactggtggagatgggggtggagcgtccagatctccacgtcacggccgacccggtgttcaacctggatcccgcccccaaggagcgggccggggaactgctccggtccgccgggctggagcggggcactcccttcgcggcggtctcggtgcgggactggccggatacgggcagcttcgccggggagctggccgccctgtgcgaccatctctaccggacctgcgggatggagatcctgttcctgatgatgcagccctgccgggaccgggcggccaccgcccaggtgcggagcgctatggagtgcccctcccatctgctggacgccacctgcaccccgagggagctgatggccgtgctgggggagggcaggctgtgtttggctatgcggctgcacaccctgattttctccgcccggatggcggtccctgtgctggggttggtctatgatcccaaggtggccagctatctgaaggagctggacatgccctccgccggtgatgtgcatcacttccgccgggaggaggccatcgccgccgcggaccgcctgatggcggactatgaggggagcctggaacgcctgcgggtgaaatccgccgccctgagccgggcggcccgggagaacgagcgattgctgctggagctgctggagaggaaacaatagagcttttgactggaacgcgcggcaggagcggagacggggagctccggctcaccgaatcagcttgaacaaaaaagatcctttcgcttacgggcggccccgcggggccgcccgtaaatcgttttcagggatgagacgggcgagtctgtgcgggcctatgcagggtgtgccgctgcccgctccggagtccgatagggaaatcaggctcttgacaagagaggtttattgcgataaacttgcagtgaaagagaggtttattagaataaacctaaagggggacggacggtggaaaagctgtttgacggggaataccggctgatggaggtgctgtgggaaagtgcaccagtgaattccacccagctggtgactctgtgccgggagcagctgggctggaccaagagcaccacctatacggtgctgcgcaagctgtgccggaagggggcggccagaaacgagcgcgcggtggtcaccccgctgctgacccgggagcaggtcatccgagcccaaggggaggagctggcggtgaaggcgggggggatggcccccttcctcaacgcctttttcagcgggcggaagctgaccatggaggaggcactggagctgaaggacctgatcgaccagcacacctgggaggactgaccgtggacggactgaacacgtggctcaccatatttttgaatcacctgaacgcggggctggcactgggggtcgtcctggccgtcctgatcctgctgcgccctctgctcctccggctcctcaccccccagcagcgggtggcagtctggtatgtagcgtggagcatcggcatatttgggaacctgtgggggctgaccagcctggtaagggtgctgccggtaacggtctgggacctgctgggaccccggccgggcgggatattcggcgcgccggctttcctgccgcccgcctacgacgggccgggggagtaccccgtggtcctgcccggcggggaaactgcggcggtggagctgaacagcggtccgctgctggccctgtccctcctgtgggccgcggtggcggtggggctgctcctgtggtattgtcaccggtccttcgccctgatgtgctgggggcggcaggggagcgagctggaggagaaggagctggtggccctgggggccgaccggctggagctctggatgcagcccggaaagatccgggcgtggatcacccccgggctgcccactagctttgttatgggggattcggtgtacctccaggcagagctgcccaaagagcagctttccctggtgctgcgccatgagctgaaccacatctatctccgccatgggtacttctccgggctcaggggcgcctgcctgctgctccactggtggaatccgatcctgtggctggcatttcggtatatgggccgggatatggagctggcctgtgaccagaggaccctggatcagctggagccggagcagcggaaggagtacgccaagaccctggtggagctgggggcggggcggcgcctgtgggaggccccgctgtgctttggggagtgcgacggagccctgcgggtgcgggcggcggtggcctggcgtcccctgacccctgtgcgccgcctcaccgggctgttctgtgccgccctggtgttcctcctctttgcgggggcgccggccgtgccggggggagtgacagagactgatctctcccgaaacctgacgcagatggaggaggcgccggagaaggtggtggaggagctgatccggcggctggaggagaagggggacctgctctccggggtgagcatcgccgccggctggtggaagtgggagggcacaggaggccggatctatctggagaccagcgtgggcacttggcgggcgttccggtgcgtgctgggggagagcggcaagatggggatgatccagctccggcaggagggccggccccatgacctggcggactgcactcagttttatcccgtggactgagcctgagagaaaggaaaggagcggatatgatcggccgattttttgttgtgggcatgtttatgatgatcaatctggggctggcagtgggaatgatgttcgccgccctgtttctgctgcgccccctgctggtgcggatactctccccggggcagcgggtggccctttgggtggtgggctggatcagcctgtacagtccgagcttttacggcctgctcagcctggtccacatcctgcccgtcaccttccgtgacctgatcaccgggcgggtaaaggacggcggatggacgacctcaatccccgcctatctgcccatggattaccacggggcgggggtgtaccatctgtccctgcccggcggggcggtggtgccggtggaaatcggggaggggatagccggggcggccgcgctgctgtgtctgggcgtcctggtgctggggatcgttttttcctgccgacaggacaggcggctgaaggagctgctgcgcaggggggagctgctgggcggagaggaggctctgaccaagcatgtcctccaggaggagacgcggaagatccagatccggctggtggagggactgcccaccagcttcctcaccagcaggggatggctggggtcggtggaatatgtgatctgcctccagcgggagctgtccccggagcagcgggccctggtgctgcgccacgagctggagcatatcaggctggggcacctctggttcaaggggtgggccaacatgggggtatttctctattggtgggacccgctgatctggctgggctacaaatatttctgtcgggacctggagctggcatgcgacgcggccgttctgaaggagctggagccggaggaacggcgggagtacgccaggaccctggtggagatgggggccgggcggagcctgtggagcacgccattgtgcttcggggagtgcgatacagcggtgcgggtcaagacagcggcccgcccgcagcgaacagggggagcctggcggggcctctcctggctgacgacggtgctgctcttcctcttcttcctgggcggccccacccagggggtgctggcggaggacgcgctgctcacctgggaaagagggggcgggactgtggacaccctggtggcccatacgatggatcaggtgaggcaggatctgggactggggcccatcctggccctccaggtctggtgcgtcgcggaggacggcgagcacgtctgggtggtgatggagctgctggagcagggctgggtgggggccgagtatttctggtatcccgcgcgggaccgcctgtattttactcatgcagaggtgctgaaaaagcccccggatctgacgggggcggtgccgctgtcatgaaagcgggaagcattgtgctgtggtcatgttccctgctcatagaggcattccttggcctttcccttctgcggtggaccttccgctatgagagggcctggttggtactgcaaaagggtgagtgcagtggaggacctggaccaggagggctgggaccgggtcaaatagcatacgcccgccctgccgccatggtgacagggcgggcgtatgtggagctcggccggcgggagtgggcaaaaaatacagggagcgaggcccggggcttgtcaaccggaggcttttatgagacaataaaacgtgtacggcggtccttgaaccgccaaaatggaatgtgaccaacgatccaggagttttgtatatgagtgaactgtttgaaaaatctatggccaccctggagctgccccaggtgctggctcttcttgccgactgcgcggccaccctggagggaaaggagcgctgcctggcactgcgtcccctcactgatctggacgacgtggcccgggcgcaggaggagacctccgccgcggtaaagatgctcattctgcgggggagccccggcttctccggggtgaagccggtgtcggccagcctccagcgggcggacatgggggggagcctgtctacccgggagctgctggacatcgcctctgtgctgcggtgcgcccggggggcgcgggactacggggacagcgaggagaagaccgtcatctcccacctgttccgctccctgaccccaaaccgcttcctggaggacagcatcaccaactccatcctcagtgaggaggagatcgccgactcagccagcagcgagctggcctccatccggcggcacatgcgctccaccgaggccagggtgcgggacatcctccagcggctgatctcctccaaccagtccaaatacctccaggagtccatcatcaccatccgctccgaccggtacgtggtaccggtgaaggcggagcacaagaacgccatccccggcctggtccacgacgtgtcctccagcggctccaccttcttcattgagcccatgggggtggtgaaggccaataacgagctgcgtgagctggcggccagggagaaaaaggagattgaacgcatcctggcggagctgtccgcccagtgcgccgcccataaggaggatatcggggaggactataccctgctgatcctgctggacaccatcttcgcccggggacagctctccctgaagatggaggccagccagcccggcctgtcggaacggtacctgaggctgcggggagcgcggcaccccctgctggataaaaagaaggcggtggccaacgacctggagctgggagaccggttcgacaccttggtcatcaccggtcccaacaccggcggcaagacggtgaccctcaagaccctgggcctcattacactgatggcccagtgcgggctgcacatccctgccaagtcggacagtacggtgcgggtcttccgccgggtgctctctgacatcggggatgagcagtccattgcccagtccctgtccaccttctcctcccatatgaccaacatcgtgggcatcctgaaggaggcggacggtcagaccctgatcctgttcgacgagctgggggcaggcaccgacccggtggagggcgccgccctggcggcggccgtcattgagagtgcccgggagctgggggcactggtggcggccaccacccactatgccgagctgaaggtgtacgctatgaccacccccggggtggagaacgcctcctgcgagttcaatgtggacaccctggcccccacctaccggctggtaatgggcatcccgggcaaatccaacgccttcgctatctcccggcgcctgggcctgccggaggagatcatcgaccgggcggccgcccggctggatgcggagaacgtgcgctttgaagacgtactcaccaagctggaccagcagcgccaggagatggagaaggaccgggcggaggcccggcggctgaagctggagatggagcagtctgcgggcaaggcccgggagtaccggaagcggctggaggaggagcgctccaaggtggtggagaaggcccaggcggaggcccgggccatcatccaggaggccagagacgccagcgacctggccctctccgaactgaaggagctgaaaaagcgccaggacctggactggcagcaggtgaacgacggacgggcggaggcccgccgcctgctcaacgaggcggagcggtccatcggcggggcggcgcaggagccggaggccccgccccccacccggccggcccgggccggggatacggtggagctggtatccatggggaccagagccagcgtcctgtcggtaaacaaggacggcaccctccagctccaggcggggatcttgaagatcaccgccaagcaggacgaggtgcgggtggtggagggcgagacccagagccagaaggaggccaggcgcatcgtccagcgggcccagcacaccctgcgcgccgccgcggccccctctgagatcgatctgcggggcatgatgaccgacgaggccatcgcggtgctggaccgcttcctggatactgctatgatgggcaagctggagagcgtgaccatcatccatggaaaggggaccggcgcggtgcgcaaggcggtgcgggagcatctgaagcgcagccgctatatcaaatccttccgccccggccgctacggcgagggggaggacggcgtcaccgtggcggagctgcggtaaggggccgggccctctttccagggggacagaagcgcgcacggccggcccagcggtgggcggagaccgggaagaagggcatctgccgccgaatgccgtggacctcccgcaatttttgttgagaaaagaaggcagatttgtgaaaaatgtcattgacggatgcgggatgaatttggtatgctagtaacacacaaatcgagtgcggaggtacggatatgtatagtcaggaagcggtcgtcaataaccaggtaggcctgcatgccagacccgccacgttctttatccagaaagccaacgagttcaaaagctccatttgggtggagaaggacgagcgcaaggtgaacgccaagagccttctgggcgtgctctccctgggtattgtcaaaggtactcctatcaagctcattgcggatggtccggatgagaaggaagcggtggaggctctgttcaagatgatctcttccgatttttccgagtgagccacacagcgcagatccgaaaggcaccgcttcgcgcggtgccttttttaacatctccccgggaggccccctatgacatttgacgaattgaaggaaaaggcccacgccctgcctctgaagccaggcgtgtatatcatgcaggatgccaaaaacacggtgatctatgtgggcaaggccaaggcgttgaaaaaccgggtgtcccagtatttccaggactccgcctctcacacggagaagacccgggccatggtgtcccagatcgaccactttgacgtgatcgtggcggacagcgagtttgaggccctggtactggagaactctctcatcaagcgccaccagccccggtacaacatcctgctcaaggacgacaagggctacccctacatccgcttgtccggggaggagtacccccgcttctccctggccaaccgggcggcggaggatggggcacgctatttcggcccctacgccagccgccacgccacccaggctatcgtggacgccctgcgctccgccctgcgcctgccctcctgcgggaagcgctttccccgggacattgggaaggagcgcccctgcctcaacttccacatgggcaagtgcgacggctactgccgcagcctccagatgaaggagcagcatgaggaggccatcgcccaggcggtctccctgctggaggggcggttcaaggaggtcaaagcggacctgaccgccgagatggagcgggcggcggaggaactgcgcttcgagcgggcggcggagctgcgggaccgcatccaggccatcgagctgctggggatgcggcagaaggtggtggcgggctccctggcggataccgacgtcaccggctttttccgggggacagccaagagctgcttcgtggtcctgcactacatggagggggagctggcggccaaggatatggacctgctggagacccctatggaggaggacgaggaggaggtcctctcctccctggtgcgggagtactatgtgggacgaagccggctgcccaggcagatcctgctgccctgtgagctgcccgaccaggtcccgctgacccggatgctctccgagcaggtgggccgccgggtggagctggtgaccccacagaggggggcaaagatggatctgatccggctggccaaccagaacgcggcagaagaggtggcccgggccaccacccgggaggaacgtcagaacaagctgctggaggcgctggccaggatgctgggcatggaggagcccccccggcggatggagtcctacgacatctccaacactggagccagtgacatcgtggcctccatggtggtctatgtggacggaaggcccctgaagcgggactaccgccgctttaagctgaaggatatggagggcccggacgactacgcctccatggagcaggtgctgacccggcggttccgccggtatctggacggggacgaaaaatttgtggagaagcccgacctgctgctcattgacggcggtctggagcatgtgcgggtggccaggcgggtgctggaggccatggcgctggacatcccggccttcggcatggtgaaggatgaccggcaccgcaccagggccctggtccaccccgacgggcgggagattggtatccaggcggtgccggcagtgttctctctcatcgggcagatccaggaggagacccaccgcttcgccatcgaataccaccggcagctccaggcgggacacgtaaaaggctccgttctggacaaaatacccggggtgggggaaaagcgccgggcccagctgctcaagcacttcaaaagcgtgaaggccatccggcaggcatctctggaggagctggagcgggcggtcccccagagcacggcccaggcggtgtaccagtatttccgcaggggagagacagaaaatcaggatcaggctgagagaaaggaagagtgaccatgcgagtgatctccggctccgcacggggcagaagactgaaagagctccaggggatggacacccggcccaccaccgacaaggtgaaagagtccctgttcaacatcatccagttcgagatcgaggggcggagcgtcctggacctgttcggcggcaccggacagctggggatcgaggctctgtcccggggggcggagcgatgcacctttgtggacgcccggcgggaggctgctgccctcatccgggagaacctgaaggccaccggactggagaaggcgggccgagtggtgcagggggatgcgatctccttcctcagcgggtgccgggagcggtttggtgtcatattcctggacccgccctatcagacccagctgctggagcagactctggagctggtgtcgaagattgacattctttcggaacatggtataatgatttgcgaaagtcccgcggagagggagcttcccccgctggcacctccctatgaaaaggggagggaataccggtacggcaggatcaaactgacagtttaccgccgtcaggggagtgacccgagaccatgaagaccgctatctatcccggcagctttgaccctgtcaccctggggcatctgaacattatcaagcgggccgctcagtgctttgaccgggtgatcgtctgtgtgatggtgaattccaagaagcacgggctgtttaccccggaggagcgggtggagctgctggaacggtgtactgcccgctttcccaacgtggaagttgacttctccgacgagctgctggccgcctatgccaagcgcaggaaggctcatgtggtggtgaagggcctgcgggcggtatccgactttgagcaggaggtccagatggcggtcatcaaccgcaagctgaaccccaggctggagaccatgttcctggcctccagcgataagtacacctacctcagctccaccgtggtgaaggagatggcccggtatggagcagacctgggggagttcgtcccccgggagatcgtggacgacgtagaccggaaaatgcgccaggcgcaggaaaaggagaatgactgatggcaagcggtgtggaagagctgctggacatgctctttgaaatggtggatgaggccaagaatatgcccctttccagcgacaagtgcgtgctggagcgggaccgcgccctggatctgatcgatgacatccgggcccagttccctgtggagctgggcgaggctaagaagctggtggcctcccggaacgactatatcgccgcggctaagcgggaggcggaggtgatccgcaagcaggcggaggcggaggcgcagcgcatgctggcagaggagtccgtgctgaaccaggccaagcagcgctctgctgaattgatgcgccaggcggaggagcgcagccgggagttgaagcgctccgccaacgagtactgcgaggacgccctgcgccgcaccgaggaggcggtggcggaggcctatgacgagatcaagaagtcccgggcccgcttccgggcggcggccagcgccaccgccgcggggagcccgtcgggagggcgggctgcctatgacgcggcggccgaagaggactgaatcacagagaacagcgggggccgcacggatgtgcggcccccgctttgtgccacggtgggtgggcctcccgggaaaatgaagggggggatggggcaggccttcatttttt

SEQ ID NO: 13664 - DNA, 310 bp, Unknown
  gut microbiota DNA sequence
atctcagtatcatcatcccagtagctggagaagcggtcattaggttctccgccctccatctcgtccaggacttcctcatcccagtccatatcgtcatcctcggcttcttccttgcgctggccggtcaattcctccaaaaccgcctttccgtccttgacgggggtagagagcatcttcttccggtactccgctacagctttgaggtcaaattcgtgaatgtccgcatcattcttcgggtcggcgttcatcaccagacactccaacagcgtttcgtcatccgccttgatgagcaccggcacaaagccttcct

SEQ ID NO: 13665 - DNA, 383 bp, Unknown
  gut microbiota DNA sequence
agcccaccaagtttgaaacggacaaggcgaagctgcgccggacgatacggcaggcactttcccaagctaccagctttgacgagttttcttcccttttgctgcgggagggcgtgaccgtcaaggagagccgagggcggctttcctacctcacgccggacaggacaaagcctatcacagcccggaagcttggggacgattttgacaaggctgctgtccttgccctgcttacacagaacgcccacagagccgccaaacagaccaaagccatacccgaataccctgtcgcagttaaaaagccgtcacaaggggaaaaacccacaaaaaccaccccggcagacaacaccttgcagcgcatggttgaccgggaagccaagcgagccgag

SEQ ID NO: 13666 - DNA, 1284 bp, Unknown
  gut microbiota DNA sequence
agcactgctccaccgctgtgcgcacctccggcctgggcgggtcgatcatgccgatgaggcccacaaaggtgagtccctgctccagagcggcgctgttcagctcccggggcagcatggccagatccttgtaggccacccccagcacccgcagggccttccccgccatggcctcgttccggctctccagccgccgggcggcggcggaatccagccggcaccggcgggcgagcacgtcgggggcccccttgacgcacacccgccagccgccgccgggcctctggtggacggtggtcatgagcttgcgctccgagtcaaagggcagctccccccgccggggccactccccctccagtccatttttatccaggccctcccgggccgccgcgtccaccagtgcggtttcggtgggatcgccggtggacaccggctcccgccccttccaggtcagggcggcgtcggagcacagggctccgatggtgagggccagggcccgctcgccgctccggggcgtccacacgtccaccacggtcatgcggttctgggtgagcgtgcctgtcttgtccgagcaaatcaccccggcgcaccccagggtctccacggcgggcaggcgcttgacgatggcccgccgccgggccatgcgggccacccccagggccagcacaatggtgacgatggcgggcagcccctcggggatggcggccaccgccagggagacggcggtgaggaacatgtccagcatgggccgcccctggagcagccccaccccgaacatcaccgcgcacacgcacaggcagacgaaggacagggtcttggagatctccgccatcttcttctggaggggggtctgtccctctccctcccccagcagcagcccggcaatgcggcccacctcggtgtccatgccggtgccggtgaccacgcacaccgcccgcccccgggtgatgacggtggacgcgagcaccatattgtgccgctccgccaggggggtgtcctccggcagggcggacagcagccccttggacacggggacggactcgccggtcatggcgctctcatcggcctggagggaggcggcctccagaatccgggcgtcggcgggcaccaggtcccccgcctccagatggatgatgtcgccgggcaccagccggtcggtctccagccgctgaagcgccccgtcccgcaccaccttggccaggggggccgacatcttccgcagggcctccagggccttctcggcgctgtcctcctgggagatggagatacaggcgttcaccaccacgatga

SEQ ID NO: 13667 - DNA, 182 bp, Unknown
  gut microbiota DNA sequence
cagtcactgccgaagtcagcggcgctctggaagtagcccagggcgcggcacagcatcagcacggcctgtgcggtggtcacggtggcgttggggtcgaacttgccgtcgcccacaccggccacgatgcccaggctggagcacaggttcacatagccctgcgcccaggcggggacgtcggtgaa

SEQ ID NO: 13668 - DNA, 7147 bp, Unknown
  gut microbiota DNA sequence
tcttttgtgtctgctgtttgacctatactttgatccacgtcggcacaagctccggatctctcccctcgccgtccgcggcagggtccgctccctccgttgcgcctcccttccaaatgtgcctcgctgctctggactcacatttgggttacttcccctccagcactcccgccatagtttgtgccgcctgacactgggcagcccccgtcacataggtgtagatgtctagggtgaacccggcagagaagcgacccagcatcccggacctcgtcttgatgtccactccgttttgcagggccagggtggcgaaggtgtgctggaggtcatggaacctgactttaggcagtcccgcccgctttagcacccgatggagcatatgcaggacactgtccgggaagatgggtccaccgttgggcgacgggaacacccacaggcagctgcccgcttttttcttctgccctaacagtacgcttaccgtatcctccgccaacggcagggtgcggtaggcgttttttgttttcagcggtgcctccactacctctccgttgatccgggatatctgccgtagagcccggaggtcaccccgtttcaaatcaatgtcccccacttcaggcccagaagttctccccttctcagcccggtggccagttccagatagtagagctcaaatacgccgctctccctggttttccgcaggaaggaccggggttgctccaccggaagggtcttcatctcccgctgttctactttaggcagggcacaaacctccgccgggttggtgagtatgatccgctgctcctgagccagctttaaggcagaggaaagaatctggagaatgttccgcaccgtcttggcgctgaggccttttagctgtcccttggcctccagactgtctatccggcctttggtcagcagcttcttgtagagcttctgcaagtctagagaggtgagcttttccagcggaatggctccgatgttgggaactatgtagttgtcgatgcacccccggtaggtctggtgagaggacgggcgcactcttttgcatagttctcgaaccactcgttcatccattcccccactgcgtatttcttcgatttcaccgtgttaatatccctttccatttctatggcttctttcagctttgccttggcctccgcctgggtccggcccagaacatttttgtaaattgtcttttctgtctctggggcacggccctctgtgtactgttcctccaccagccgtcctttcgttttcggaggtttccctccccgttggctctgcgtttttccacgatgcactacctcctttgcagcaacacaacatactgcaaaaagagaaaaatatccagggccatggcgcagagttatcaaaacattcatatttgccggttatccggcaaatcgggcctaggtctatatccttgtttaagcggcgcaatttttgagccttgaacattacttgaaatcgggtagatatcacatgtgataccagaagaacccttgtgggcatggcagtttacagctttgtgatatcacatctgatgcccgcgtggaaaatgtgatatcacgtaattttctcaaatagtttcacatttttccaattcgtgtcgttttcccgtcctcggcccgcactgtggaaagatgggcaaagcggtgatgtcaccgctttatcctgtacttttttcggccacccggtcccccctagtttcggggaaaactgtttttcagagcagcatccagttttcgacacacggccccgaaacaggcgtggatggttccgaaggggcacggatacccctcactccttttcggggcacacagcggcctgcacggttaaacagggtggcgaacgaccgtcgtttcagtaccggaatcaaaaattatccaaaaatattcagtcagcggatgtgtcaaggacaacataacaatgtttatccatctgataagtatacataaattcaaaactaatgccactatacaaaaagtgaacaccgacttatctgttaagcatatcttcaggggtaattcgaagcatttgtgtcacattttcagcagatattccatgctttatcaggacttgcacaaaacgggccatcccctctactggcgtctcccttccgctttgcccccggtccgtggacagaaagcagtgctccggtcccaccgtgcggatatggctggccatgctctcggctgtgcagttgccctctgcgatgttgtaccagcacttctctacgtacacccccagctgggccagctcagcctgggtgtctgcgtccatggtggtacggtcccactccgggtgagtcaaaaccatccttacccccatccggcggccctcccggcagagcaggacggattccagggggctgatatggccggtagccaacagggcccgataactccggaccacttcgaagatctcgtagatttcccggcgcagattcccctgcttatccagtaggctgatgccctcccgctggaaaaagtctcccggcatatccccgtggaacaggcagttggccgcgtctcgggttggcataaagatcacgtgggcccccattttcaaggcgctgtggactgcatagggattcaggccgcccaagggccagttgagaacggccgcaccgtaggctttagcccggaagccctctccccgtcggttggccagaatggcccgggccccggtgggctcgtagtggtttttcagcaacacaccagccatccccgcctcttctgcctgggcgagcacctcaaagtcgtccagtagacgcgggacatgggagggaattgggtgtatatgcaggtcatagctgccctgaatcagggcgcgagcctgatctaaactggacatcataagctcctttctataaggacggggcggctgagagttcagccgccccgcctgtgaacagtattattttgtgggggcagtctcttggcttctctctagtgtcttatgatatttgttttgttttttatcaaaattgcggaacaggctgtagtcaatgccctgtgcaacccagaaatactccttatttgtggggatctttattcgtgaagagtgctgatgatctccgcctctccctggcgcagctcgttcatcttctctttgtgtacaccgaatatcttggctccaatgaggaacagcactagagcaatgcctgtctcaatggcgcctaccgcgaggcagcccatggagactgccaggatcggcgtcagtgcgatgataaacacctcgatcaccgactggagggtataggagtaaccatagtcgttcaaagtgccgctcttggcctccgggtctacgatgcgcaacagagtgacaccgatggccaccacgccggtggtccagccgaacacgaaaatagagcgctcaaaccagaagttatggaacagcttccggcccacaaagaacaccagggtcagggaggtaagggtacccagcacgcacagcaggaggatggggcccacgaactccatgaccacagtgatggagatggaggccacgccgaatcccaccagatagtcggtcaccatgctgccgatgcggccttctacatgttcatccacgctatccttaaagggggtgtggttcaggagggtctggaggagcacgccggcaatcatggtcaaacacatgactggcagctcaatatcaggaagatactgcttataccagtcatagaaggtatagccggccagggtggcgatcaaggtcagggccagatgccaggccagggggtccatggacatggggttgatggtctcctcgcccatggagatgcgcttctccgcaggaacaatgccggtgcggcagtcctcaggcagggccttggcgcttttgaccagccgggtggcccctttccgggtggcgtagttgatgcagataatacccacaaacaggccggtgagcaggcccatggtggcaaaggtctggccgatgaccacgccgtccgtgcggcccaggaggttattcagggcagtaccaatggtggaggcgtagccgtgcccgccgcagtagccggagggcatcagcagggcgatttctgtaaagacgtccgggaacaggaacgtgaccagcgcgccgcccaccagcaaagcaatgccgaagcagaagaactccgcacccatattgacgcagaaggaatcgcccacctgggtgaaaatctttttcacgctggtcttttccttcttgcccaggaacagaccgccgaacagcacgcacaccagcatataggcgtaggagccgatctgaccgctccagggaatcagatccaagaactgaggcccaagcagcagtcccagtatcccggccacgagggaggcggggatgtagaacatctgcaggaacttgatcttggcccgcataaattgagcgatcaccagcagcagggacataaaacagaaatccgtcaaaaacgacatataattgtattccatggccgagattctcctttgttagtctccctcgcatcaagagggtaagccggataaaaggggcgctcccgtctcagtatataaacatgcggcgggagcgccctaaaccccatttggacttgtgtaaaattatttctgcagaccaaactccatgggtttcagatgctccttatagaagtcagccagagcggcggccaaagcttggaacttgggatcctcgtcgaacatccactcgttgtgcttgccatccacatagtagagttgcttgggctcattagccaggcggtaggcttcctcggcctctacccgctggtggagctcattgtagtagccgtggcccacaaagacggcccggggcgcgatcttgggcagaaggtcctccacattgaagcggatgaagctctcgccgatggcggtggacatgggggtggggaactcctcaccgctgtccgcatctacggagctctggatgccgccattgatctccttaagtacgtggtcggtgtagaagtcgccgctctcggtgatgttggggtagtcggtgtaggggtgcatcagcacagggtcgttggtggtgatccgcttgatgcggtcctgacgcaggcgggccacagacttaccgaaggcgtcgtttcccatgccgtctcgcatccagcgctcgccgttgatgaaggagttcagagtcgcaaccgccttgacctccttgtcccgggccgccacggtgatgcacacggctccgcccacgccccatcccagcaggccgcagcgctcggggtcgacctccggctggacctgcatgaaggtgaaggcgttggcgatgtcctccacctcggtctccagggtggtatacttgggcaggcagggatggacatcctcgctgggcttgaaaccgcggtagtcaaatcccatgcacacaaagccgtaggcggtcagagcacgggcgtacagggcaggatagcacttgttcacgccggtccagccggaattgcacagcacggcagcccgtttttctccctccttgtaatcgtcgggcagatagatggtaccggccatcttggcaccttcgctgtagaatacgacgtctctggttttcatttcaaattacctcctaaaaaataattgtggttttatcagtccaaatgtcatttaaattgttttttgcttttgtgatgctaattatattccgttaaaaagaatatttcaaccatttattttgcaaaatagaatttttgttccctttatagaaaatatatgtttcattttgttctttttaacgaaatatttggcatatatattctatattatgattgatactatattttttagagaaaatagtaaagtagttccgtagtttgccacataaaattctccatttcttcttttagacgccttcccccgcattctgcgccagagccatgccatagttgaccatgccgcaaaaaaaggttatgataagaatggaaaaccaccgatttcaagggaagaactgcaggtgcttgtaatggaaaaaacacttcttgatgagataatgacattaaaagatgtgctgcccaagaaacagcgcatcctgtgtcaatacttagctttgaactacgagcgggtaggagtcatgacagtggctgagttggcccgcgccgccggcgtcggtaccaccactgtcatgcggctggtacaaacgcttggatatgacagcttcagcgctttcaagcgcaccctggcagatgtggttctgttgaagaacacctcctcctaccgggggcagaaacagagctttgtcagcaccaaggagacagagagcagcgataccttccgctcggtggctgccgacagcctgcgcatcgtggaaaacctctgtactccctcaaatattgaggaatttgagcgtgccatccagctgatgctcaagtcggacacgatctataccattggcttgcgctccagcaaggcactggccctctattttgagtatgccctctcttgcttctaccctcatgtgcgccagctgagcctggagggagaatttgtatttgacaaggtttccgtccacatgaaacccacagatgtgcttctggtcttctcagtatggccctgcaccaaacggaccatccaggtaggcaagctctgtcatcagctgggtattcccatcattctggtcacaaataccagccttaaccccctggcgaaggcagccgatgtgatgattgatgccaattcagtcaatcacccctgtggggacgcccccctgatggtagtgatcgaggctctggtagctgagctgggacgccgcaccgccccccagtccacgctgaatctggaacgcatcgaacaagtcctgagcgagaataatttggtgatttgggaagattgattgggcattgctataggtgtaaacttaggcattggatttggtgttggaactatttctcctgatccaagccgtgacccatacgaggtttggacgtttaagagacaacagaacaaatgatctcaagctgtaaagctgtttcgacagaaaaggcacagaaattctcaacagattgggcatcacatcggaatcgcagctcataacccggagctctcagattcttgaaaagacccaagtttttttcttccactccttctcatagtttcgccctttccgcatatcctgaccttgtccagcgattcggcgccggcgggctcctgtaactttccgcatttcagatataatt

SEQ ID NO: 13669 - DNA, 3946 bp, Unknown
  gut microbiota DNA sequence
ggcaggggggacggatgttcccgccgcctccagctcaaaggccgggaaacggcccctgcgggaccgaatacaatatgatattagaattcggaggaatgcagtatgtccagaaagttttcgttggcctatttgaccatccccggtaccgcccctgtggaccagatccgcatcgccaaggaggcggggtatgacttcgtcagcctgcgcaccatcccgatgcacctgcccggagagccggagttcctgctccacaaggacgccaagctgttcgaggagacccgccaggctctgaaggagtacgacatgcccgtgatggacatcgagctggcccgcgtccgccccgacctggacatcaacgagtatgaccccgcgtttgagaaggcagccgagctgggcgccaccgacgtgctgggcagcatctggacccgggacaaggcctactacatcgatcaggtggccaagatcgccgagatggccaagaagtacggcctgaagtataacgtggagttcctgccctgggccggtgtccgcaacctccaggaggccatcacgctggtggacactgtgaaggcggacaacctgtacatcatggtggacaccctccatgccggccgcgccggtgtcaccggtgccgagctggcccgcaccgatcccaaatacttcaacttcatccacctgtgcgacggccccgccgggcccgacggagaccccgtcctggacaacatcaaggacgagctgatgctcttcaccgcacgtgagggccgcctgtaccccggagagggtgccatggacatcgccggcatggtgaaggggatgcccgagatccccctgtccatcgagctgcccaacctgaagcggatcgaggagctgggtgtggccggccatgccaagcgctgcctggatactgccaaggcttactttaaggagcacggcatcgactgagtcctgccgtctgatatcaccgcaataaaacttttttgaagagaatgagagagggatcgttatgaagatcgacatcaacaccaaaatgatcaccctgctgggcaaacctctgggccagtctttcgccgcccggatgcagaacgccggttatgaggccgccggtctgaacatgctttacttctacaccgaggtggacaaggaccacttgggcgatgtggtcaacggcctgcgctacatgaactttgccggcttcgccgtgaccaagcccaacaaggtccgcgtgctgcgctacctggacgagctggaccccctgtgcaagaagatgggcgccagcaacaccgtggtcaagacccccgagggcaagctgatcggctacaataccgacggcgttggcttctacacctccctggtggaagagggcaagatcaacgtggaggagtccaccttcttctgcttcggtgccggcggcgccggccgtgctatgtgcagcgtgctggcctatcacggagccaagaagatctacatcaccgacttctatgagccctgcgctgagtccctggtcatggacatcaacgagaactttgcccctgtggctgagctggtccaccacggcgactacgccaagatcgctgagtgcaacgtggttatgaacgccagcggcatcggcatgggctccaccatcggccagactcccatgcccgtggagcacatccagcccggtcagttctattttgacgcctgctacaaccccgacaagacccagttcctgctcaacgcggaggagaagggctgccaggtgctcaacggtctgggcatgtccctgtatcagggcgccgcacagatcgaactgtggactggcgagaaagcccctgtggaagccatgcgcaaggagctcatggacatcttggcggagagcaagtaaggaccccccatctgcgctgtgcgctgttttgaatgagaagacaagaagagagagaggaggaaaccacgcattggggtatttccgcattccggggggagaagagatcgggatgcggagcagtccggccccccgccggacatgtctgccgccggaaacagcccggtgaaagacgttgtaagtagtaaagaggaggtaaaacatgaaagtcatcaaatggctggatgagcactttgaagagaccttcctggtctttttcctggtcctcatctcctgcatcaccatgctgcagatcatcgccagaaccttcttcgccgcgctttcctggccggaggagttctgccgctactgctggatctggagcgtgttcatttccctgccctacaccatgcgcaagggcaacatgctgcgcgtgaacgtgctggtggacctgctgcccaccaaggcccgcaacgcgatcaacatcgtgatcgatctcatcaacaccgtggtgatggcgctgtttttcaacggatccatcaccgtgatccaaaacgccctgaacagcggtcgtacctctcccgccatggagctgcccatggccgctgtgtacatctgcctgctgatcggcttcggcctgggcttcatccgcggcatccagcaggtcgtgcttcatatcatgaacttcaataagaaggaactgaccactctggagcaggctatggcggacgccgccgaggaggccgccgcggccaagggtgatctggaaggaggcgcgaactaatggcagcattaatggtatttatcgtatttctgatcgcaatcgccgtgtccgtgcccattggcgtggccatgtgcctgggcaccctgttcccccagtattttatgaacgccggagcaccggtggaccagctgatcaacttcacgctgtccggcgctgactccactcccatcctggcggtgcctctgttcatcctgggcggcgtcatcatggcagagggcggcatctcccgccggctgttcaacttcttctcctacttcgtaggaaacatccccggcggtgtgccctgcgcggccatcctgacctgcctgttctacggcgccatctccggttccggcccggccaccaccgccgccgtcggctccatgtgcatccccttcatggtggaaatgggctatgagaagcgctggagcgccggcctgatcgccgtggccggcggcctgggcgtcatcattccgccctccatccccttcgtgctctactccctggccaccggcgtttccaccggcgacctgttcctggccggcgtcatccccggcatcctgattggcctgttcatgatggcctatgcggtgatcttctgcatcaccaagggcgaggacaagcagcgcatccgcgccaagatgtccgagctgcggggcaacggcttcctgaagctgtttgctgacagcttcttcgccctgctgtgccccatcatcgtgctgggcggcatctactccggcatcgtcacccccactgaggcggcctgcgtgtccgtgttctacgctctgttcgtctccctggtggtgtaccgctccatctctttgaaggatttgatccccttcctggccagctctgtcaagacttacggcggcctggctttcgtgctggctttcgccaccgctttcggccgcgtgctgtccctgacccgcgccaccaaggtgatcgaggacttcatcgtgggcaacttcaccacttcctggagcgtcctgtctgtcctggtcatcctgttcctgatcctgggcatggtcatggataccggccccgccatcgtcatcctggcccccatcctgctgcccgctgtgcaggccctgggcgtggactccgtccacttcggcgtcatcctagtgtgctgtctgtccatcggcctggccacgcctcccttcggcctggacctgttcgtggccggaaacttggcggaggagccgcccatggctgtggccaagcgggcggtccccttcatcatctccttcctgctggccctggctctcatcacttatgtggagccggtcagtctggcgctgttgggccgctgaccactgacttcggttcacccttgacctggt

SEQ ID NO: 13670 - DNA, 8981 bp, Unknown
  gut microbiota DNA sequence
ctttcccgttccgcgcctctctcaccggcggcggcgcagtgcccgaggctggggctcctgctccaccaggatgatgtcctccccaaaccgccgcacccggtcccaggggatatagcggtcctcctcccggcccagcaggccgaacagccgcagccgccccggcaccaccagggcccggacctgcccgctctccaggtccacctccatgtcccccacatatccaaaccggctgccgtcggtgacgctgatgacctccttgtaccgcagctccgcgatcctggtctccatgctcggacctccttccaggggatgttcttcctgccctcagattatgagctgcgggcccgtcctatgccccgcctgcccgcaaaaaagaggggggcgccgcgcagtccgcggcgccccccttgaaaacggtccggcatcccttattccaggttcagatggtttttcaggagataccgggtcagaacaaagaacccggcacccagcaccgcgatgcccaggatcagcagccacatgagcaggtgtccccccgtatcccccttcagctccataaaccagcggccgatctccgccatccagggggaggagacgaagatctccagcataccggtaaagaggatattcagcgccactgcaaagccaaaataggcgccgaaggctgccagggtacggtgcttccgggccaggtggcccaccgcgatgctggcatagatgtgcagcatgcacacggcgccggcggccagacacaggaggagcagctccaggaggagcagccagtcgctccagtccacatatacgatcatgtcaaaaaaatcaccgggcaggtcgagccacatggtgccgtccagggccagggccagcaccgccaggatggcggccgccacagaaagcacgtccagcagcaccgccacaaccagcttggcagtgatatgctgggacacactggcgggcagggtgaacatcaggtatccctcgtcccccagcagatttttggaaaagcgctggatctggatgatcagggtcagcacgaaggcagccataaagaggccgaagcacagggtgctcatcgccatagtgatgatatcatagagcgtggagctgaaccgctccaggttccccagcaggaagtgggtcagcatcgccgccaggatcaggccgccatacatggggatacacacccgcgcgaccgccttccactcgtatcgaatcagtttgctcagcatgcgaacacctcccggaacagagtatccaccgacttgcccgtctcctcccggatggcgtccacgtccttgtgcaggaccatgacgccctcccggataaagaccacctcgtccagcacccgctcgatgtcggcgatcaggtgggtggagagcaggacactggcctcctcgctgtaattggacaatatagtgcccaggatgtagtcccgagccgccgggtccaccccggcgatgggctcatccagcacatagagctgggctttccggctcatagtcaggatcaactgcaccttctccttggtgcccttggagagcaccttcagtctctgccccgggccgatcttcaggtccttgagcatctcgtccgccttcacctggtcaaaatccttgtaaaagtcggaaaaaaaggccagcaggtcggacacccgcatccagtcgctgaggtaggggcggtccggcagatagctgatgatgctgtgagtgtaggtccccggcgcctgtccgtccaccagaacggtcccctcggtgggagtcagcagcccgttgatcagcttaatcatggtggtctttccactcccgttggggcccagaaggccgatgaatttgcccctgggcaaattcaggtccagacggtccagggccgtctggcggccgaaccgcttggtcagtccctgacagaccaccaaatcgttgtcttgtctcatgcgttcttctcctctctctcccgctggatcagccccaggacctgctcctgggtgaagcccagctgggacatgctctccaaaaaggcacagatccgctcctccgcgatccgttccctgatctttgtgatcatttcctcatcctccgtcacataccgtccgctggtccgattggtgtacagaaggccctggcgctccagatcggccagcgcccgctgcatggtgttgggatttaccccggcttccgccgccagctcccgcacggcagggaccttgtcccccgccttccgctgcccgctgacgatctgcatcatgatctggtccaccagctgctgatagatgggccggtcgccttccagctgccattgcatgtctgtgctcctttccgttcgtattattgtattaagcaattagtacaataatacattggtgcaaatttgtcaacccctttttaaaaatttctcccgatcccattttgtattcctgagcgggcctcctctctccagagcgctttctgtttccggagatatttcttatgctcatttctatttacagagcccgcatttctgtgtactatatgggacatagcaaatcaccggcggatctctatcgggccgcaccacacagagacagaaacggaggacaaggtcagtatggagcttgacaggagcaaatttgtgacaccggaggtggccgcggagagggcggtccgctccggtgactgggtagactacggcttcggcggcggatatccggagttgatggacagggcgctggccgcccggaaaggccggctgacagacgtgaagatccgcggcggactggtcatccgccccaggatcgaggtggtggagtgcgacccggagcagatctccttccactattacagctggcacctgggggattacgagcggaagctgcaggcccgtggcctggtccagttcctgcccatgatcctgcgctccctgccctgcctctaccgggaccggcacatccgctgcgacacggcatttgtccccgtctctctgccggatgaccagggctactgcggcctgggcatctccaactacgcctggcgtaccatcttccagtccgcccgcacggtggtctttgagatcaacgagcgcctgccccggctgcaaggggtggacggcagccaccgcgtccatctctcggaggcggattatatcgtggagggtgagcatgaacccctgcccctgcgcacctaccgggaccccagccccactgatctcaggatcgcccagctggtggcccaggagattccggacggagcggtcctctccctgggggtgggaagcgtcccctttgcggtagcaagtatgctggccgactccgacatcaaggatctgggctgtcacaccggaaccatcagcgacgcttttctgcgcctgttccagaagggaaagctgaccaacagccgcaaggaggtggaccggggatatgcaacctggaacctggccatgggctcccaggagctctatgactggctggaccgggagcccggactgttccgccccagcgatgtggactatgtccactccccggaacgcatcgggcagatgagcaatgtgatcagcatcaacggcggtgtggaactggaccttatgggccaggaaaacgcagagagcgccggcgcccggcagctctccggcatcggcgggcagctggatttcctggagggtgccttccggtctaagggcggaaagggcttcatctgcctcaattccacacaccaaaagaaggacggcacactgaagtccaacatcgtcccctgcatcccggcgggcagcgtggtctccgccccccgtaccatgatccagtatgtggcgacggagtacggggtcgtcaacctcaccggcctgtccctgctggagcgggcccaggctatggcctccatcgcccacccaagcttccgagaggagctcctccgctacgctggcgaacattttgggaccagataggctccttgcctttcccgcagtctatcgctcctcccctttagttcactgttctcttcagaaaagcttcagagtaccgatttataaaaaaagctgtgaggaaaattcctcacagcttttttgactgccctggtgtcctctcatccgtcactgcatccgccgtgacaactccccctataagatggaggcgggaggggcccccctcccttatgcaagaaccgaaagtatcctccgggccgcaccagctttgatgggtcccctacggggaaggggcggccccgctcttccgttcctcaatcatctcgtgcagacaggatagggcatctgacaagccgccgatccggtcaatcagccccagctccaccgcctcttcaccgtagatcacgctgcccacgtcggcggccagctctccggtctggagcatcagctttgtaaaggtctccctctttatggaactgttggcagtcacaaattgcaggatacgctcctggatgcgctcaaaataataaaaggtctggggcacgccgatcaccagcccattcagccgcaccggatggatagtcatggcggcggatggggcgataaaggagcgcttggccgacacagccagcggcacgccgatggagtgccctccgcccagcaccagggacaccgtgggcttggacatgctggcgatcagctccgcgatgcccagccctgcctcgatatccccgcccaccgtattcagcaggaccagaagtccgtccacctcctcgctctcctccaccatggccagcagcggcatcacatgctcatacttcgtgctcttgctggtgggaggcagcagctgatgtccctcgatctgccccacgatggtgaggacatggaccgtaccgcggccggtccgaatggtggaggaccccatctccacgatgggctggatggcctgctccatctcctgctgctccccctgctggttctcctccatgatgcattcctcctttttcagaagtagcttgcgccgaagtccggaattttactcctgattttccctcattggccctgtctacttttcgtaggttgacttttttccgccccatgtcataataaaatagaaaaggaggggctgtatggacaacatacgctttgggtcctttgtggcccagctgagaaaggagcgggggctgacccagaaggagctggcccagcggctccacgtgacggacaaggccgtctcaaaatgggagacaggacggggatttcccgacctgaagctgctggagcccctggcccagaccctggaggtctctctggtggagctgctccagggggagcggacctcttcccccactctgtccgtagaggaggcgggacaggtggcggcccgcgctatggaccagtaccagcagaccaccgtcctgcgctatctccggctgttccggtgggtctgcaccgccgcggcggtcttctgcttcctctttctgctgccgtacctggtttgcggcgtctcccagctctactttcattgggtgatcgagccccagatgggggtcatcggcagcgcggagggccccaccgttatcatcacttcctcggctcccctgttccccgcctggttccggccggcactgctggccctcctgtgcgccgcctgcggcgtactggttttccggctccactgcctggagaggaggctgaaatgaagcgcctgttccctctcctgctgacgctgctcctgttccccctgcccggctgtgggctggggaatgggatcccccgcggtctggactggcaggccctcaccgtcactgaccagaagggaggcgcgctgctctccgccgccccaggctgggaagggggaaaggacgttccccgtctctccctgtccgtccaggtggaggcagacagcgtggtcctcacccggccggagaccggagagcgatggagcggcaccctcgcccccggcgaggccctctccgacggcactaccgcctaccccctgtccttccccggcgccgaggcaggctgggcggtgtatggtatcacagagcacaccgatggcagccgggaggccgccctctatctcactgccgggggtgtgacggtctactgtaccgccccactttctgactaaaaagagaccgccccgccgccgtccacatagaatggactgcggggggtggtcttttttgtcccatatgttttcccgaaattcctacatccttctggcggcggccgtcctgctggccgtcctcctggcctgggaggccgacgtggacgagcggggccgcatggccgccttcttcactgtgctgggggacgccctggctctgctggccctccagcccagctgtccagctgcggaggaggacgaggtcacgccctgtccggcgtgaggaaagcccggatctcgtccattcggtccaccgcctgctgatacccatctccccacagcatcctcagctttttggtatcccgctcgatgcgggataccttgtgggtggacaccggggccagcaccagtaccctgccctcccgctccagctggaacaggcgctcccggcaggtgttgtactgctctgcccgccgcgccatagcccggcagaagttgggatattcccggtaggtccgctcgatcaccggctggagcttctccggccggcgcacatagctccgggtcttgctcagcaccaccaccacccggtcgcacccctgctggaaggcccgttcataggggatagagtcggccacgccgccatccagatagggctgtccattcagatggtagatggggaacatcagaggcagggcgcaggtggcctggagcagcaggaatttgtcatcctcccgcgggactggcatatactccgcctcccccgtgctcaggttggtcaccaccgcctccacctgaccgggataggcggcaaaggtctggtaatcaaaggggacaagctcgttggggatggtgtcatagacgaactccaggccgaagtagctcctgttgtgccggtccgccaggttgttcatccccatataccgccggtccccggcgtaccgggtcacgatctccaggttgcggcggggctggcgggagatatagctcaccccataggcgatcccggcggacaccccgatcacgtagtccaccatcacgccgccgtccagcagggcgtcgcacaccccgctggaaaaaatcgtccggagagctccgccctccagcaccaatccagtcttcatgatgaaacttcctttccaggccggtgccgcgcccccggcggcatcccgtggacatccatagtttttttcattgtatcccctttgccgcccccccgtcaaggcacctgtcattatcttccctctttcggatggttttgaccgctgagcccggcgcggcgcgccaggtcttgccgtctcacacaggggcgtgtcccatacacgcccgatcccggcgatttgttctgatggaagaacatccccctcattcatcacggcagcacttcgttctgcccgttctgtatctaaataagatgatgtggaggatctgcctcaaagctccttttgcacttccttttgctggttctcaatatcttccatgggcttttccggcatgtgggcccgcatatttttcctgttagcacagaaaataagggcacatcaacaaagtaaggaggtcattcctttgaatcattccccagctttccgcaggatgctcgccccggtgctggcgttggcgctggtctgtaccctgtccctgcccgcctccgccttcttctggaacaagaaaactgatgtccccagcgtttccgatttctccaaaaacggcatggtggggcaggtcatttccttttctgccgaggacttccctgtctccggcggcagcggtgggaccgcgctggccgccattacgctgaaaactctgcccgatatcggcacagggatgctcaccgtaggaggacagcccctgaccgagggcgccctggtggacgcctccgccctgagcgggctccagttccaagctctgcccaccccctctgtcaacgagactgccttcaccttccttccctcctttaccaccggagagaccggtgaggaggtgaccgtcaccctatatctgctcaccgaggccaacgaggcccccatcgcccggaatatggacctgtccacctataaaaatgtggctatcaccggctggttgaacgcggaggacggcgaaggggactccctcaccttccagctcacctccacccccgcccggggggccgtgactgtggcggaggacggctccagccagttcgtctataccccctatgagaacaagactggcaaggatagtttcacctatgtggcggtggacccggcgggcaacgtatctcccgaggccaaggtatccatccagatcgaaaagccggacaccaaggtgacctacgctgatatggagggcaaccctgcccacaaggcctccatccgcctggccgaagagggcatctttgtgggctcctatgtcaacggaagctatttctttgacccagaccagccggtcagccgggcggaatttctgaccatggccatggcggccaccggcctggaacccctggaggacgtgaccctcaccggcttctatgacgacgaggccatccccacctgggccaagggctatgtctcctctgccctgaaggcaggggctatccaaggcagtttggaccaggagggccagcccgtcttcggctccggtgagacggtgacccggggggaggccacggtgatgctggataacctcatgggcatcctggacgtgcccgcggaggtctttgcctctgagagcggcggccactgggccggccaggccgcggccaacctgtccgcctcaggcgttatccacggcggggacgacagcgcccaggccatggccgacccgctgacccgggccgacgtggccgagctgctggacggcgcgatggacgtgatggcggatcaggacggcagcatctggttcagctggtcctgatgcggagatccgaaacagctccacttttaagacaaaacctccggctgagccggaggttttgtctgtctgaggcatcttttgtatgggatgt

SEQ ID NO: 13671 - DNA, 47212 bp, Unknown
  gut microbiota DNA sequence
atgtcccgggaaaaaacaaaattccagataatccccgctggagggccttttattcaagatgcgtcggagacttcccctgcggtcattttcccgtccttctgcccaaggcgatgaccagatccccgtccctccaggagatcagagggcggccccggcttgactgtgcggcgggccccttctgcccctgcgggagcctctcttcccgaaaggcggacagcatcagccccagcagcagcagattgaccaccatataccgcccgccggtggacaggaaggggagcaccagcggcgcggccagggggaatcccagatcatagaccacaaagcacactgtctccaggaccagagtcgtcagggccgcggtggacagcaggcgtcccagcatccccctctgccgcatacagcgccgcagccccagtgcgaagagggcagtcatcagggccagaagggccagcccagcggcccagcccagctcgtggatcacccgggccagccagtaatccgaaacgccagggagatagccagccgctccgctcagttcccccagctcccctttccccagccattgggcgccggagagcatctcccggaccatcatggggaaatatcccagccccagggggtccagctccgggtggagggcgaatcggacccgctccaacgcataagggctttgagacagatgccacagcgcggccccgttcaataccaggagcccaacggccacggcggctgcccccttcttccggggcacccccatccagcccttccacgccgcggtgagcaccaccgctgctccgctgaggccggcgatggcaccgctggtgaaattcgggatgaggcagggcaggaccaccggcgggaccagccccgccagagccaggagcagtccccgccagcctttccctcgcaggccatagatcagcagggcgtagagcaccggccccagcagggtgtagctgatccctcctactctcattccgcccctctgtatcaaaacagccagagcagccatgcccaaagaatagaggaggaccggacgccgtcccagcagggtatagtcccccaggtacaccgccgccatagcggcgacccccaggaggatgcttacgatcacggtaggcatatagggctgaactctgcctagctgctgcatcacggtggcctggatgaaaaatccggagcacagcagcagcccaaccagggccagcatgccccactggggcgcaggccggtgcacccggtccagctgggtacccacctccaccgggtcccccatctgccgcaggctctccgcctccgcctccgtctggctcatcccctgggccaggcaggcatcccgctggtccagcaggtgggtgcgcagctcctgggccagagcgggccgggcacgcctccagcgcacctgctccatggcctgatccaggtaatccgcaaaaaagtcatccaaaacagacacccccctccagcacccgggacaccgcccgggtgtagcggtcccactccgcccgcttctccttcagctcccgccttcccttttctgttaagtgataatactttcgggttcttccgcccccctccccctgataggaggtgatccaccccttctcctccagcccatgaagcaaagggtaaagtgttcctgctttcaagtcaaacgtatggtctgagcggcggcggagctcctcgatcatctgatagccgtaccggtctctctcctccagcagccggaggagcagcatcgctgtgctcccggccatccatcctttatcgatgcccatggatagacctcctatatatcggatatctatatattaaaggcggtcccatccttttgtcaaggacaattttttcaggccgacttcggctgccccgctctcttccgcctgggggctccgtaatagtagcggaaaaaccgctcccgaagcagctccagggcgcaccgatagagcttttccgcctcctcatcctccagcttcagctgtttggctgtctctgcctcaggccgtgcctttgccaccctcagcgtcaaaatgacctcatcgttgactggaagatccgccatagccaagtggagggcctccagtttctcctgatggatcacccacctcagcgggtcgccgccgaagtggggctcatccggtggcggctcatgccaccatgcactctgatccttccgcacctcctcccagatccgatctcggcgtgccctcttcctgtggtggttccgaaggacattcttcgcgaacccatagacccaggtggtgaacagagctcttcccccctgaaaccggtccagccttgccaggcatttctccaccgcgtcggatgcgatgtcctccaactcctctttcacaccgtccccatagcaccgccgtgcgtgccggaagaaacagcggcgcaaatattcctctgccagcgcgcccaactcctcccgggcgtgctcgtctcctcgcagggcagcctggaccagggcggcctgccgggcccgctccaaactcatatgcggctctcctccccatgtctctcactcattccagcccctcccctgccacagagccatccggagataccagagctgatccatatagtcccgccacccccagggccgcccccgctccatcatggctcttcgccgccggagggaggggtggaactccactctgagatagcgccggtaaccttggtacagcacactttcccctctcagccgcgcctgccgcttctcctccgcctggagcagccgcgcgatctcccagaactgcatccactcctccccggacgccccgctcaggcgcaggccggtccggtccgcccgcagctcacacatctgtccccagaaccggcggtccgtcaggatcttcccaaagagcaggtctgcccccagatagaggaccagcaggagagcgggcagtggggcagccgccggcaggagcaggaccgatcccgccagcagcaggaagatgcctccgctgaccagtgccgccttccgtgcccgccgctccagctggagggcatcccggtgggcgatgtggctcagctcatggcccaggatggaaagcactgtccggtccatctgctccaggtttcccgtccgctggaagaggagctcagcctgcttcagcagtcccccggtcacccgcagctcgggcacctggcctggggagaggcgggcgctggcgttgaccgtcccctcctgggtctccgttaccagcagggccgggatcttcatcgcccggcagaagtcctccagcgcctcctgataccgctccaggctgctcccttggatggtcacgcccggctctgctgctgcgctcctcccctttttcttccgccagggctgttctgagagcagccacagcagggccagcagaaccagagccgccgcctctcccaccggaccggcggcggccagactgtggctcagcccccagatggttccaaaaacggccgccgcagccagcaggagcaagacaaggagccctctctttttctggtcccactccaccggccgcgtgtgctctttcagaaacccaggtcgggaacgcaggccctccagctccccctgcatccagcttagctcctctacggtcctctgggtccccgccttgaagcagccgcctgccagccccgccagcacacagcagcccatcgccagctggccggccccctccggaaacattctccaggccagcactggggccagcgccccacccagggtgaggtatagcagaggcgggagcaggcgcagggcgatcctgcgccaagcctagcggaagcgctctgtctcctccccctctgtccagcggcggcggaccagcagcagctcccccagcacctgccgttccccgctccacacggttcgggcggtgcggagcagggcgggcaggtctacctcgcggcagatgacccaccggcaccaggctgccgccatccccagctccagcagataaaaacacagcagatgtcccatctctcttttcctccgcaaaaatgcgcgcgcccccctctgcgtcagaaggagacgcgcgctcctgtttttctgtgcagccccgggccgtcactccaccgtgacgcttttcgccagattccggggcttgtcgatgtcacagccccgcatcagggccacatagtaggcgaacagctgcatgggcaccacctccagggaggggaggaacatggggtgggtgtccgggatctggatggcgctgtccacgctcttggccagctccgccccatggctgcgtgtggtgatgccaaccacgtccgccccccgggcctttacctccttcacattgctcatcagcttgtcaaacaggtccccccagctggccagggccactaccagggtgccgtcctcgatgagggagatggtgccgtgcttcagctccccggcggcgtaggcctccgagtggatgtaggagatctccttcagcttcaaagagccctccagccccaccgcatagtcgatgttccgcccgatgtagaacacggagtcgtggttgaagtagatagaggcgtagtactggatcttttctgtgtcggacagaatctcctccaccttggcggggagctgcctcagctgggctaccatgccggcgtactcctcctcccccactgtgcccagcagatgggcgaaacgcaggcccagcagatagatgaccgccagctgggtggagtatgcctttgtggtggctacggcgatctctggcccggcccaggtgtagatcacgtcgtccgactcccgggcaatggtggaccccaccacattgacgatggacagcagccgggctcccagcctccgggcctcccgcatggcggccagggtatcgatagtctcgccggactggctgatgatgacggccagggtgcgccgggtgacgatggggtcacagtagcggaactctgaggccagtgtcacctccaccgggatgcgcagcagccgctccagggtgtatttggccgcaacccccacatggtaggaggagccgcaggcgatgacgtacagccggtccagcctctccagctcctcccgggtgagggagacctcgtccagcaccacttccccgtcccgcaggcgggggaaaatggtgtcccgcagggccttgggctgctccatgatctccttgaacataaagtgctcatagccccccttttccgcggcagagatctcccaatctacatgggagatctccttctccaccggctggagcagggagttgtacacctgggccccatgggcggtaagcaccgccacttccccatcctccagatagcacacctcccgggtgtgctggatgacggcggtgacatcagaggccagcatgtggaagttcgccccgtatcccaagatcaggggcgagtccttccgcactgccaccagccggtctggctcgtcggcgcagacgatgcccagggcataagccccctcgatgcggtggagcaccttgcccaccgcgtccagcaggtcgccttcatagtagtagtccagcaactgggccaccacctccgtatctgtctccgagacgaaggctatccccttggactccaaaaactccttcagccgggcatagttctcgatgatcccgttgtggaccacagcgatccggccggactggctcacctggggatgggagttgacgtcgttgggcgccccgtgggtagcccagcgggtatgccccagccccatgtgtccggtcagcttctgcccctgaccggtgaggtcggccagcacttggagccgccccttggccttggccacctggagcccctgctctgggtccagcaccgccagccccgcggagtcatacccccggtactccaggcggcgcagcccctccagcaggatgggggccgcctcttccgttccaatatatcctacgataccacacattgcaatgatgatcctcctgaattgaaatggaggacaaactcgcagccatttgcacctcgttccccggtcacggcccctctgttttgcggtcgcccgcatatttcgagccatgtcacgcgcccggagcggcgcggaagggcatccgccgaaccggagcgccccctgtgccggcggcgctccccctcgatactcccttcccctcgtcgtccctccccgggcgttctgccgggaagggcgctggcgcttctgatgggccagagcccatggtcctcctttctctctgcgaagctggtatatcaaggccaccgccaggggcggcgggccctcatatctcatatcacggccgtttctcgtcgtaccagtccagggcccgccgctccagcgcccggacaaaggcgtcctttccgtcgcagtaaccctcaatgtcctccgggtaccgtccggccagccaccgcttcagcgccccataggcctcccgctccgccgggcaggcccgcagatagtcccgcaccgccagatgccggaggatattcttccggtcgcccgcctgaaagacgtggagctggtgggtccgatggtccccgcccttgcggaaataccgcctgcccgggatgccgaactcccccatgcactggtagcccagggcctccagctccgggtccagccggtccaccgcctccaggctggtgaccaccggcatgaggtccaggatgggcttggcccacagtccctccaccgccgtgctgccgatgtggtgcagctccaccagcagcggcccgaagactggcatcagcagggcccgctcccggcgatagccctccgcccaggccgggtccggcgggaccacccgcacgtgctgcggcatgctcacccctcctccggtaccaggcggcggatcacccggcaggggttgcccgccgccagcaccccgggcggcacgtccctggtgaccacgctgcccgcgccgatcaccgagccggagccgatggtcaccccgggcagtaccaccacgtttcctccgaaccacacgtcactgcccacggtgatgggcctggcgtactccagcccggcattccgggtaggggcgtccagggggtggcctgcggtatagaagccgcagttgggggcaatgaatacgttgtccccgaaggtgacgggtgcgcagtccaggatgacacaattgtagttgacataaaaattgtcaccagcggtgatgttgctgccatagtcacaccagaagacaggattgacggtgctgttctcccccaccgaggcgaacagcctgcggatgatctcctcttgcgcctcccgttcctccggcggcgtctggttcagcctgccgcacagggtacgggcccggatgcgggccgcggccagctccgggtcctctgaagcatatagtgcgccggacagcatcttttcccgctcagtcatggcttctcctcctgtctccctcctgcttcatagctcgggtgggacgctttattatacgagaccggtggcctggagtaaataccctccgccattgaaaatctttttctttttccgccgttctgaaaaggcagatttctttgagcggaaagagccccagcgccgtcagacgccggggctctgtatgcatcaggatctctgctggtccttacacctcgaacatcaggtcgccgtaggtgggcaccggccagatggacttatccaccagcagttccatctcatccaccggcttgcgcagcgcggccatggctgggacgatctggtcgtggtaggccagggccatctccttcacatcctccatggcgtccacctgctccaccagctcggtcaggctgttcagggccttggtggcggcggtgaggcgcaggctcaccttctccagcagctcccgctgcaccgtcaggtcggcctggggacaggcggcggtgacggcggtgatggattcggccagccgggtggtataggtgatggctgcggggacatagtgcttgcctgccatgtgggtcatggtcttggcttcgatcttcagcaccttggcataggtctcatacatgatctctgcccgggcctccagctccgccttggtgtagatgccgaacttggtgaacagagcctccgccttgggggtgagcagagcgggcaccgcgtccaccatggagcgcaggttgggcaggccccggcgttccgcctcctctacccactcgtcggagtagccgttgccgttgaatacgatgcgctgatgctccgtcatcatatcgtgaataagcttggtgcaggcggagtcaaagtccgccgccttttccagctcgtctgccgcctcacagaaggactccgccacgatggcgttcagggtggtgttggcgtcggcgatggagtcggaggagcccaccatgcggaactcgaacttgttgcccgtgaaggcaaagggggaggtgcggttgcggtcggtggcatccttcttgatgacgggaaccgtggacacaccggtatccagtccgctggaggtgagcagcttgatggagtccgcgttggagacgatctggctcaccacatcgtccagctgatcccccaaaaagatggagatgatagcgggaggggcctcctgggcacccagacggtgctcattgcctacgcaggaggcggactggcgcagcaggtcggcatggcggtccaccgctctcatgatgcaggagagcaccagcaggaactgcatgttctcattgggggtgtccccggggtccagcaggttctccccggtatctgtgccgatggaccagttgttgtgcttacccgagccgttgacgccggcgtagggcttctcatggagcagacagaccagcccgtggcgggtcgccacccgcttcatggtctccatggccagctggttctgatccaccgctaagttgcacatagaatagatgggggccatctcatgctgggcgggggccacctcgttgtgctgggtggtggccgggatgcccagcttccacagctccacgttcaggtccttcataaaggcgcccacccgctcccgtatgacgccgaagtactggtcatccagctcctgccctttgggggcaggggcaccgaacagggtccgcccggtgtagatcaggtcccgacgcttcaggtacttctcccggtccaccaggaaatactcctgctccggccctacggagggggtcaccttgtgggcctcggtgtttccgaacagccgcaggatgcgcagggcctgggtgttgatggcctccatggagcgcagcaggggagtctttttgtccagtgcctcgccggtgtaggagacaaagatggtggggatgcacaggatggtgccgcaggacatctccttcacaaaggcgggggatgtcatgtcccaggcggtgtagccccgggcgtagtgggtggaccgcaggcccccggaggggaaggaggaggcgtccggctccccctggatcagctgcttgcccgacagctggagcagggtcttgccctccaccggggcggtgaggaaggagtcgtgcttctccgcagtgatgccggtaaggggctggaaccaatgagtatagtgggtagcccctttctccagcgcccaattcttcatggcgttggccaccacatcggcggtgctcatgctgatgctgccgccattctccatcacattggtcacttcggcaaacacctttttgggcaggcgctcccgcatgacggagacgctgaacacatttgtgccaaacagctcggtgatcgcagtactcatttccagtcaaccctttccatttccgtaattccaagccgctcctgatctcccagccgcaaaaacaaaaaagacaaagacatcctatcaagacgtctttgtcttcattcgttcccaaacggaccggcggaccggactgctttctggttgacagcatactcctttccggaagtttttgcaagtgtttttttcatttccaccataacgcccatttttttggggccctctggggcaggagttgcgaaaacgcacaaatccctctcccgtgagatggcgccggcaggttcccggagaccgggtggccgcgcggggccgcctttgcccacaaagtgccccaatgaagtccgccccatccatttgccggcccgccgcgccctgcgcggcgggctcggtactcgtcctctccagcactcccattcggaaaagtcttgacagccgccccccttcagtgcaatactgttttatccaaacattttccgtccctggggcggtgagaaaggggcagacacaccatgagctatactaaggaagacattatccgcatcgtgaaggaggaggacatcgaattcattcggatgcagtttgtggacatcttcggacagctgaagaatgtggccatcaccgcctcccaaattgaaaaggcggtaaacaaccagatcacctttgacggctcctccatcgagggctacacccgcatcaatgagtccgatcagtacctctaccccgatctgaacagctttgccatcttcccctggcggcccgcccagggcaaggtggcccggctgatctgcgacgtgtataaccctgacggaaccccctttgtgggcgacccccgcggggtgctccgccgggtgctccagcgcagccgggacatgggctttgatgccttcaacatcgggccggagctggagttcttcctctttgagactgacgaccagggccacgccaccaccctcacccgggacgaggcgggctacttcgacctgggccccctggaccacggtgagagcacccgccgggagatctgcctgaatctggagcagatgggctttgagatcgaggccagccaccatgagtgcgcccggggccagcatgagatcgacttcaagtacgatgaagccctggactgtgcggacaagatcatgaccttcaagctggcggtgaagagccttgcccaaaagaacggactccacgccaccttcatgcccaagcctctgttcgggctggcaggctccggcatgcacatcaacatgtccctgttccgggacggaaaaaatatcttttttgacgagaagggggaaaaacagctctcctccctggcctactcctttattgccggccttttggagcatgtgaagggcttcaccgccctcaccaaccccctggtcaactcttacaagcggctggtccccggctacgaggctccctgctactgcgcctggtccgcctccaaccgctccgccctcatccgcatccccgccgcccggggccagtccacccgggtggagctgcgcagccctgacccctcctgcaacccctatctggcggtggccgcctgcctggccgccggcctggacggcatccagcggggcctcacccctccccctgagatcaccggcaacatctatgagatggacgacagcacccgggccgccagcggcatccaggccctgccctcctccctggaggaggccctgcgggagatggaggccgaccccgtcatcatggacgtgctgggcggccatgtggcctctcactacatccacggcaagatgaaggagtggaacgagtactgcatccgggtgtccaactgggaactggagaagtatctggtcacctactgaaccccgtccccccgctgaaaggagtgaagccccccattggatacggtcatcgtcgcctttgagagtgactccctctgccgcaaattccgggatctgctggagggctccggctccgccgcctgcctcatctgccactcgggcagccaggtgcgccgcgccgccgccgcccagcccatctactgcgtggtctgcggcacccgtctgtccgacggcccggcggagtggctgtgcggggatctgccccccttctgctccctgctgatggtggggcccgcccaccagctggccctgtgttctgacccggacatattcaagctgccgacccccatccgccgtgaggaggccctttccaccgtctccctgctgctccagttcggacaccggatggagcgctatacccgccaccgccgctcccccttagagcaggatctcatcgctcgtgccaaggccctgctcatggagcgggacgggctcaccgaggaacaggcccaccggaccctccagaagcggagtatggaccagggcctcacactggtccataccgcccggcggaccctcgcccagggcggaggctgagctgcggcatattcccgcctgccggcgcatatccatcctccagaccgggcgcgcccgccgcgccccgaaaaggagtgatggcatgcgcttcaccaaaatggaggggctgggaaacgactacatctacctcaactgcctctcccgccgtccccccgaccccgccgggctggcggtccggctctccgaccgccactttggtgtgggggcggatggcttgatctgcgtctgccccggccggcggggggactttgccatggagatgtacaacgccgatggctcccggggaaagatgtgcggcaacggcatccgctgcctgggcaagtatgtgtacgacaaggggctcacccgccgcaccagcctccaggtggacaccgactccggcctgcgtgccctccggctcctccccggccccgccggcatcggacaggtggaggtggacatgggggagccctccgtctttccccagatctccatccctctgatggagctcacctactccgtcatgcctgtctctatgggcaacccccactgcatcctcttctgcccccacccggaggagatcgccctggacgtgctgggccccgccctggaacaccaccccgtctttcccgaccggaccaacgtggaatttgtggccgtggagggggatcagctgcggctgcgggtgtgggagcggggcagcggcgagactctggcctgcggcaccggcgcctgcgccgccctggctgccgcccacttcctgggactgtgccccccagaggtcaccgcccttctccccggaggctccctggtcctgtctctggacacagccagcgggcacatccgcatgaccggccccgccgtcaccgtgttcgagggggagtggcccggaggttaggattgacagcggggcaaaattccgccataatagtttgtaagtttttctgcaaaggaggggtctccccatggcccacatcaaccaaaactatctgaagctgcccggcagctacctcttctccgaggtcaaccgccggatcaccgcctactccgcctcccaccccggcgccaagatcatccggctgtccatcggcgacgtgacccgccccctggcccctgctgtcatcgaggctatgcaccaggccgtcaccgagatgggcaccttcgagggcttccacggctatggcccggagcagggctacgacttcctgcgggaggccattgcccagcacgactacgccgcccggggcgtggacatcaagccggaggagatctttgtctccgacggcgccaagagcgactgcggcaacattggcgacatcttcggtctggacaacgtggtggcggtgtgcgacccggtgtaccctgtctatgtcgataccaacgccatggccggccgggccggtgactaccaggaggagctgggccgatggaacaagctggtctacatgccctgtgtggaggagaacggctttacccctgttccccctcgtgagaaggtggacatcatctacctctgcttccccaacaaccccaccggcgcggtagccacccgggagcagctgaaggcgtgggtggactacgccaacgccaacggctccgtcatcctctacgactccgcctatgaggctttcatctgcgaggaggatgtcccccacagcatctttgagatcgagggtgcccgaacctgtgccatcgagttccgctccttctccaagactgccggcttcaccggcaaccgctgcgcctacaccgtggtccccatggagctggagcgggacggtgccaagctgaacagcctgtggaaccgccgccagtgcaccaagttcaacggggtcccctatgtggtccagcggggcgccgccgccatctacacccccgagggcagggagcagacccgcgcctccatcgactactaccgcaaaaacgcccaggtcatccgggagggcctcacctctgccgggctccaggtgttcggcggggtcaacgctccctatatctggctcaagacccccggcggtatggggtcctgggacttctttgatctgctgctggatcaggccaatgtggccaccacccccggcgccggcttcggccccagcggtgaggtctacgtccgcctcaccgcctttggcgacgccgccgccacagtggaagccgtggagcgggtgaaggccgctgtccgcaagtgatccattccccgtgccaggggcacggggaattttttcttgcccggagggagcgttccctttggagcggcagaggacgacttccccctttcatcccgttaatgaaagcaaaaagggataaatcacaattttaagtgggtggtgtcatgaaaaaggtaacaccagttttgatggcaatcgtattctgcgctttgctgctcgcagggtgcagtatttcttctcaaagcaggcaagggcagccgctagcagtctattcttttagcggggaaaatgaatttatttctgtttcaaatggggtcatcgttttagacgctgaagaagagatctgttatggcggtaatttggagacaagaaaagataagtttacggatattgcttcatactcagctaccatttattttacatcagatggtgaagagaatattttaatgtccaatagagttgaagataaaacaggaggcgcaataaatatttccgaggatataggaaaaataaccggggacattcttatccctgatgatattgataatttagttgatggtctttggtttgagctgaaaacagttgatttggatggagaggaaaacacatatcatctgcaattagaagtgattgagatcactagagcgaatgataattcgccttctgcttattgacccgtgtgacctggagcagatccccctcatctgaatggacgcggggagggtttctgtcctgaagaccggtccagaggggaaaagggtacagggcgtggacggcttgactttccccccgcctcaggatacaatcgagttgttttccaaactctcccctctcccctgttactgctcagactttccgggcatcctagcagggcgccccggctgcggggcctggcacaacaggacacagcaggaggtcttccccatgaaacagttcaagttcccacatatcgggatgcgcaccactaagaccgccgtggcagtgatgctctcctacctgatctttgtccctttcggcctcctctataacgagagctaccctggggtgctggcctatgtgggccccacctattcctgcatcgcctgcatcgtgtgcatgcagagctccctggagcagaccctccaggttgggctctcccgctttgtgggggtgttcatcggtgccatcctgggggtggctatgctactcctggagcccctgctgtcccactgggtgggcatcgtcctgatgctgggagccgcctgtgtgtgcgggatctggctttgcatgctcttcaaccggcccgcggcctgcggcatggcctgcatcctcccctgcgtcatgctcatttccggtgacgtgtccggcatccagcgctactactacgccgccgcccgggtgtcggagacggtggtgggagtaacggtggccttcctcatcaactccctgctccccaccagaaatccacagccccaggataagtgacaggctgaactccttgtcagcaagaacccaccaaaaaagaacaggcccgcgcgtccgcagaacactgcaggcgcgcgggctcgtttttcactccaggtccaccggatagcgctcagtgaagcagccgtcacagaagccgcaggccgccttgggggccagctggtgcaggtcctccagaggcagatagcccaagctgtccgccccggcgatctcccggatctcctctagggaatgctggcaggcgatgagccgttcccggtccgggatatcggttccaaagtagcatggggcgatgaaggggggcgcggacacccggatgtggacctccttcgccccggcctcccgcagcaggttggtgatctggcggcaggtggttccccggacgatggagtcgtcgatcatcaccacccgcctgccctccacctcactgcgcaaggcagacagcttgatgcgcaccgcctgctcccggctggtctggtctggagtgatgaaagtgcggcccacgtagcggtttttcacaaagcccaccccgtaggggatgccgctctcctgggcatagccccgggcggcgtccagcccggagtcaggcacccccaccaccaggtcggcctccactggatggcggcgggccagcagacggccggcgttcacccgggcctcgtggactgactgcccggcgatcaccgagtcgggccgggcgaagtagatatattcgaagatgcacatgtgggactggcccctgcagttgtctcggatggagcgcacctgcccctcctccaccaccacgatctctcctgggtccagttcccgctccagggtgccccccacgctctcgatggcgcaggactcagaggcgaacagcaccgccttccccttccggcccatgcacagggggcggaagccccaggggtcccggcaggcgatgagcttacggggggacatgacgatcagggagaacgcccctcgcagctcccccacagcccggcacaccgcgtcctccacgctggtcccgtggagccgggcctgggcaatggcgtaggcaatgagctccgagtcgctggtggtgtggaagattgccccctggtactcaaaccgggcccgcagccggtccacgtccaccagattgccgttgtggaccaccgccagcgttcccttcacatacttgatggtcaggggctgggcgttctcccgcgccccagcgccggtggtggcgtagcgcacatggcccaccgccatggtcccattcaggcgctgaagggtctcccggtcgaagacctcgctgaccagtcccacgtccttataaaaggactgctcccggtcattgatggccgcgatgccgcaggcctcctgcccccggtgttggagggcgtacagcccgtaataggtggtctgggcgcagctgccctccgggtcatagatcccgaatacaccgcactcctcgtggagcccctgctccagccggatgtcttccatactcacgatattctccgcccctttcgactccggcgccccgcgtgccccgggaaaaagatagtttattatagcgccccccgctccgaccatcaaggacaggatctcaaatatttttacaaaatccctgctctttctcgtatattttgcagaatttttcagataatatggaggaagggagagaaatttcatggatcacgatcagcagtttttgtctttcattcataaaaacgtggctatgggggtgagcgccatcccccaggtgctgtccctgccccagagccgggccatgggccaggccctgaacagccagctccaggaataccggaccatcgccgcccagtcacaggcctatgcccggaagcatggtgcccggctccataccccgggtctggctgtccgggccatgtccggtgccatgctcaaggcccgcactgccgccgaccacaccacctccaagctggctcagctgatgatccaggggagcaccatgggcactgtggagatgacccggcgcatccaccagtacaccggcaaggcggacccggagctgctggccctgggcagccgcctgctgcacaccgaggaacagaacatccagcagatgaagcggttcctttaagctccgccctggcgcggcacaaaaagcgggaggccgatggctcggccccccgcttccgctagtgaaaaatctcccccagagggggccccaaagagttctgtcgtccgtggaagacaggatcaaatcaaaaagcattatttcccgggacatgcttctggaaaatgacacctctcatgacagatgaggcggctttttcctgcaaaaataggcctcatctgtcatgcagcccttcgtcgcaaaagacccgacggccttttgcgacaatttgagctccgggaccatgtggtcccggggccggattgctcacttatcttccagcagcttgttcagctcccgcatgaaggtgttgatgtccttgaactggcggtagacggaggcaaagcgcacataggagacctcgtccacttttttcagccgctccatcaccagctctccgatctcggcggagctgacctcccgctccatctcgttctggagggtctgctcgatctcgttgacgatctcctccatggtgctgaaggagaccggccgcttttcacaggcccggatcaggccgttcatcaccttgttccggtcaaagctctggcggctgccgtcctttttgaccaccatcaggggcaggctctccatggtctcgtaggtggtgaagcgcttatggcaggacagacactcccggcggcggcggatgctggctccctcgtccgcgggacgggagtccaccaccttgctctccagataggcgcagaaggggcatttcatctcgattcctccattctgtggttgcccggctgccgcgggcatgtgttttctccgctattataccatcccggcccagccttgaacagcctgttttttcctgtttcggaaaaaatgtccccggcggcacaggccgccggggacaggtggatcttatcgcagcttgtccagccccaggcgcaggcggcgcagagtctcctcccggcccagcacgtggcagatctctaccgcgcccccgggagtgaccgcctttccggcggcggcgatgcgcaccggccacatgagggtggcgttcttcaccgccagcttctccgccagagcgatgagggcgtcgtggatgccctccgtggtccagccgtccagcccctccagggcggggatggcggcctccagcatggcccgggccacttccgggtcggtcttggacttcttgttggtgaacagagccccatcatagtcaggcagggcatcgaagaagtccaccttctccgggatgtcagtgagccgctcacaccgggcctggagcaggccggcaatctccgccgcgtccagcgccgggtctttcacgctctggcggatatagggctctgccgcccgggcaaagtccgccggctccatggcccgcaggtacagggcgttgaagtgggtgagcttctcaatatcaaagatggccggggacttggatacacccgccagatcaaaggcggccaccagctcctccagagagaatacttcctgttccgccagttctcctctgggggaccagcccagcagggccacatagttcaggatggcgggggtgaggtagccctgggctttcaggtcctcgtaggaggggtccccgtggcgcttggacatcttgttgtgggcatcccgcatcacgggggaacagtgcacataggtgggcacttcccagccaaaggcctgatagagcagatcatacttgggagcagaggacagatactcgctgccccggaccacatgggtgatgcccatcaggtggtcgtcgatgacattggcgaagttataggtgggcaggccgtcccgcttgatgagcacctggtcgtccagggtgtcgttctccacggtgatgtccccgaagatggcgtcatggaaggtagtggtcccgccgctggggatcttctggcggatgacgtatggctcgcccgcgtccacccgggcctgagcctcctcctggctcagggcgcggcaggggtccgaagcccggtcgaactggccggagtcctcttccgactcggtcttttcacagaagcagtagtaggcgtgtcccttttccaccagcagccgggcgtactttccataggtgtcccggcgctgggtctggatatagggggccaccgggccgcccacgtcggggccctcgtcgtggtccagcccgcactccgccagggtgcggtagatcacctctgtggcgccctccacctgccgagtctggtcagtgtcctcgatgcgcaggataaaggtgccctgatggtgccgggcgatgagccaggtgtaaagggcggtgcgcagattgcccacgtgcatatagccggtgggagagggggcaaaccgggtgcggaccttcccctttgggatcttggcctccatctcctcaaaatacttcatatccagagccatgtcgttccctccatcgcggcagacgttctgccgttgttttactggtattatagatgctttcccgccatttggcaagggccggaacgcagtccggcaccgctcctcccatcccccgcccgacggggcgttccccttttcctctttttagctgagaagcagttttggaaatgctccttacaaaacagtcaagccgcagctgaccttatcgggtaactgccagatagatcagaagttgtcaggctctatcattttggccgcgaacttcaactgtgacagtctgaaattcccataaagttttgttgggcgtgtctgtttctttcggggcctctctgccagtcacctcgtaatattcatcgctgtactgtattttactgtcatcaaagtctttttggatcgccttgacatattcaaacggggtttccattggcagcagatccatttcgcgttgaagctgctgtaccgccgccctctgctcctgtgtcaaaattttttcttcgtgttccatgtgttcctcaaattgccttttatccatccaaacgatctgctccactggatcagcggtgccgcacgccagaatcaaacggagaaaatcctcgaaattttttgccagtggatatacattccgatctgcacagctttccgggtcgcaggcaaataccatctctccatactccggcaaaaagcagtacaggatacacccttcaaatcctatcggctctgcattgacagggtagcaaaaatatggctctgtgatctcgccatgctccaagcataaaagctccttgtcgatcggcgatgccatatacttttcatagatcgttttcatggacatacctccgcagcttttgattgccgccctgattataccgcagccgattctgtatggcaatacgaaaccgccgcttcaaccccagcggagtttggagttttaagataaacggacctcgaacgggctgtcgttgcctccgagcgaaaaatgtggtatgcttgggaccgacatgccgcgctcccttggctgcggcatcatttcccaggaaaggaaggaccgccatggtcattgatatccacacccacaccttccctgacaagcttgcggcccccaccatccgcaagctccagggtgcctgtcatacccgggccttcaccgacgccaccaacgccggcctggccgcctccatggcccgggcgggcatcgattgctccgtagtcctgccggtggccaccaacccccatcaggtggcccatgtcaacgagagcgccgctcagatcaacgcccggggccgcgggaccggcatctactccttcggctgcatccacccggactgtccggaccccaggggagagctggctcggatcgccgccctgggtctgaagggcatcaagctccaccccgcctatcaggccacccggttcgacgatatccgctatctgcgcatcctggaccgggccggcgagctggggctcgtggtcctcacccacgccggcatcgacatcggcatccccgcccccacctactgcgacccggagatggtgctccgcgccctggaacaggtgggcccggtgaccttgatcctggcccacatgggaggctggcgccagtgggaccaggtagaggccctgctcccccagtccagcgtgctgctggataccgccttttcctacggcgacctcacccccctggagggacaccctttttcggaggaccagctgcacatgatggaacaggagcagtttgtccgctttgtccgaaaatttggggcccggcgcctcctcttcggcaccgacagcccctggggggaccaatccgccgatgtggcctctatccgcgccctgcccctctccccagaagagcgggacgccattctgggcggcaacgcccagcgcctgctggggctgtagccactcggggcctttttctcccattttccggagagatccaggccgtcagtacataaagcagcgggcaagaaagcccgcagggaggtcatcttgatgaagcagtacgagtacaaattcatacaggtccctgtggcctggaatacccaggggatcatttcccgtcccccgaaagcagggtctaccttcgatgcctgtaaggacgtaatcgaaaaagaggcagcaaatgggtggcgattcaagcagatcgtgatccccttctgtgaggggcggggtgtgggttccgcccagtgctatcaggtgatctttgaacgggagatttcctgaggctccaagcagagacaagcaggtcaggccccgcaccctacccatgacacacaaggaggtcaccgccatggttgatgtcacaaagcccatcgtcaatccccgtctgtctgaagccctcgccgccctccaccgggagaacacgcccgccaaccaggaccgggcgctgagggagctcatgacccaggcccatctgctcgcgcctgtggtcctcacccccgcgccgtcccccgctgtctccggccagactacactggagcagaacaccgccatccagtttcagctcatctccagccaggagagccgtcccttctttcccgccttcaccaactggggggagctgcggaagctgtgcggcccccgggaccagcagaccctggtcctcaccttcgacgactatgcctctatgctccagcgggacagccgggccgccggctttgtggtcgatcccttcggggacagcctcaccctggaccgggagacggtggcccgcctggcccggcagaaggcagagggcactccaccggtccggcaggcgattcagaaggatacccgagtcatgctgggggacccggcggagtacccggagcggatggtggaggccatctgctccgctgcccgtgagctcccagctataaaggcactctacctgcgcctgatggtccgggagggtgagatggagcccagctatctggtggtagtggaccaggagggagagcaggacactgtcttttccgccattgccggggccgcccgcccttggctggagggaaaaacggtggatctggtcccccgctcctcccgctttggccaggacgcctccaagggagtctcccccttctacgaccggatctgaaaaagcagaccgcgcgccggctggcgcgcggtctgtcctttttcttgaaagctgtttcgctttacattcgctggatatccgcttcctccagggtcttgatgccccgggaggccagggcctccgccgcggcattgttgtcctctacccggaagatcatataggcggcttcggtcttgccccccaggaatgcatacatgtactccacgttgatcctggcatcggtgagcacctggagtaccttgttcaatccgcccggcacgtcagggatcgccacccccagcacgggggtgatgttgtacacatagcccgcgtccttcaggacagtggccgtcttgtacgggtcgtccacgatgatgcggaggatgccgaaatcccgggtctccgccaccgagagggcccgcatgtcgatcttgttctgggagaggataccggtcatcccatacagggcaccgggcctattctccaggaacacggaaagctgcttgacgctcataactcttccctcctgtcaaatcagtcagatcttgcgcttgtcgatgacacggaccgccttgccctcgctgcggacgatggacttgggagccaccagggtgaccttggcggacagccccagcatggagcgcaggccgtccaccaactccttctggcggcggtccacctcgcccaccttgtcggtaaacatctccggggtcatctccacctgcacgtccagggtgtcggtggagtggacccgatccacgatgatctggtagttggcgggataaccgtaattgaggagcaccgtctcgatctgggaggggaatacgttgaccccccggatgatgagcatgtcgtcggtgcggcccctgggcttggacatcttcacatgggtgcggccgcagggacacttttcccgggtgagggtgcagatgtcccgggtgcggtagcgcagcagaggaaacgccttctttgtgatggaggtgaataccagctcgccctcgctgccctcgggcagcacctcgccggtgtccgggtcgatgatctcagcgatgaagtggtcctcgttgatgtgcatccctctctgggcggagcactcgaaggagacaccggggccggacagctcggtgagcccgtagatatcatatgccttgatgcccagggtattctgaatgtcctggcgcatctcctcggaccaggcttccgcaccgaatatgcccgccttcagggggatctcctccggactcattcccatctccttcatggtctcgccgatgtaggcggcataggagggggtgcagcacaggatggtggcgttcaagtctttgatgaacatgatctgacgctcggtgttgcccgaggaggtggggatggtgaggcagcccaccttgtggctgcctccgttgaggccggggccgccggtgaacagtccgtagccgtaggacacctggcacacatcctcattggtgccccccgcagccatgatagctcgggcacagcagtcctcccagagatcgatgtcctcctgagtgtagaaggccaccacccgcttgccagtggtgccagaggtggactggatgcggacgcagtccttcaggggcatccccaccagcccgtaggggtaagcgtcccgcaggtcagacttggtgaggaagggcagcttgtacaggtcgtcgctggacttgatatccgccggtgtgacccccttctcctccatctttttgcggtagtagggcacgttgtcccacacatgctggacctgctttaccaggcgctcgtcctgccaggccttgatctgttcccgggacgcagtctcgatctccggctgataatagcgttccaatggaatcatccctctctcgttttcatatttcttctctttcatgcaaaaaagagtcaaagaaattctcggcttttatttaggcgatgtctgctgctttttccgaagcagttccagcaccgcgatcagagcaaaggaaaacagggcggcacacccgctcaacaggaacatggccagattttccggcgtgctcgcatcaaaaaaagcaattccgcacaccagagccacatagagggcaaatgctccccaaagccccaaaagccactctatgacaatgacaaatttcatccatgtccccccctctgtcctgatttttttatggaccccctgcgatcatcccagcttgtccaggcgggccatcacatgggccaggccgtgggagatcagccccatgcccagccactccgccagtccggtgcttcccggctgataaatattgtacggcacagcggccgcatacagggtcaaagccccatgcagggcggctgccagcaggcacacccaaccccagatccgcagcagatacttccagatcatccctgcgtccccccttctgtccgaaaaaggggttccggcggccggtccgggggggtgaggcgcaggccgtactgggccacgtcgtgccactcccccagcttgaatcccatccgagggtacagcccctgccgggtaaagccgaagcggcggtgcagggcctcactgcccgggttgggcagtcccagcaccccgtacaggttgaccagccccatttcccgcagcttggggatgagcgccccgtagagggcggtgccgatccccaagccctcccgaccccggcgcacatagacagtgagctccgcgttccactggtaggcctcccgctccatgtggcggtgggcgtaggcatagcccaggatctcccccgcccggcagcacaccagataggggtagtgccgggaaaattcctccatacggcgccggaactcctccaccgtgggcgggacgcactcaaaggtcacccagctctcctccacatatggggcatagatggacagcagctccgccgcgtcctccggctctgccctgcggatctccaaagggacgcgctcctccgccatctctccgccctcctttcaggcgttcttacccagctggaatgccttcttgttcagctccaggaacttggaaggcacacagacctccagggacttctgccacgcctcgtcgggcagatcgaagtagtgggagagccggcccatcagcacgatgttcaccgccttggaggagcctgcctcctcggccagagccaagcagtccagggcgtccaccttggcgccggccgctttcatcttctccaccaggttttccgggtactgggccgcgccggtgataacgggcatgggatcgatctgctgggtggaggtgacgatctggccgtcgggcttcagatagctgagccagcgggcggcctccagcagctcgaaggagacgatgtagtcagcctcccccttgtcgataacaggggaatttacccgatcgccgtagcgcacataggtgaccacgctgccgccccgctgggacatgccgtggacctcggacacctttacgtcatagccctgctccatcagcagatggcccagcagcttgctggccagcagggagccctgtccgcccacgcctacgatcatgatattcttggtcttcatggctcagccctccttctcggtgctctggaaggcaccaaatgcgcacatctgttcacacacgccgcagcccacgcacagggtgttgtccacatgggccttgccctccttcatggagatagcggggcagccgatgcgcatgcagctcttgcagcccacgcacttgtccgtatccaccgccagaggggcctggtgctttacatacttcagcagagcgcagggccggcggctgatgatgacggagggctcccgggcggccagttcctccttcaccgcctggtcggtggccttcaggtcataggggtccaccacccggacccgttcaaagcccatggcccggcacagctgctccaaatcgatctttcccgccggctcccccttgatgttgtagccggtggtggggttctgctggtggccggtcatgccggtgatggagttgtccaggatgatgaccgtggagttggactggttataggcgatgttggccaggccggtcatgccagagtgcatgaaggtggagtctccgatgacggccaccgtcttcccctcgcttttctcccccaatgccttgttgaagccgtggatgccgctgatggaggcgcccatgcagagggtcatctccatggcgttcagaggggccaccgcccccagggtgtaacagccgatgtcgcccagcacggtacacttgttttttgccagggtgtagaacagtccgcggtgaggacagccggcgcacatcaccggcgggcggggcgggatggcgtcctccagggcggtgccggtatgtaccgcgccgcccagcttggcggccaccaggttctgggagaactccccctccaggggcagggcctccttgccggaaacggtcaggcccagctgacggcagtagttttcgatgatggggtccagctcctccaccaccaccagtcggtccaccttggcggcgaagtcccggatcagtccctcgggcatagggtggaccatccccagcttgaggacagaggcttcctccccaaagacctccttcacatactggtaggaggtgctggaggtgatgatgcccagcttggtgtcccccatctcaacccggttcagatcgcaggtctcggcgtactgggccaggcggcgcatccggtcctccaccaccgggtggcggcggatggcattgcccggcatcattacatacttggcgatgttcttctcatagggacgctccggcccctcggtccgggggctggtctccacgatggactgggagtgggccacccgggtgcacatcttcaggatcaccggagtgtcgaactcctcggagatctcataggcccgcctggtgaaggccagggcctcggcggagtcggcgggttccagcatgggcagcttggcggcgatggcgtagtgccgggagtcctgctcgttctgggaggagtgcatccccgggtcgtcggccaccgcgatgaccatgcccgcattgacgccggtataggccacggtgaacagcgggtcagcggccacgttgaggcccacgtgcttcatggcgcagaaggaccgctttcctgccaggctggcaccgaaagccacctccatggctaccttctcattgggggcccactcacagtaaatatcgtcgaatttggcggcctcctcggtgatctcggtgctgggggtgccggggtagctggagatcacgcagcagcccgcctcgtaaagtccccgggcaacggcggcgttgcccaacatcagttgtttcatgaatctgttccctgctttctgtattgttcttccccgcaaagccggacggcttcccgcaccgtcacggctcaggatccgctttgggctctcccaggccctcccggataatgacgtcctgcatcacaccgccggcgccgttgtccagcatggcccgacggacccggctgatggtggcactgctggcccccgttttctccaggatgtccaggtagaccaacccctgctggaggtagaccgccacgtcgaaccgctgctcgagggagcgcagctcggtgggggtgcacaggtcgtcaaaaaaacggcagcactcgtccaggtccttcagcttcaggattgtctcgtacagggccatgctgcggcccctctgatgttccgctttgggcatagtgtcactcctttttcgcgccgcgggcaaagggacgcccgtggttcaatggtttaaagtgattttagcacatcaaagcgtgaaggtaaagagaaaaccgccctggcggggaccgttttttgaaaaaaggtacaaaaaaacctctggcgactgccgccagaggacggggcgtgccccgtggtaccacctctttttaccgccccctcgcgagtgcggcctcaatgggtatccagcaatacccagcctctgtaacgggaggacccggttccgctctacttgcccccggagggagcgttcctcggacggctcgggagaggaaatttcaagctacggaaccaggcccctcgcacctaccgggaactctctgactggctctctccgcgctctacgctgtctccgtctgcgcctttgttggtttgcattatacacctctcttcccatttgtcaagcgggattttctgtgtctccaggcaggggtcccctccttcgctccaaagacgctgcctctgaaagatcccgccagcaggaggcgtttgggaaagaaaggacctttcctcttgacattcgggaaaaaattcgctatgatactttagcgagtaaaaccaatgaagtcaggcggcaccgccgcctttttggaaaggaccgaggcaaatgcccattaccgacctgctggagcgcaatcacaagctctacggcggcgagaccgccctggtggagatcaacccggagatccaggaaaagcaccgggtcacgtggaaggaatatgagctcatcgagcccgcatccaccgtcccctaccgccgggagatcacctggggcgtcttcgacgagaaggccaaccgggtggccaacatgctcctctcccgcggggtgaagaagggggacaaggtggctatcctgctgatgaactgcctggagtggctgcccatctatttcggcatcctgaaggccggagccatcgccgtccccctgaacttccgctacaccgcccaggagatcgagtactgcgtccagctggccgacgtggatgtgctcctcttcggcccggagttcatcggccgggtggaggacgtggcgccctccctgtcccggggccgcctgctcttctttgtgggagagaactgcccctcctttgccgaggactaccacaccgccaccgccaactgctccagtgagccccctaaggtgctcatccaggatgaggatgacgcggccatctactactcctccggcaccaccggcttccccaaggccatcctcctcaagcaccaggccctgctccagtccgcccggatggaggccgtccaccacgagacctgtcacgaggacgtattcctctgcatcccgcccctgtaccacaccggcgccaagatgcactggttcggctccctgttcaccggcagccgggccgtcctgctcaagggcaactcccccaaggccatcttcgatgccgtctccaacgagggttgcaccatcgtctggctgctggtgccctggtgccaggacattttggcctccctggaccgtggtgagctgaagctggaggactaccgcctgtcccagtggcggctgatgcacatcggcgcccagccggtgcccccctccctcatcaagcactggatgagctatttcccccatcaccagtacgacaccaactacggcctgtccgagtccaccggaccgggctgcgtccacctgggcctgggcaatctccataaggtgggggccatcggcgtccccggctgcggctggaaggtgaagatcaccgacgagaacgaccagcccgtccccttcggccatgtgggggagctgtgtgtgaagggccccggcgtcatggtgtgctactaccacaatccggaggccaccgccgaggtgctcaaggacggctggctccacaccggcgacatggccaagcaggatgaggacggcttctacttcttagtggaccggaaaaaggacgtcatcatctccggcggcgagaacctgtacccggtgcagattgaggacttcctggccgcctaccccaaggtccacgacgtggccgtcatcggcctgcccgacaagcggttgggggagatcgccgccgccatcatccagatcaaagagggcatgacctgcacagagagcgagatcaaccagttctgcactgacctgccccggtacaagcgcccccggaagatcatcttcgcccccgtcccccgtaacgccaccggcaagattgaaaagcccaagctgcgggagcagtattgcggcgtccgcctggtggaggcccagaaccgaggatgaactgaccgcctgatccaccgcccgcctccccgatggggggcgggcggtctttgtttccccctatcctccgcccaggcctcccagagaaaaatgatgtacatttttcctcttccgtggtaaactatccaaaaaaggagggttttgtccatgctttcatcctttgcccagctccggcagcagctccatcagtccggtccccggtccgccgtggtggccgccgcccaggatgagcacaccctccaggccgtgctggccgcccggcgggacggcctgatccaccccatcctggtggggcccccggaccagctccgccccctgctggaccgtctgggcgcttcggtcccggatgaggacttggtccccgccggaacagaggcggagtgcgccgcccgggctgtggccctggtccgccaggggcggggcagtctgctcatcaagggccgtctgtccacgggtgccctgctgggggctgtagtagaccgtgccggcggcatccgcggggatgggctgctctcccatgtggccattctggaggtccccgcctaccacaagctgctctacatcaccgacggcgggctggtcgtcgctcccggcctggaggagaagcgggccatcctccgcaacgccctgtcactgtgccgctttctggggtatgagaggcccaaggcggcggcgctgtgtgctgcggagacggtgagcccccgcatgcccgagaccggagacgccgccgccctccgggaggagggggagcggggagacttcggcccctgcctagtggagggccccatctctctggatctggccaccagtgctgaggcggcccgcctcaagggctactgcagcccggtggcgggggacgcggacatccttctcgtcccctccatcgccgccggcaatctgctgggcaaggccctctatgggctggccggcgggaagatggccggtgtggtactgggcgcctcggtgcccatcgccctcaactcccggggggcttcctgggaggagaaatataactccatcctcatctgcaccgccatgtcccggcggtgatcctgccaaaaaggaggcgtttctcatgccggaacggctgcttatcctgaaccccggctccaccagcaccaaggcggcggtgtatgacggcacccggcctctcttttcccggagcatcccccactccaatcaggaccttgcccccttccccaccctcaacgaccagctggactaccgggtggccctggtccggggcctgctggcccaggagcgggtggacctgtccaccctcaccgccgtggtgggccgaggcggcatcctgcccaacatcgtggccgggggctaccaggtgaacgacgccctggtggactgcctgctccactatccggtctttgagcacgcctccaacctgggaggcgtgatggccctggccttcgcccggcccctgggcatccccgcctacatctatgacgccgtcaccagcgacgagctgctgcccgaggcccggatcaccggcttcaagggggtcacccgcaccagcttctgccatgtgctcaacgcccgggccaccgcccacaagtacgccgagagccgggggctggcctataaggacatgaatctggtggtggcccatctggggggcggcatcagtatcagtgcccacagccacggccaaatcatcgactcggtatccgatgacgccggccccttctcccccgaccgctcgggaagcaccaacaccctctatgtggtggacctgtgctactccggcaaatacaccaaggcggagatgctgaaaaagctgcggggcgaggggggcatgtccgccctgctgggcacccacgactgccgggagatcgagaggcgcatccaggcgggagacgagcgggccgccctagtgtacaaggcccaggccctccagatcgccaagggggttggcaccctgctgggctgcttcaccgaactgatcgacgcagtgatcctcaccggcgggctggcctattccaagatgctcaccgacatggtcatcggctacctccacaacctggcccgggtggtggtcatcccgggggaaaatgagatggaggccctggccctgggcggcctgcgcctgctgcggggggaggagccggtgcacaccttcgcccccgcctgcgatttgtctgttatcccgtaggcagccctgttttctttctccggcccgccctgcccagatgggcagaccgccccatccccccgcgcctgactcctccggcgggatcggtccagaccaaacccgccagctcccttctcctcctggaatggccttgacattcccgccctcttctggtatcttaagagtacaaattggatagacggtccaccgccgggtgggccccatgcgttgttttcctgtatcgttaggcctttgtaagatacgggatcacagcgctttttctttgccctggcgcggccggggctggaccttactgaaagaggtgcagaatatgtcacagtccactcctctgcgggagtttgtccgctactccgccctcagctcctgcggcatgatcgcggtgtcctgctacatcctggccgacactttcttcgtggcccagggcctgggcactgccgggctggccgccctgaatctggctatccccatctacaacttcatccacggcaccggcctgatgctggggatgggcggggccaccaaatactccattcatcagagccggggggaccccggcggcgcttccaggatgttcaccggcatgcttcttctgtccgtcctcttctccatccccttcctcctgctgggcctgttctgctcccatgggatcaccgtcctcctgggggccgaccaagctgtgtttgagatgacccggacctatctccaggtgctgctcctcttcgcccccgccaccctcgtcaacgacgtgctgctctgcttcgtccgcaacgacggggacccccggctgtccatgctggccactgcagcaggcagcctggccaacatcgtgctggactacatctttattttccccatggggatgggcatcttcggtgcggtgctggccaccgggatgtcccccgtgctgggcatcctcatcctgcttcctcactgtatccgcaaaaagggagacctgcgcctggtccccggccctctctcccccggccccacagcctctgccctctccctgggcctaccctccctgctggcccagctgtcctccgccgtggtcatgatcgccttcaacagcatcatcctgggtctggagggcaacacgggagtggcggcctacggcgtcatcgccaacatctccctggtggtcaccgccgtgtacaccggcatctctcagggcatccagcctctggtgagcaccgcccacggccaggaccgtcccggtctgatccgccagtacctgcgctatgccctgatcaccctcctggtcctgtccgccgccctctacctcctgctgttcctctttgccggaccggtggccctgatcttcaacagtgagggggacccccggctccagcagatcgccgaagagggcctgcggctctatttcaccggcgcgctctttgccgggttcaacatcatcctgtcaatgtatttcacctcggtggagcgggccctgcctgcccatatcacctccctgctgcggggtttcctcctgatcctccccatggccttcctgctggccgcctgctggggcatgacgggcgtctggctggcctttcccctcaccgaagccgtcaccgcggccctgggcgctggattttacgccctctatgcccgcaggggcagggcacggtcgtaaaaatcgtgagaagcgcccccttgtcttcacgtcatgcaaagagaccggcccggacatggatgccatgtccgggccggtcctctcttacagcacattttccagagaggggtcctccatctccgccagcagctccagctgggcgatgagctgggcgttggcggctgcgtactggtccatctcttccagcttcaggtactcttccaccgagcggaacaggagcagcacctggtccgtgtcgctgtgtcgcagcagggcatggagccagaagctcctctcctgccagtcccggtacacccctcccgtcacctgggcagcccgctcccagtcgcccctctcactcatggcctgggcctgctccagccgggaaacataatctgcagtcagtccgtccacccaccagccggtacccagggcggcggccagcagagcggccaggatgcccaccgccgcccaaaggcgcttcatctctcccattccctactttccctccctggggacgaaatacacgcccccggcctcgtccactgtcagcaggaacacgtcccggaagtcgggatacccgtgctccgccagctgcttgtccagccaggacaggtccagcccccgccgcttcaggttgtcctgcaaaatgcgcccgtcgctgatgatgaccacaggcagcccggtctcccggctctccagccccagctgccgggcggtggccggcctctgctcggcgtagggcaggacggacagccggccgttggtctccaggatgccgtatttcaccccagccagatcggtgtagccctgcccccgcagctcctccagaagctcatccaccgtcagccggttgcggcgcatctccccctggtccacttttccgtcccggaccacgatgctgggccggccgcacatcagggtgcggaagcggatgctcttcatggtcagcaccgagaggatcatggtcagggacagcagggccaggatgggcaccaccccggcatggagggggatgcccaggtcctgcatgggcaccgaggccaggtccgcgatgagcagggagagcaccagctccgagggctccagctcccccacctggcgcttgcccatcagccgcaccccggcgatgatgaggatgtataggatcacggtacggatcagcgcggtgaacatggcttcctcctgtccgcccccggcccgccgggcgcttcgttccatccctctcattcttgcccttctccggccctattattctttaattcttcggtgcgttttctccaaaagccgccggtgttttttttcgaaaaaaggagaaacgacatcttgcattgcgggtcgttttccgataaaatattaagaagcaaactggagggtcatgccctcctgaagcaatgcgtatgagaacctggaacggaaggcgtgtgagagaattgatgaaagcgactttgatcctggccaacggaagcgttttttccgggaccagcatcggcggcacctccgaccggatctgtgagatggtgttcaacacctccatgaccggctatcaggagatcctgaccgacccctcctatgctggacagggcgtggtgatgtcctatcccctcattggcaattacggcgtcaaccacgaggacaacgagtcccgccgcccttgggtggaggcccttgttgtccgccatctgtctccccaggggagtaatttccgctgtgaggacacactggacagctatctgaaacaatacgacattaccggcatccagggcgtggatacccgggcactgacgaaaatactccgcagtcaggggagcatgaacggtatgctcacctgtgcggagcattttaatgtggccgaggtcatggagcggctgcgctcctatgaggtgaaagacaccatccgcagggtgacccggaccgagcccgaggtgtttgacgcctatggcgaggaaaagcacctggtggccgtgatggactacggcgtgaagcagaatatcatcgagtgcctgcgccgccgcggctgtaaggtcgtggccctgcccgcctacacccccgccagcgaggtgctctccagcggctttgacggcgtgatgctttccaacggccccggtgatcccgctgagaacactgagatcatcgctgagctgcgcaagctctatgacagcaccatccccatcttcggcgtgtgcatgggccaccagcttctggccctggccaccggcgccaaaacaggccggctggcctatggccaccggggcggcaaccaccccgtccgtgacctggagaaggaacgtgtgttcatcaccagccagaaccacggctatatggtcctctctgacacggtggaccctgccgtggccgaggtatcccacatcaatgtcaacgacggcacctgcgagggactgaagtacaagcgccccaactgctttaccactcagttccatcccgaggccaacgccggccccaaggatacggaatacctcttcaaccgctttatcgactccatgggaggtgccaagtaatgccgaagtacaccgatatcaagaaggtcctggtgctgggctccggccccatcgtcatcggccaggccgccgaattcgactatgccggcacccaggcctgccgcgcgctgaaggaggagggcctggaggtcgtcctgatcaactccaaccccgccaccattatgacggacaaggacatcgccgaccacgtctatatcgagcccatgaacctgccctccatcactcagatcattgagaaggagcgtcctgacgcccttctgcccaacatgggcggccagaccggcctgaatctggccatggcgctgtatgagaacggcaccctggagaagtacggcgtgcgcctgctgggcaccagccccgcctccatccacaaggcggaggaccgccagggcttcaaggactgcatggagtccatcggccagccctgcgtcacctccaaggtggtcaacaccgtggaggatgccgtctccttcaccaacgagatcggctaccctgtgatcgtccgccccgcctataccctgggcggcaccggcggcggcatcgcctacgacgaggtctccctgcgggagatctgcgaccgcggcctgaacctgtcccgggtccacgaggtgctcatcgagcggtgcatcgccggctggaaggagatcgagttcgaggtcatgcgggactccgccggcaacgtcatcaccatctgctccatggagaacatcgatcccgtgggcgtccacaccggcgactccatcgtggtggcccccacccagaccctggccaaccgggagttccagatgctccgctccgccgccctggacatcatctccgccctggagatcgagggcggctgcaacgtgcagttcgccctgaacccggactccttcgagtatgcagtcatcgaggtcaatccccgtgtgtcccgctcttctgccctggcctccaaggccactggctaccccatcgccaaggtggccgccaaggtggccctgggctacaccctggacgagatccccaacgcggtgaccggcaagaccaccgcctgtttcgagcccaccatcgactactgcgtgctgaagatcccccgcctgccctttgacaagttcaccaccgccagccgtaccctgggcactcagatgaaggccaccggcgaggtcatggccatcgccaactccttcgagggcgcgctgatgaaggccatccgctccctggagctgaacgtgcgggccctgaagctggacaagctggagggcctgtacaccgacgagatcgaggacctgctggtccaggtcaccgacgagcgtctctttgtggtggccgaggccctgcgccgcggcttctccccccagaagatcaaccacatcaccaagatggacatctggttcctggacggcttccagcggatcatcgacatggagaacgagctgtcccgctgtaagggtgagcccgatatggacaccctgaagcgggccaaggagatgtgcttcgccgacagctatatcggcaccttgtgcggcatgacccaggcccaggtgaaggccctgcgggagcggtacggcatcatcccctccttcaagatggtggacacctgcgccgccgagttcgacgccgagaccccctattactactccacctatgacggagagaacgaggcggtggacaacggctccggcaagaagaaggtgctggtgctgggctccggccccatccgcatcggccagggcatcgaattcgactactgctctgtccactctgtgtgggccttccgccgcatgggctatgagaccatcatcatcaacaacaaccccgagaccgtctccactgacttcgatgtggcggacaagctgtacttcgagccgctgaccgccgaggatgtgcagaacatcgtggagctggagaagccctggggcgccgtggtccagttcggcggacagaccgccatcaagctggccaaggcgctgactgagatgggggtgcagatcctgggcacctctgccgacggcgtggacgccgccgaggaccgggagcgttttgacgagattttggagaagtgcgccatcccccgggccaagggccgcaccgtctttaccacccaggaggcccttcaggcggccaatgagctgggctaccccgtgctggtccggccctcctacgtactgggcgggcagggtatggagatcgcctactccgaccggaacatcgaggagttcatgcggatcatcaacctgaccgttcaggagcatcccatcctcatcgacaagtaccttatgggccgggagctggaggtggacggcgtgttcgacggggaggacatcctcatccccggcatcatggagcatgtggagcgggccggcgtccactccggcgactccatcgcggtctatccccccctccacctggaggacaagcatcgggagctgatcctgaagcacaccaagaacatggccaagcacttgggcgtcattggactgatcaacgcccagtacatcctctataacgacgacatctatgttatcgaggtcaatccccgctcctcccgcaccatcccctatatctccaaggtcaccggcgtgcccatcatcgatctggccactaaagtgatgctgggccagaagctgaaggacctggagtacggcaccggcatctacagggaagccgactactacgccgtcaaagccccggttttctcctttgaaaagctcactgacgtggacaccggcctgggcccggagatgaagtccaccggcgaggtgctgggcctggccgagaccttccctcaggccctgctgaaggccttcaagggggccggtctgaaggcgcccaagcgtggcggccgtatcatcatcactgtcaaggacgaggacaaacaggagatcgtgggcatcgcccggggctttgaggagatgggcatcgagctctttgccacctccggcacctgcgacgtgctccaggaggcgggcatcgagtgcaagcgggtcaaccgcgtctctcaggcccaccccaacattctggatatgatcgcctccggcaccgtggacctgatcatcaacactcccaccaagggccgcaagcacgacaccgacggcttccgcatccgccgctctgcggtggagcactccgtgggctgcatcaccgccatcgacaccgcccgggccatcctcactgtccgtcagcagagccgcagcgaggatcttacccccatcgacatcacgcagatctgaccatcatctccccgggcccgtttgggcccggggagatgccctgacggacctccccgcctcctatggaacttttttgtttttggatcgtctcataagacagaacacaaaaacggaggtgcctgccatgaagttctttcagtctgcgcgccggtttcgttccgcaatcgtcttgctcctgctggccagtcttctgatttggaggcattttttcgcgcttccctttatttggcccggccagagtgtcactcttactgcctacaacggtgaaacgacccagcagaaattgatctatacatggcaggacatgctgaaatttcattttacactcttgacagccggagctcggcccgctcagcttcagcagcatgctgatgcttcccagcccgtgtatggtctctctgtcgctggtgtccgcaaagcctttgatgccgttgtatgggacggtctctggatcgataacagcggccgggtcctctccactgatttggacctttcctctctttgggagcagctttctgttgacacccataccagggagggcatgtcctctctcccctgccttcgtgagcttgcccttctgtcaggtcagtgggactgccggtttttgccggagggttccctggggacgcccagagcagacgtccccatgattctctcttcccctgcgggccatacgctggaatggagcgtctccaatcaaagcaatgacgcccttttacacgggaattccggcagcgcgggtctagaagtccttttggatggtctgtggtatggcgttccgtggaaaacagatttgaactacggtgtcaccgcagagtcctacactttagaaccgggcggccggacctccatatcccagctgccccagcattacggagacggctttccggatggccgttaccgcatcgtatttcattaccacatctatgaccgtaaaaccgatacatatcaggatgccggattttctgcggcagaatttcagatacaggacagcctgtttttctgtccagatatatcataggtctgtctgctgaaaacaaaaaacccacaccaaagtggtgtggttccttgcagggggccccctttaccgctcgctgaccgcaggctcctgtccgtcgtagagcaggtcctccaggtcgatccggctgttttcctggaattgcatcatgtgatcatctcctttccctctgtctgctttcagcatactcctcttttcccggggatacaagggaagtttggtgaaatttctgtaaaatctactcactgaagaaaggatgagtctatgtcccatcagaccgtcatcgttctggacttcggcggccagtacaatcagctgatcgcccgccgggtccgggagtgcaatgtgtactgcgaggtcatgccctgcaccacgcccctttcccaactgaaagccatggaccccatcggcatcatcttcaccggcggccccaacagtgtgtatctggattcctccccccacgtggacccggagatcttcacctggggagtgcccatcctgggcatctgctatggctgccagctcatggcccacaccctgggcggccaggtcaccgaggcccaggacgattccgctcgggaatacggcaagacccagacctactacgacaccacctctcccctcttcaagggcctgcctcaggagggtatctcctggatgagccacggggactacatggccaaggtgcctgacggcttcgctctcaccgcccacagcgacagctgccccaatgtggccattgcggacgaggcccggggcttctatggggtccagttccaccccgaggtcaaccacacccagcacggcatcgacatgatccacaacttcctctatgaggtgtgccgcgccaagggcgactggactatggaggactactgccggaccgccattgctcagatccgggagaagatcggcggcgggaaagtgctgctggccctgtccggcggagtggactcctccgtagccgcggccctgctggccgaggcggtgggcagtcagctcacctgcgtgtttgtggaccacggcctcatgcggaaaaatgagggagacgaggtggaggccgccttctccaagtgggacatcaacttcgtccgcgtggacgcggagcagcgcttcctcatcaagctggccggggtatctgagccggagcacaagcggaagatcatcggcgaggagttcatccgggtctttgaggaggaggccaagaagatcggccgggtggattacctggtccaaggcaccatctacccagacgtgatcgagtcgggagccggagatgccgccgtcatcaagagccaccacaatgtaggagggctgcccgactacgttgacttcaaggagatcatcgagcccctgcgtctgctgttcaaggatgaggtccgtcagctgggccgggagctgaagctgccggaatatctagtgatgcgtcagcccttccccggtcccggcctggccatccgggtcatcggagacttgaccaaggacaagctggaccgcctgcgggacgccgatgccatttaccgggaggagatcgccgctgccggcctgggtgcctccatcaaccagtattttgccgtcctcaccaacacccggtcggtgggtgtcatgggcgacggccggacctatgactataccctggccctccgtgccgtcaccaccagcgacttcatgaccgccgactgggcccgaatcccctacgacgtactggacagaatctctacccgcatcgtcaatgaggtccagggcatcaaccgcatcgtctacgacatcacaagtaaacccccggccaccatcgagtgggaataaatcatgataaccgcaagtctcttttgtcgggacttgcggtccttttatgctccgccgactatgagcgagtcaagcgggtctttagcccggaacatctggaagcggcgtgggaggccggcaagcaacttaggcgttccgttaattgggaagggaacggtaaaagagtatacttacaagtaaagttgtgatatacttcatataattttttctttttctacttttccccttactattcatacttctaacgcccaaagccgccccctccgccctgttcgggcggagggggcggctttggagcccattggcccatgtccggcctggaatgggacgctcagcacaatagggcgcgcctggcctcctcctccaatatcccggcaaagacgtccagatagcgggggtgatacatccgccggttggtcaccagcttcagttcgttacgcacgtccagatccgggacatacagccgccgaagaatgggctccggaccctccaaaaggtgccggacgtcccgcaggtgcatagccgggcagaagcaggcccccaggccctgggccgccagccggagctggaggtcatagtcccccgccgtgatttgaaatgcggtggcgagcccgtgctgccggaaaaagtctgtgatccgggcctgagtcttgctgatggtcgggctgaagatcaacggtaagcgcgatagctgcgtctcgtcaatggtatcccccgcgcccccttgagggaagcagcggtccagcagggccccggcaatcacgagatagactgtctccgagcccaccggcgtgaagcagaagtggggacgctcctccggatctacacccaggaacaggtgcagcgtcccctgccccagcttgtcttccagaacggccgtgtccccgtggaccacctccaggcgcacgtgggggaactcccggcagaatctggccgccgccggggggaccaggatgcgcgcccgcgcgatgtgcatccccaggcggatggtcccctctgtatcctccctcaggtcccggagccggtcttccaggctctcctccagcagccgcacctgccggtaggtggccagcacggcctcccctgctggggtcagggcaaatctgggccgccgctcaaacaggagcccgtactgcttttccagacgccggatatggttgctcatatcctgctggctcaccatgacccgctccgcagcccggctgatgctctcctcttccgccacggccagaaagtattccagactgatattcaccgctctccctccctaaatacaacttttttgtttataaaataaatataaaatgtgtttgcggttttgtcaatccgctggtacactgctagatgaaaacagccgcacaggaaaggagcgctgaacatgccagaggagaagatgcactttaaggattaccgaagcgggatgctgaccaacgggattgagcgggcggctcaccgggcgctgctgtacagcaccggtctggaccgggaggacctgggcaaacccatgatcgcagtggtcaactctttcaccgagatggtaccaggccactttcacctgcgggagctggcggacttcgttaagcaggggatcatcgaggcggggggcatcccccgggagttcagcaccatcgccatctgcgacggcatctgccaggggcacaaagggatgagctatcccctgcccagccgggaactcatcgccgactccgccgagtacatgatcgaggcccatcagttcgacggcatggtgatgctccccggctgcgacaagatcgtccccggcatgctgatggccgccatgaggctgaacatccctgccatcgtcatcccgggcgggcccatgctccctggaaagtacaaggacatggaggcgatcactctcaccgacatgcgggagctgattggccgcacccagaccggcaggctcaccgaagacgagttgatgaagatcgaggaggccgccctgcccggcgttggcacctgctccatgctgggcacagccaataccatgagctgtctggccgaggccctgggcatgagcctgcccggctgcggcctggcccacgcggtgagcgcgaaaaaacggcgcatcgccaagcagtcgggccgtcggatcgtggccatggtgaaggaggacctgacgccccgtaagatcatgacccgggaggccctgcgcaacgccatcagagtaagcatggccatgggagcatccaccaacagcaccttacatctgcccgccatcgcccatgaggcgggcatccacatcaccctggatgactttgatgagctgagccgggagatcccctatctctgcaatatcaagccctccgggcagtaccccctcagtgtactggaggagcagggcggggtccctgcggtgatgaaggccctggagcgtaagctggacctggagcagatgacggtcagtggaaagacggtgggcgaaaatctcgccggggttgagctggtggaaaacgatgtcatcttctccctggaccaccccaagaagccagagggcggcctggctattcttcacggcaatctggcccccaagggcgcagtggtgaaacaggcgggggtcaagcccagcatgcactactttgaggggcaggcccgggtcttcacctccatggaggaggccagctgggcggtgtccaacgacaagatccaaaagggggacgtgctggtcatccggtacgaggggcccaagggtggtcctgggatgcgggagatgcacatgacatgctcccttattgtaggccgtgggatggacgaggactgtgccctggtcaccgacgggcgcttctccggctccacccgggggccctgtatcggccacgtgtccccggaggctgccgccggcggccccatcgccgcagtggaagagggtgacagaatcatcatcgatatccccaaccgcaccctgaccctctgtgtcccggaggaggagatccagcgccgcctggagcgggtccggcacatccacaagccggctaccccggcgctggagcgctacgcggccctggtcaccagtgccgatcagggcgcggtgctccagctgccccgggagcggtgacggctacagctgtttcggtgtaagcatccgtgtttgaacatattctgcctgatatgatttggagtgtgatatggtatgaagctgcctgagcgcatcaccgtttgcgaggtagggctacgggactgcgcgctgaggggcccatgggccacccgggagacagctatgtgctgcgggcgggaaagaacaaggacatcctgctggacattcccaccgggcaggggggcaatcccaccctgagataacgagacggcggccctctcccctgcgcaggcccgcatacaaaagaatgaccacgagagtcgagacaagacctccctgctggagctgctgttccgcagggaggtcttctgctgcttccgtcccgctttgcccgcagcttcggcagccgggacaaaaaattttgttccaaagtgaaaggaatcggcttccttctgcacatatagggtgtaaggcctttcaaggagagacatatatgttttcaaacgaagcatttgcccgaaccgcggagcggtacatggacaccatctatcgcgtggcctatggctggctgaaaaatccggatgacgcaaatgatgtgacgcaggatgtactgatcgagctgtacaagacagaaaaggcgtttgaatcggacgcccacctcaaaaactggctca

SEQ ID NO: 13672 - DNA, 293 bp, Unknown
  gut microbiota DNA sequence
ctcgtcgaacagaccaccgataaagttaccattgcagtacagcatataattcttggacttggccggagaataagagaggttatattcctgggagtccaggcttttatgtaccttgttcagaaagtctatggatgtcatggtcttgctccttattcctcaaactcaccctcgatcatcccgttcagataccgtccgggatctgcgatgaagtcatcccatttggccagagggtggaattcctcatgctcgatgtccagataccacagttttttgtccctggggctccacagcag

SEQ ID NO: 13673 - DNA, 529 bp, Unknown
  gut microbiota DNA sequence
actgcaatggtaactttatcggtggtctgttcgacgaggagttgtgcttcgtctacgccgacagtgtgagtgaactgctggggcagccggaacccgtctaccacggctactccagcaccgcccagcacaggatgctggtgatcccggaggaacattgggcgaaggcgctgaaacttctctatgccgagaaatttgattggagccgtttggtgtacgacatcacctacaccagcatcggcgcggctgtggtggaggacttctacgacgagaatgtggtattcctgcgcttctgctttgaaaaggaactgctgaaaaaggaccctctggaccggcagggccgtatcctgcggatggtctatctcaatcaggatctgacaaaagcgggcaaatatctgttccccagactgatgcagaagtttcttgtttttacagatcgcaacggaaagaccagtctggaaaccatgctgaaacggtggtacacccagcttgaaaaggaataccgcaatcatatagagggatgaggagaatg

SEQ ID NO: 13674 - DNA, 1118 bp, Unknown
  gut microbiota DNA sequence
gtagcacagccggggccccctgtcaagggtgcggagcaccgccgcgcagcggcggccatgcccttgacagggggccccggctgtgctatgggtggcgcggcgacgggggataatccggcagagcccttttgcgggaacgggggaacggaaaagctctggacacggtgtccagagcctcttacttctccatttcctttttcttctcgcccttgcccagctccgggggctgcttctctttccactcccccagcagagccatgatctgatctttcatctcacggggcgtcttgtccttaccgaaaaactggctcaattccgcagagctgatgatcacgtcaaaatcctcctttttcttctcctggctcaacaccgcgtcgatcacgtccgggttgagctggtttttttcgtccatctcccgcagcttcttggcctgggccttggagggggacgactgctgcccctcgatggacacggcaatatacttctggtgcttgggcttgatacgggaaatctccacggcgggggtgaacgacagcttgccgccgtccatgagctctttcagctccggcacaaggtcattcagataaatataccgctggaccgtcttgccgctcatgccgttgcgctcgcccactttgtccagggacagcttgccaatgtcctcgccctcgccccgcgttccctggtgtttgatggcctcatactgctgcttcaaggccgccgccttttcgctgggcaaaatcgtttcccggtggcgcaggttgtcgtccgtcatagcgaggacggcttcatcatccgtcatttcacgaacgatacagggcatattgcgcaagcccgccagctcgcttgcccgctgccgccggtggcccgctacgatctcatagcccccgccctcacggggccgcaccagggcgggctggtgtacgccgccagccttgacggaggacacaaggccctgcatctccacatcatcccggacgccgaacgggtggttctggaacgggtggagctccgacaggtccagatagacgatctcctccttttttccacgggaggcgtctttaagctggggcggctgctccggcgcgggaggaggcggggccgggtcctccttggcc

SEQ ID NO: 13675 - DNA, 9166 bp, Unknown
  gut microbiota DNA sequence
ttgctctgcctgggggccttggccgacttaccagggcccccaccgccgggagcctgtttctccgccttgggcgggcggcccttgcgcttgggcttgtccccttgggccggggcctccttgtccttgggcggacggccccgacggggctttttctcctcctcctggggcttctcccactcctggccgccctccggggccggggcctcagcagaaatatcggcctcacacactgtctgctgggccatgattttatcaatcaaatcgccggagatgtcaattacatttccggtttgacgctcaggtatcggcgtgtccgtcacattggcaacaggaatatccagcttgatttgctcctgtatttcagcatcgggaagcggggattgtcctttggtcataggggcttcatttttctccacttacatacctccttcttctgttgttatatatgaaaacgccgcccatagtctccatagggcggcgctccatgtaatgtgatagattttattgtagttttttaggattttgtttgactttacgcactttcctattaaaatcgtccccgttggcccggcagggccggcaggtccggtggcacccgttgcgccagcgggtccggcaggaccagcaggcccggtggggccctcggcacccgtcgcacccgtcgcgcccgtcgcgcctgtcgcaccagcagggccggcaggtccggtaggaccggtggcacctgtcgcgcctgtggcgccggcagggcctgtggctccggtggggccggtcacggtgaccagatcaaagtccgccgaggagcccggcgtcccggtagcgccgctgcggttggtgcggtagagggcaccgttgtagtagaccagtgtgcccaggtcatacggtaccccgggaacgaactgcgtgacatcattcagcccttcaccggcagggccggtgggacctgtggggccgatgggaccggcaggaccggccggtccagtgggacccgtggctccggtagcgcccgttgcgcccgtggcacccgtagcccccgtggctcccgtgggcccggtaggtccaatggggccggccgcgccgttgggggaacctgatataattgggataatcagtagggacccttgtgctgccgcggtttcactggtctagtcccatttttcacaaaaaatgcggccgcttttgccgagataacaaaataaaggaccaggtcatttgacctggtccttcattttgtgacactgccctatttgttggcgcgctgcaggaagcgggtggcctggacaggctggcccggcagggcaattccattagcttatgaacttccatttccagaagccttacagaacaccatggtgtctctgacgggaaagatcattcaggaagaactgttgcctcagccggaaaaatatatccttgactatcagtagggatttggagcccccagacaagaagatgtttcgataggaacgaaacctgtgaacatggactttgaagagtatcgattgcagggatacatcacccagatctccaccctctgcggcagcaaacgtattccagatcttaacatggtgctcatcaacaagaacatgcacaggtccgggatggagcacagtacgcaagagctgggatcagggatgaagcagagatttttccagatcctccaccaatttgacgcaatccacattggccgagtcaaggttgacagaggccgcctgttggagctcgctgcgcaggatcagcacgtcttttggggcattgatgcccagcatgacggtgccgctggcgtcgaccgagaggatggtcacactgatctgatcgcctatgacaagcgattctccgccctttcgacgcaaaatcagcatacagaccccgcctcctcagatcgaaactcagaaagccggtggcgcatatgataagttccggtatccaaaatgacctggaccgcttttttctcctcagcatggatcacaatgggacatttcaaattcacggtactctcgcctacaggctcccggacgacacacaggacataatagcacaggtcctggctggaggagacccccataaggtagagttcctcatctgacagaacaggagcataatttggatccagagaaaaaggattcatggctacaaaagcaagtgaaggggtgccaacgctctgaaagcagagcagattgcctccgcccccatgaaaggggagaagcagaaactgcttctcctcttcaaatccaaagatcccattcggaaacgagagcacctcggtgggatcatagtcgatttggccaaaatattttgtcatgagatgcaagatcgatccctcctgttatgcctgcatatcaatgggctcataatttggatcagaggagggggggacgtacagcggaccgcccacatatttgatgatgacatctgggcgctgagtcatggtaaattcaatatccccgggtacaaaggtgaaattcatctgattcatgcgccagttgaagttcagtttgtccatctcatagcggatgctcagctcacctccctcccaggagaggtcaggggcggcgctggggagaaaatcgatgtttacattcaaaggtccttccgcagtctgctgccgggcaagctgaggaatgatatcctgatcgattttggcttccatcatcatacgcccctcccgggccaatacagaggtggcctgataagcaccctgtactccgttttgcgcctgctgctggatcagctgggctgtggtgggagtaacggagctgcgagcctcaaaggtgtcaatattgacccggatgggatggctgcggatattgagcccgccctgttcacgggagatctccatctgagccgttcctcgggcatattccaggtgagcgtcagtgaccttcatctggatctcgattggaactgtggtgatttcgatcaacggatacatcgatgttcacactcctttttaatcagatccgcagctgggatttcgatctcacgggcgggcgggtctccttccggcccggccctagagccgttaccgcagataatccatcaaagactggggaatgacattagcgcctacctgaagagcggcgttatagcaggtctgggcataggagagctgcaggatcgcgtctacccggtcgatgtcctcaatggcgaccagctcattgttcagcgagtcaaaggtgcttttcaggcgggtctgattggtctccagatagtcggcctgggagctgagctccacgtgctcctgaataaggccgttgtgggctttttcaaatttgcttaccagacggctggcatcgtcatagttgccggcggggccccatgtcccctctgtattggccgcgtcattgtgctgatagccgccgaacacatcagagatgcgcagcatgatggaaacgatgtttttgggatctccatcttcatccagcccaaagccgaggatatccatcccggacagagcggaatcaaaggcggtggaggggatcacggctccatttctgtccagctggaagccgagtcccacatccacatacagagtttctccggccatgtccgtcagcttgtcgtggacgtctgagtttgtcaacggcactccattttccagaacttcttttccgttcaggtccagatagacgtcatcgttgtccggaacatccaccctccagccccggaaggtaagcacgtccacggggggattctggctctgatcctcctgaatggcgaagggagcctctcctgtttcggagccgttaaaaataaagtcgttctcatacttgccattgagcacttgaacaatggcgtccgcgcccgagcggatgacctgggcgtaggagttgagcgagctgagatggctgttgtccaggccgcccagtgcgggagcctgcgccaggtcgtgggtgagctcgttggtcacctcatccaaaatggagtaagcggtgccaaatttattcaggacagtttcgttgttggcagcttgggcattgacggcgttcagcgcactgtgaagcttaaaggcgcgggtggccccggcgggattggaggcgtaggagtcaaaattccgccccgtcatgagcttttccatggcgctgtacagctgattggaactctgcatcagattggactgatacatatggagcgtgctgttggtggtcacgcggatcatagttgattcacctcattatgaaaaaatgccgaaggtcagaccacagtgccgttgatgagggagtccaaagcctcctccagcacggtcatcagccggcaggcggcggtataagccttttgataggtcatcaggctggtggcttcatcgtttagatccacccccatgacgccctcgcggtctgtatagacctcgctggccgttgcggagtagttggtcagcagggcggtggtggtcatctggtcctcggccagaacggactgcacatggagcagcatgtcctcgaaggtgccgtgataagcctctcccactgcatctcccccggcgacgtggtcgggatcgaattttatcttctggtcaaagagggccaggaacttggagagattggaggtatcaccgctgggggcatccggtttggtggaggcctggagagagaccttatcctctgcccaggcctgggagatggagatgttcgctgcggtgatggcgctggcgtcgttggtggcgctgcccatgctgaacagatttccacccgcgagcagatttcccttatcatcgtaaatatgattcagctcgttcatagcggcggcaaattcatgggccagggaatccaaagccttctgatagtaggggatgccccgctttacagcggcattcgggtcattggtggtgccgtctatcgtgtattcgccggcttcggtcagcatttcacgggtggactggagcgcgccgtacaggtcgttatcatccaagatcttcggatcggtggcgttgggctcctgcttctccccgtttttgtcccgcagggcgtacaggctgaccggacagccgtccttggcgctgccagccaggagtttggcagaaaatcccccatccaccagcttgtccttgccgccggtgcccagcgtaacggtcattttttccaccatcaggccggcgcccacgtcctccatctcatattttacgtcgatatccatgtactgactcagctgatccagcaggagattgcgctggtcccgcagctccagggcggcatctccccggatgtccgcatcccggatggatatattcaggtcccgcaggctggtcaggatgttattgacggtgtctacctggtccttgagctgagtctcccaggtctccgtcatgtccgcaagcttatctgcggcatcgttgaacagggagcagagggccttggccgaggcgcggatcagtccctcctgggtggagtcaagaccgctggtgatggccttgttgatcagatcgcgcaggtcgttgagctggttgaggagaacgccgtcatcctgctcaccgtcccccttgcccacctcatccaggatggaggccagcttttccagaccggccagcttggcgtcggcggcgcccacgtcagccgaagcattgcggtaggcgatatccagcccggggtcccggagctgggagaccccggtggtcaaaacgccctgccccacccgggtcttatagggggaataataccggtccgaggcggaggtgatcaggctgacctgatccagccgctggcgggtatatcccgctgtattgatgttggtgatattgtttccagtcacgtccagccccttttgggcggcatagatgccgagacggactgtattgaaggaaccaaatgtactgctcatgatcggcctcctcagactctgagatcggtgtgtgtgtcggagccggtgcggctggcggtggagggaccttcttcctccagccctctgcgctgcagctcctcttcgatcagccggagccggctctccatcaaaatgcgggagggctcctgggcgctgctcaggatgcggtattggttgataagccgctctgacatgcgtctggcggcctcccggtgctctggaggacagcggctgggaagcgcccggagggagacatcctccagccccagtgcggcgaggagccgcgcgcgcttttgctcaaagcccttcagggtcatggaaaaggcctgctcccgcttcatgcagtcgttcagcgcatccagatcccgggcgctgacagcggctgacttcttctgttcaacgtcaacgagctgctggagcgtgtgctccagctcctccagaaaattcagatattcagaaaaatccaccatatgtcagtcctttccctgcagcagcatgcgggcggcgatctgaccggggtccacggaatagaggccgtcctggacctgctgacggagcgcctctatctcgtgacaggtggggcgggtccggatctgttgagagatctgcgcggtcagctggcgcacccgcccctgcatgccggcgggctgccctgaaaactggatctgatcgaagctctgccggaagcccccggagaccttttgggtgcgggaggaagaataccggccgacctctcccaagggagagaatccgccgcgatcgatacggaattccatggaaatgtctcctttcgcggatgctcaacaaatatggagcgggaccctggtccggggacttgggggagcggacagccgggaagataggagggggggataagagacggctgcggatatccttccaaagccccggaccagtacactgtaaatatcgtccggaaaatctaaaagttaagcggcgggggcaagttttcttggagagcatgcccgtttgcaggcagtgaagaaaaatttttgtcaggggcaaggggttattttttaaaatatttgaacgatatagaaataggggagacctataaaaaataagccgcgttttttgggatgctccctctctggcggatgggcggagcatgaaaggaaaaccttccccaggcgccaaaacaagatccgaccgatcataattttgaggggagatagagctatggcaatgaaatatgagctgaccagtgatctgatgacaggaaacagtctgatcgatgcggagcacaagcagctgttcgacgccatcaatgacctgatggatgcctgtgcccagggggtggggcgggagaagatcatgtccaccacccagtttctgaacagctatgtcaataagcatttcggcgacgaggagaagctgcaggtccagagcaagtatcccggctatgcggcccacaagcagtttcatgacggctataagcgccagctttcccagacgactcaggcgctgatcgcagagggccccaccgtcaaggcgctgggcgacctgaaccggatcgtgggggtgctggtgtcccacatccggatcgaggacaagaagctggcccgccatgtgaagggcgcctgagacggacacggcgcccccggaggcggcggaataaaactgtgagactgcccgggaaagcggcggagccgctttcccgggcagtctcaggggagcggaaaattttcctgctccccttatttttttcaaaacctggacgatgagactcacagaggaggcagagagatccggagtctcccgcctgctcgtcagcaggatcttttggccgccgtgaaggcctgcggaggctgggagatcagagcagggcaagaaggaacttgcccgcaaaacatcaaggaggaataaagatcatgcgtattcagcacaacatcatggcgatgaacgcctaccgcaactacaccaacaacaccagcgccctgtccaagaacctggagaagctgtcttccggctataagatcaaccgggccggcgacgacgccgcgggtctggccatctccgagaagatgcgcgcccagatcaccggcctggacaaggcccaggacaacgccaaggacggtatctccctggtgcagaccgccgagggcgccctcaccgaggtccacgacatgctcaaccgcatgtacgagctggccgagcagtccgccaacggcacctatgagaatgagaccgaccgtgcccagctccagaaggaggtcacccagctcaaggacgagatcaaccgcattgctgactccgccaacttcaacggcatcaagttgctggatggttctatggcggctaaggctggcgtagaaactgttaaaacaagcattgcaggtacatccgctaatgttaccgctggaaatggcgctacctttaagcaggacatcacagtgcaggccggcacagcaaacaaggatgtttccttgacgctgaagtatctggacaaagagggaaatctgaaagagaccacagtaagtgccaccctcggtacggatgccgctgcgaaggacgtgggtgcagctttggctgccgagctgcagaaggttttcggaaatgactatacggtggaagcggatggcggaagcggaaaaattaccatcacaaatgccaatgggaatgaggcggaccagacccagatcatttccgctgttcagaaaaatgatggtaccgcaacaaccgctcctacaattggcgcggtgactgcgggtaaggacgatgtctttacggttgcaggcgctagcattaccgatgttaccaaagaaaacttcctggagattgatggccagaagtaccagattcttacccgcggccagacagcggaaagcggcgctaaagcgctgtatatcgacaagagtagcggagcgttggatgcggacgcagttgcccagatcgtggagcagctcaaggattacggcgtgaacgcctctgtcaatgcgaatactaagacgagcatcgacattgccaaggcaactgatggctccaaggcttccggcgggctgaccctgcagattggagacaccagcgatagctggaaccagctgagtgtttccattgacgactgccatactgcagctatcggcattgatggaattgatatttccaatcagaaaggtgccgccgctgcgctggacaccatcaaggacgccatcaactacgtgtccaacgtccgcggcaccctgggcgccacccagaaccgtctggaccacaccatcaacaacctgtccgtcatgcaggagaacatccaggatgccgagtccaccatccgcgacaccgacgtggccgacgagatgatggcctacaccaagaacaacatcctgatccagtccgcccaggc

SEQ ID NO: 13676 - DNA, 3718 bp, Unknown
  gut microbiota DNA sequence
cttggttggcttaaagtcgacttaggagaccattggatatgaacagttctattagtcagtcactgaggtcctattgtccgaacatgtcaataaagcgtttgacacagccagagtacatgacactgctgttccacatcatagtaggatatgattttgcggttatgccccggatcggcttcgagtaaagctcatgtgagccgattatattcacaagtgccggaggcaaaaaactaattccaaatccagactgtaccatctgaagagccatgggggtatcataacactggcagacgacattgggagagaaaccattgcgctgacactcattaataaggtaattgttgtagctccaaaggtcatcgctgcgcagcaggcacattgggacatctcggagacgctcgataggaatataatccagtccgggtgcaggatctaggctctctgtcaaaatgacttccagtgtttcttcaccgagtatgcgttcccatgagccggagatttcacttgtagtcccccggagaaatatcacatgaagatcgccattgctcagatctttcaaaagatccccgggagttcccatgcggatgtagtactctacattggggtattccgcatgatatttctttagaaaatccaaggtgaaagaaatagtggaatagatcgatccaagtttcaagcagccccgcagcccctggtcaatatcccgcacactgtcgatcatggtgtgcatgctttggaagatatgcttgctttggacatagaggctctgccctgcttcggtcagttctattcccttgtttgtacgcaggaaaagacatactcccagttcgtcctctaaaagtgcgatttggcggctcacaggtggctgggccacatggagctcctgagcggccttcgagatactttttaaccttgccgcagtagtaaaatactccaattgcctgaagttcatagtggcataccttctttatataacaaatatacgaattaagtactttttattataacacttatctgttagaattcaatatatcaaggcgagaaaaaggattaaaaactagacatcttgctgacacatatttgaagaagaaaggagaaccattatgaccccagcacatcttgacatggacaagtgcatgaccattcacttggactatgaactacctgaatatcccgcttttgaagagggctaccgccgtgccccccgccgtgaatcccatctgactgaggccgacaagatactggccattaagaacgccctgcgctatatccatcctgatcatcatgagcagatggcaaaggagtttgcccaggaactggaggaacacggccgtatctatggataccgtttccggccggagggaaagctgtacggcaagcccatcgacgaatataaaggcaactgcatcgagggcaaagcgttccaggtgatgatcgacaacaacctggacttcgaggtggcgctgtacccctatgaactggtgacctacggcgagtccggacaggtgtgccagaactggatgcaataccgtctgatcaagaagtacctggagatcatgacggacgagcagactttggttgtgatgtccggccatcctctgggcctgttccacagccataagctggctccccgctgtattatcagcaacggcctgatgatcggcatgtatgatgaccagaaaaacttcaaccgtgcggcagccatcggggttgccaactacggccagatgaccgccggaggctggatgtacatcggtccccagggcatcgtgcatggcacctttaacaccctgctgggtgcggggcgcaccaaattgggtatccccgaggacgggaacctggccggccgcctgttcgtgtccgccggtctgggcggtatgagcggtgcccagggcaaggctgcggagatcgcaggtgccgtttccatcattgctgaggtggacctgtcccggatcatgacccgttacaaccagggctgggtgagtgcgaagtccgataacttggatgaggtcctgaaaatgactcagcagaagctggctgccaaggaaccctacgccatcgcctatcacggcaacgtggtggacctgttggagtacctgtatgagaagaatatccatgtggatctaatgagcgaccagacctcctgccacatggcgtacgacggcggatactgcccgcagggattgaccttcgaacagcgtactgagatgctggacaaggaccccgaaggcttcgccaagctggttgacaagtccctgaagcatcactatgagatgatctgcaaatttcacgagaagggaacctatttcttcgactatggtaatgcattcctgaagtcggtgtacgacgccggcgtgcctgccgagaagatttgcaagaacggcgagaatgacttggacggcttcgtattcccctcctatgtggaagatatcctcggccccttcctgtttgactatggctatggtcctttccgctggtgctgtctgtcccggaaggaagaagatctggataagaccgatatggctgccgccgagtacatcagggcacacaaccgccgctatcaggatcacgacaactacatatggctgcgtgatgcgaaaaagaacaagatggtagtaggcacgcaatgccggatactgtactccgacgccatgggccgtatgaacattgccctgaagttcaatgagatggtccgcaagggcgagatcgggcccgttatgctgggccgcgaccatcatgataccggtggtaccgactctcccttccgtgagacttccaatattaaggatggctccaatatcatggccgatatggccacccagtgctacgctggaaatgctgcccgcggcatgagtctgattgccctgcacaacggcggcggtgttggtgtgagcaagtccatcaacggcggctttggtatggtgctggacggctccgagcgggtagaccagattttaaagatgtctatgccttgggatgttatggtgggggttgcccgtcgtggctgggccggaaatcccaattcgctgtcaacaatcgctgaatacaataaactgtacgagggtcaggaccatatcaccctgccctacttggcagatgacagtattgtgcataaagcactggaagatatctgagatcaaacttaggaggtatcgaacgaaatgagattgacagagaaggaacaagccatgctgaatggcgaaatgggaccaggatttgcccgggcaatgcgggtcctggtagggatcgggaaagctttcggcgctgagcgtatggtaccgatcagccgggggcatatctctctaagcaaccaggagggtgacctctggtttgtttcgaagctgctggaggagcaggcacattgtatggtgcctcccacggtcaatcccgcctatgactatgagtattttaagacgatttcgaaattagatgaggaaaatgagcgcacactgaagagcacgatcgatgtttatcggaagcttggcgccatcctcacctttgactgcaccccgttttttgaaaacaatgtcccccgctttggagaaatctgttctttctccgcttctggcggcgcagtatatgtcaactcggtgctgggggcccggacaaatcgtgaggctgctcagagcgctatgtgtgcggccattaccggtgtcacacccgaatacggactgctgctggagcagaatcgggcaggcgatgtccttattcaggtaga

SEQ ID NO: 13677 - DNA, 15938 bp, Unknown
  gut microbiota DNA sequence
ataccactgccctgtgttcaatggtttgtccaagcagaccacgtcggaacaactgatggacctgggtactcagttgaatatccatgggatcgtccccatgttccatgtggtaggcgtaacaccggaggcggcagatgtccacactgcctttttagggcggaaagatccccctgtggtcaccatcacgaatgaagacttggatcaggccagagcggagatctctgccggcactggaaaagcggacttctgtatcttgggctgcccccatttgaccatcaaccaggtgggttccatcgcgaagatgctggatggtcagcagctggcaggtcagctgtatatcttcacctctacctccaccaaggagctggcgcagcggatgggctacctggatatcatacataaagctggtggagaaatcgttatcaacagttgtgtggatcagccatgctggtcgcatctgtatgggatgagcggcgtgacggaatcgcctaaatgtgcctactatactaagcgctggaacatgacatttactgtcaagagtattcccgcctgtatccaatctgtgctgaagggggagatcgtatcatgaaggatgagagactgctgaagggtgagccgattgccagcggcattgttgaaggcgagatcctggtgtcaaaagatccgatcaatttctatatggtaagcccggagaaaggtaccatcattgaacaggatcatgcactgacagacaaagtgattgcaaagaaaatcatcgtgtttcctattgataagggcagctctgtggtgcagatggacggcctgtatcagatgtccaagtttgacaacaaacctgcgggattcattgtgctggatctaagtactgttctggtgtctaatgcgattattatggatatcccgctgatccgggtggatcagcagacctatgacaaattctgcgaggggcagagagtgaaaatggacggagactctggcgaaataacgatcctggcgtaaaaaacgcactgaaaaaaggagagaatcgctatgacacccaatcaaatcacaatgctgataatcctgatcgcctatatggcggtcgtgcttgctgtgggtctttatgcatcccgcagggtaaaaggctctgaagacttccttttggctggccggtccatgggcctgtttgtcctggtgggtactctgtgtgctacccagctgggcggcggcaacatcatcggaacctctacaaatggctataatcagggattgtccggcatgacattcggcgtttctaccggcctcgccatgctggtgctgggtctgctgatggcaaagcccatgcgtaaaatgggactgtgtacgatcagcgacttcgtttataaccgctaccagtccaacactgcgcgtgtcctcacgagtgtattctcctttgcggctctggtcggtatccttgccgcccaggtcggtgccatctccaaggtgctgactgtatttggaatcaacactacagtagcagctgtgatcgctatctgtgtgatcattctttatacagccttttccggcatgtggggagtggccctcaccgacgtgatccagcttatcgtcatcttcatcggggtccccctgactacgtttattggcctgattaaaattggtggttggagcggactggttgaaaaactgtccaccatgaacgttccgggcggcattgatacttacatgagtcccaccggcatcggtcttgcagcaatggcgtccatcgcgctgccgatgatcgcctatgaaatcatcggtcaggatttctaccagagactgctctctgcaaagaatgaacgaatcgcaaagaccggctgtatcattgccggctgtattctgatggcaatgggcgtcaacagcgctatagacggtatgctggcccgtgccttcctgggcgataccctgactgaggtaagcgccatcgcctctctggctgtggaggtgctgcccaccgtggctgccggcattgtgatcgctgctctgtgtgctgccgtcatgtccactgctgactctctgctgctggcttgcacttcccatgtagtcaacgacatctacctgggtgctatgggtaagtctgccagcgatgaaaagagttccaagacgattctgcggatgtctgtggtgactaccgtagtggtcggtatcgcatcccttttcgtggccttggccatccctggcatcattgagatcctggactatgcttatactttctatgccagcggtctggtcgcccctgttctcttaggcctgttctggaaaaagggcaacgctttggcagcagtttcttccatcgttgtaggtggcgttgtctcactgctgtgcgtatttggtattcttcccatcccggtggatgctattatcgttggtatgagtgcctcctttattgattacgttgtggtcgctctggtaactggaaagaaagagggctgaatccaactgtatcaaagcgtcatcaaataggcgttaccatccattttgctagggaggaggcgcatgtgcgtctcctccctcttgagaaaggatcgaactatcatatggaacgagtgctgctcttcaacatcggcgttcttgccactccgctgggatacggacccaaaggcggggcagctcagggcgccatccaaatccaaagagatgcgtgggtgctgctagaaggcgaacggatttttcaggttgggactggcacccctcccgacatagatgctgaacggatagatgcagagggaggactggtcacgccgggccttgtggacgcacatacccacctgatttttggcggttggagacagaatgagcttggtatgaaactccatggtgtcccctatctcgatatccttgcccaaggcggcggtatcctttctaccgtcaaaagcacacggtcggccagcgaagaggagctgacagagaaggcgtccctggcgttaagtgagatgctgtccttcggcaccaccacctgtgaggccaagagcggatatggccttacgaccgatgaggagctaaaacagcttcgcgcgatccaaaagttacaggaggggcatgccgtggacgtagtggccacctttatgggggcccatgcactgccttctgagtataaaggaaaccgggacgcatatatccgtcttttgtgcgaagaaatgatcccagcagttgcggaacagaaaatcgctaagttctgtgatgtgttctgcgaaacaggcgtatttaatgcacaagagagccgaaagattttggaaacgggccgcaaatatggcctgactcccaaaatacatgcagatgaaatcgatccgattggtggatctgtcttggccggagagctgggtgcggtctctgcggaacatttaattgtctgtccgcctgaaggaatctccagtatggcaaaagggggcacagtagcctgccttctgccggctactagcttttacctgggggccggttttgcgcctgcacgttcgatggtggaagctggagtgccggttgccatggcatcagatttcaatcctggctcttgcccatgcttgaatatgcagtttgttattggactgggatgcctgaagtacaagcttacgccggaagaagtgctaacagctgtcacgcttaatggtgctgccgcaattgggatggctgaccaaatcggctctgtggaagtcggaaaactgggcgaccttgtggtttgggacgcaccggatttggactacatctgctaccgcattggaagcaatttggtcaaaaaagttatcaaaagaggccgaatggtaccgtagagctatgaacagatactacagcgccaatcggagtctcaaagcccgtttgctggtgtgcagacagccaaatggaagtactcaaacagctagactgcgattttaactaacagaggaagttttgctaaaaaatatgggctttcacttaaaatggacaacataagttctgtacgaaaaaaacggtatatattacagatatagagttccaaatatcctatttttatatatcaactttccgtgttgttgattttttgatctacaaaattgagcaatatttgctttattacattacacaaaagccgtccggcgttcaaatcgggcggcttttttgcatggataggcgggaaggaggtggagaaatcattacagaaattcatcccgtaaaattgcgcaactttcacgaaaaggaggttggtgaatagccgatgaaaaattgaacaaaggccccggggagggtgaaccagctaagcgcggcaaatgtacccgaagtgccgccctccatctcggaatacactgtccagccagcgggcagcaacagcagaacatgcccccgccccagcaggagacttcggttccctgctttttatttctccccctctgcaccggaaattcataccggcgtgcctgatgagcggggatttgtggaaccgatttttcaaggctgtgcgttcctgccacaagagccgacgatatttgagatggaacgctaggcagaatatctctgtgaattgctatcctgttaccagcaagtcttttgcccctttctcagagacaaaaaagcggcctgcccctccagggcggaggcacgctgggggcatcgtgcgctgcatataaaggggacgaatacaatgatgcatcgggaagccctgtccgcagctcattctccttgccgatgtttttcgccttttctataagtgattctctcacataaaagccgctccgttgggcatggataaagcagacattcactgcagaggatcaaaggaggcttttatgggatctatctggtctcagacctgctctattgggcgcaggccgcccctccgggggcatttgaaaactcaggcagcggtggtaggggcggggatggccggggtgctgacggcctatgccctccagcaggccgggctttcagtcgttgtcctggaggccgaccggatcgccggcgggcagacccaaaacaccacggccaagatcacctcccagcacggcctgatctatagcaggctgatccagtcctttggggaggagaccgccaggcggtatgccaaagctaaccaggatgcggtccgggcctatcaggacctgatcgacgtccaaggcatttcctgcgactgggaggagcgatgtgcctatctctacggccctgacgtcactgtcttacaggaggaggcggaggccgcccggcgcctgggcctgccggcctcgttcaccagggaggtctctatccccatcccccacgatggggcggtctgctttgaagggcaggcacagttccatcccctgaaattcctgaaagtgctggcggaccagctgaccatctacgagcagagccgggtcctcaccgcggagggggacctcctgaccacagagctgggctcggtccaggcggagcacatcgttttcgcctgccattttccctttgtcaactttccggggatgtatttcgcccggatgcaccaggagcgctcctatgtgctggccctgcagggcgctccgcctgtggacggcatgtttctgggagtgggacgggacaccttctctctccgcacctatggggaattgctcctgctgggcggcggaggccatcgcaccggcgagaacaccgaggggggccggtatgacctgctccggcggaaggcccgggagtggttcccccagagccaggagaccgcccactggtctgcccaggactgcataccgcctgaccatgtgccctatatcggcccctactcttccagccatcccggctggtatgtggccactgggttccagaagtggggtatgacctcctccatggcggccgccaccctcctgtgtgatatgatccagggcagggacaacccctatgccggccttttctctcccagccgtctggaccccgcggcgctgcccggcatcctgacggagggcgggcaggccgtcaagagtatggtcaagcgattcttccagatcccagcggaggcggccaaagatatcccggccggacacggcgggatcgtgttcctcaacgggaaaaaggccggggtctaccgggacaagtcgggggcgctccaccccgtggacatccgctgcccccacctgggctgccagctggagtgggacccggacgagaagacctgggactgcccctgccacggctcccggttcgactgcctgggccggctcatctccgggcccgcacagacagacctggactccagtctccggaccggccggcggtctttaccgccatcagtcgagcggtctccataatgatcgatctggttcggaagggcttgtccctccgctttaccaaccaggccgcagcgctggtgtgcggatcttcggcggatgtccgcccgatgtctctgctcttcacggcctggggccagcggcgcgccccctcctccccagctgcggcgggggaggagggggcgctggtccggctggtctgaaaaaacttttgtgagtctggattttccccttgcattgcacgccaagttgtggtatattatacaggctgaaacccatgcaggtgtagttcaatggcagaatgtcagcttcccaagctgaacacgggggttcgattcccctcacctgctccaagtcggagcaaacgtctatcgtttgctccgacttattttataagtcagagcgcactcattttgctgctcctcctttccaaatcacaaccgctgcgctgggttgcgatttggtttcgccgcgttgcggcgtttttgttttttcatttttaaaatatcgattttaaccgtcttttgcaagtcggagcaagcgtcgtagcgcttgctctgtaagtcagagcgcgcttattttgctgctcatcctttacaaatcgaatccgctgtgctgagcttgcagttggggccgctctgcgggcgatgtttttgacggcaaaatttggcggaccgcttgcccggactggaggagtagagtataatagatgcgggcccggtcgaagacacaggatggttccaaagatctgtaaaatgagttgacgaggcgggcaggatatggtataatttaaacagtaattattctcattaagaaactaaaggaggaaatcatcatgcctgaactgaagggaagcaagacagaacagaacctgtggacagcctttgctggggagtcccaggcccgcaacaagtacacctattttgcctccaaagcgaagaaggacggttttgtccagatctccaagatctttgaggagaccgccgccaatgagaaggagcatgctgagatctggttcaagctgctgggcgggatcggttccactgcggagaacctggccgccgctgctgagggcgagaactacgagtggaccgatatgtacgccaccatggccaaggaggccgaggaggagggctttgaccacatcgcattcctgttctccgaagttgccaagatcgagaaggagcatgaggagcgttaccgcaagctgctggccaacgtggaggggggcctggtgttctccagagacggcgatatgatctggcagtgttccaactgcggccatatccatgtgggcaagcaggcgccggaggtctgccccgtctgcgctcatccccgggactacttccagctgaaggcggagaactattgatctgctgatccatacatatctctaaaaggacgcgcctcgcattgaggcgcgtcctttctgcgtctggtcagttctcctccggaccggccgggggttccagcccgattttgcggtagtagtcattgaataggatcttctccgaatagctgcggatataccgggcctcccagtaggtgtcctgggcgtagttttccggcacctgcgccccctcatttggggtgaaggtgtccgtgtccgcattgtaacgccccagttcggtgagatagctgtaatcgttaaagatgactagcccaggggcgtcggagaggatatcccggccggccagcaggcgggagtcatattccaggccgaacagattggacagggtggggatgatgtccacgctgtaacagggcttgtccactaccacaggctcctccatgtcaccggaccagaggatcagcgtggagcggtacttctcaaagggatcggcctccgtcccttcccccgccagctcgtcgatggcgccggtgccgtccaggccataggggtagtggtccccggagaggacgatcacggtgttctccagctcgccggcctcctccagtgtcttgatggtgtactccagagcctggtccaactccatgttgcaggccagataggcccgggcggcctcgctcatgtccagatccgccacctcatcccggtgcttggcggacatggcgttgcccgcgaagctgtaattcatgtggccgctcaccgtcatatagtagttgtggaagggcttctctccggccagagcctgggggagggtcagctgcatcatctccaggtcggactggggccaggtcatggccacatccagcccggtgtcacaggcgtagaaatcatagcccaggttggggtgggagaggttgcggtcatagtagttggctgtattgttgtggtaggccagggtgggatagcccagggcccggagctggttgcccatggagaagtacatggagaccccgttttttcctgcataccgctgggaggcattgacctggttggtggggatcaggccggtggtggcggcatactccccatccaccgtggagtaataccacagggggttgtagaagttctcaaacacaaagccggagtgggccagcttgtataaggtgggggtgtactgctcgttcactgcgccgatccagaaagcctcgccggtgaaaaggagcagattcttgccctggaacataccggtgtactgatttttctccgtgggcgtccggtcccggaaatactcgtgcatgtccttcagggtgctgtccgtctcgttggcgatcagggcgtcgaagtcgatgtccatgacattgggaccggaggcggcgggggtctccccttcctccggctcctccggctggacagagacattccccggggccagcgtggagaccgagccctcacccgggtcggggcggctgggttcctccaggccaaagagggtctgctcgatatccagccgcagggtggtggccaggccgaagtgggagaccgtcaggtctgggacaaaggtctctcgatagatctggcgggtcgtcatgatcccgccggtgggcagggcgatcgccagcactgctgcggcctgcacgatgatcacgccgccgatcactcccagcagcacccggccgtccgggcggttcaggagggcgaaccgtggctggaagaagtacaccaccagagggacggccagcaggagcagggcgggcagggcctcccagatgcccagcagggtctccttccagtagctgcccagggcctgacctgccatgttgaaggacttggtgaccagcacggtggcaaagatcgtgtggtacaccgactggatcatgtaccacagggtcagcacgccaagcacggcgaagccggccttgcggttccccttcttgccccagagagaggtcaaaagggcacacatcccggccagcggcagggagaaaagcaggatatagaccagccccacatcaaaaaagggccggacatagaaagcccggtagatcccctccagccagaggatagagcccaggaaaaacaggagcggttttacgatgtcccagggagtttctctccgatacatgatatcaaatcctcgctgctctgcccgacccggggcagatgcttgatctcagtgtgcgcggaccccaggcggcccgcagtgcttacctctttatcatacctcctgccgggacttctgtccagagggttctccctttttctctgccctgtttcccggggaatagggatgacggccgagtccctctgtgatataatagggaaacaacagggaaacgggtttgcttgttcccaaaacggacatactgaccactgtatcgacagaaggggaggaccaccatgacctttgaggaactttaccgcactatgctgaagcaggctgttgagaagggctccgtccaggcagatgatctggaggccagtgccgggcatctggactgcctgctccaccctcaggaccaccccttggtctggccgctcaacccctgcacctgtcccaaagaggagacacactgcgccgccgcctgcctgtttgacgccatcgtgcgcagggacgacggcacgcttgccgtggacccggaccgctgctccggatgcggcgcctgtatccaggcctgccagtctggaaacctgactgccagccgggacgtgctgcctgccctggacgcagtcaagcatgccaaagggcccgtctacgccctgatcgcccctgccttcctgggccaattctccactgtggtgacgccgggccggctgcgctcggctttcaagctgctgggcttcacagggatggtggaggtggccctcttcgcggacctgctgacgttgaaggaggcgctggagtttgaccggaacattcacacagagacggatttccagctcacaagctgctgctgccccatgtggatcggcatgatccgaaagctgtatcatgagctgatgccacacgttcccggggcggtatcccctatgatcgccgccggccggacggtaaaaaagctgcacccagatgcggtcaccatctttgtggggccctgcattgccaaaaaggcggaggcccgggaggcagacctggccggcgcggtggactatgtgcttaccttccaggagatgcaggatattttccaggcggcggatatccacccggagctgctggaggagagcgagcgggaccactcctcccgagcggggcggatctacgcccgtaccggcggagtcagcgaggcggttcggaccacggtggcccgtctgcacccggagcggcctatccaggtccggacccggcaggcagacggcgtgccggcgtgcagggcgatgatcgaggacatccgctccggccagcaccaggcgaatttctttgaagggatgggctgtaccggcggctgcgtaggcgggccgaaggtcctgctggaccgggagaccgggcgggagaatgtagaccgttacggagacgaggcggagttcggcactccgctggacaacccctatgtcctcaagctgctccgcctgctgggctttgatacggtggaggaatttttggagcagagcgatattttcatccggcatttttaaaggaagcacagagcgcaagggcagggctgtgatcttccggctgtccccggcaaaagtccgtcccggctcctagagccggaaaaggggggagagcaaaaaggagcggaagcaaaagaggaaagacatctgcacaagcagatgtctttctttttgtgaagggcggttaagactgatatttctgtcagaaacgaaaaatgccgcccgcagggcggcccaccaactgcgagcccagcacagcgggtcgcagttggaaaggaggagcagcggcgtgagcgcgctctgacttataaaataagtcggagcaagcgatacaaagcttgctccgacgtggtgcgcgaggcgggacttgaacccgcacgtgcgtaatgcacactagaacctgaatctagcgagtctgccaattccaccactcgcgcatgggggactgcgctcttcagcgcaagtggtatcataccatataagggcctgcctgtcaacacttttttggccctccctggatcttttgtttgtccccgcccgcgagagcggggacaaacggagggctttccgctgggagccggagaaaagagggacttttgagcgagcagagggatcggcccgcccgggccaaggagaggccgggattcaggtggatggggtggagcctgccaggcggttctccgggtagcggcgcagatcgatgtggctgatgacaaagagctcatagaggcgggccagaatatcccaggtctctcggtccagctcaccagtctggggcagcatagccttctcctggagccactgggtattccggaccgaagcagcatcgtggatgccgtcgatggactccggctccagcccatccaggacatgggagaggctctgaaacatggcctgtaccgggagaaggtagttgtgggaggaaccggcctgaactttagcactgggaggaaaagcacgtatctgtctgggatcggcaagctctcgctccagatccagccactcgtccagaatggcctgccaggtctcacggtccaccacgccggtgacaggggggtggagctcccgctggaagagcatcaccgcctccagggtacgctccccgaacacaccgtccgggaccagagcgggcagaaagtcatagcgcagagacaggcggttcagcatatactgaagactccgtatgggctgggccaccatctcgcgttccagctgctgtaaggtcatgacaaggacacctcctgttgatccgactgccccaaacgcagatcggtgccgggatgctgcccgaagcggggcgtctcactgtgtccgctgaccgccgccagggtcaggtccaccagcgaggggatgagctcggaggcctgaaaggggaagcgagccacatcctgttggagcacggcttccaggctggcgaactcacggtacagggcgtcccaggtggcttcccccactacgccgtcggggaggaggtcagtctgccgctgaaaggactggaccgcattggcggtggaggggccgaatacgccgtccaccgtcagcggggggatgacctcatcaaattcagccagtacggccagcatgtactggaggacctgaacctcggtgccggtgtccccctctcggaggacgccagggtactggaactggaccttatagaaggtctgcccttcgctgaccagctcagagagccgggtgacgcccacatagaggtagaccagcttataccaggtggcctttcccaccacgccgtctgacgccaggttgaagatgcgctggaactgccgcacggagtattcggtgtcttccccgaagatgccggtgacgggcttgatcttggggatggcggggtagttctgggagatgcggttcaggctggtctggaccacggccacctcctcccccacagagcccagccgcagggagctgccgggataggactgggtgatgtcctggatgggggcgttgaccaccagctcgatgtcgtccccgtaatagtggcggaggatctccatggagttgtagcccgtctgggccatctcctggctgccccactgggagagcccgtcacaggtggaggtggtcccgttgcagaacttggcggagaggggctccacaaagccctgacggcggatgtagtcgttgaagatctcgtccaccactgcgctgatgctctggaagaagctccttccccgaatgaacttctggtcataggcggtggtgttggtgatttggaagttgtagccccggctggggtagaactcggtatagacccggttcagggcaaaggaaatgatagccagcacattggcccggatcgtggagagctcccaggtgggatagatctcactggaggctacgtttttgacgtagtcggggaaagagaccgtcacattttctgcccactggtcgggcaggcccagatgcaccgtgatggtgctggggatgtaaggaaggacgatgaccggcatagggacacctcacagattctgaggggaggtgttcaggatggagctgtcaacaagactgtgctgcccctcggccaaggggatgagctccatgtcctggtcggtctcttcgccggagaagatctggacgccgtccacccgcagggcggtgtagcctgggtgttccgcccagacctggcagacggagaaggggaccatgtcctgggtgggaccggtgctctcccagcgggggggcgcagggatggtgaggggctggacccggccctcacggtcggtgatctggacagacaacaggtgatatttcccggtcgggctgatctgggtcaccacaacagtggcgtcctcgatggggagctgcgcccgggaggtatagactctgatctgcagagtcccaaactcttcctccatatggagcctccttccggcgtgatggtgcgccgtttactggaccatcctatgccgggaccgcggagcgggttcccctgtggaaaaaagatgcccgccggagcaaaaacgctcccggtcgggcatcttttttccacagaaaccgcatctgcggtgggtttccctttttttctacacagacataccatataatgtggatagatttttaaaaaaggagaaatgggcacaatatgatggaacttaagatcgcgtcaagatccttgacggatgaggcggggaaactgcgccgcctccactattttctgctggtggacgagctggaggcggggagcttcttctgcgaacagtacggggtgaagatcgcggaagaggacggagactgcgcgcagatccggggcatcaccaccagcgcggtgcgcatagacgaactgatgaccacactggtggagcagcaggtcagccctacggtgctggaggatgtggtgcaggactggctgtgacagagacacaggtcagcatatcccacgcctccctctcagagaaacgctgttattttttctttcccctgtggtcgatgcgctgcatcagcgccaccagcagagcgatggcgcccaggaccacaaagatgcccagcattccctgccccatcatttccaaagcatgcgtaatattttccatgttcgaatgtcctcctttttactccatcacaggatgggattgttggcaaaatactgaagcaccacaccgccggccaccacagaggcgatctggccggagacgttagccgccaccgcgtgcatcagcaggtggttctgggagtcggcctcctgacccagcttctcgatgacccgggaagacatggggaaggcagagatgccggccgcacccaccatggggttgatcttgttcttgggggtgaagatgttgagtaccttgacgaagagcacgcccaccatggagtccagcacaaaggccaccaggcccagacccatgatcatgatggtctccttctggacgaactgatccgctttcatagagaaggcgatggtgatgcccagcagcagggtgatcaggttggccagctcattctgggcggtctgggagagggaggtgagcacgccgcactcccggatcaggttgccgaacatgaggaagcctaccagcgccacggaggagggagccaccaggccggcgatgacggagaccacgatggggaagaggatgcgcaggcgcttggatacgccctgggcccggtagggcatgcgcatggcccgctccttcttggtggtgaccagcttgatggcaaagggctggatgatgggtaccagagccatataggagtaggcagccactgcgatggcccccacatagcgggagtcgaggatctgggagaccaggatagaggtggggccgtctgcggcgccgatgatgccgatggaggcggcgtccttcaggtcaaagcccagggccgcagccaggaggatggtgaggaaaataccggcctgggcggcggcgccgcacaggaacagcttggggttggccagcaggggaccgaagtcgatcatagcgccgatgccgatgaagagcaggatggggaaggcctcgctggcctcgatgccaacctcaaagagccactggatgatgccgtgggtctcacccacgccctcgctgaactgattgatgacgccggacaggggcaggttgaccaggatggcgccgaagcccatgggcagcagcagggcgggctcaaaccccttctcgatggccagccagatcaaaaggccgcccacgacgtacatcagcagctgctgccatgtgatagacagaagcccctcccaaagaaattccatgctttcttcctccatttctttatagtat

SEQ ID NO: 13678 - DNA, 26348 bp, Unknown
  gut microbiota DNA sequence
cggcccgcgcccggcagacagcccgcaaaaaaagacctgcgttcccattggaacgcaggtctggtcatttcaggaaaaaccagaatggaacaagctccatccatgcttgttggcctttccgcgcgggaaccgcgccgactactcccctttgtatttacggattttatcatcttcccctggggctgtcaagagaaatctccgcttttttcaccatgcagaaacggcgggccattcaccccagggagcgggtccggaggtgacccaggccgcggccgggcaggggcagcctgacggtgaagagggtgccggagatggcggagctggagacggagatccggccccgatggccgtctacgatgctcttggcgatggacagccccagaccgtagcccccctggctcctggcccggtcgctgtcagtgcggtagaagcgctcgaacaggcggggcagatgctcctgagggatgggctcgccggtgttgtggacggagaggactgcctcgtctccctgggggcggaggatcagtgaggccgagccgcggggcccggcatacttgaccgcgttgtccaccagaatggccaccaggcggcgcagctgctccggatcgcccaggagctccagatcaggcgtgatctggctgtccagggccacgccggcctcaaaggccaccgactcaaaggggagcagggcctcccaggccaggtcgctgaaggacaccgtctggagacggaggggagagcgccggtcatcagagcgggccaggaagagcaggtcctccaccagtgacttcatccgctgagcctctgcctggatgtactccacccacttgcgctgtccatcagccatgtctccggagtgggccaggaggatgccggcgttggccaggatgacagtgaggggggtcttcaactcgtgggaggcgtcggctacgaactgcttctgctgctgccaggaccgctcggcggggcgtaaggccagggtggagaggagcagggagatgacgaagaaacaggccagccccagcagccccaccagcaggcacgtccgcagcagggccagaagattttcccgctcccaggtccggtcggcaaaggccaagcggaccgcgcctccctccgcatcctcccggagatagcggagggaggagacggtgccatcccggcggccgtcctccagagcggcctgggcggcctgttgggccacttccagagagacatccacttggtctccgtcgttgatagcggtgaccacgccgtcctccactgtgacggtgaacaccgggagcagggagcgctgagcgccctggccgctggaggggcggcgggacccatccaggggaaaagcgatctccggccggaggggactgccttcctctccccacatcagggcggcacgcatggccagcaggctctggtccttcaggcgttgagcactgcttgccataaagaccccaaagaccataaggaggaccagggacaccagcagcatgttcaccagaatgaatttgcgccgcagggtacggatcatggcatgccccctccgccaaagctgccgggctcatccgaggtagtgaggaaatagcccaccttccgcacggtgccgatggagacctgggaggccaggaaggacagcttcttccgcaggaaggagatgtacacttccacattgttgtcctccgcctccgagtccagcccccacaccttggcaatgatgtcgtccttgggggtgaccagcttggcgttctggagaagcagacgcagcacctcgaactccttgaagcccagccgcaccgacttgtctccccggcgcaggcagtgggaggagaggtggagggacaggtctccgaaggccagctcctcggacaccacctccccctggcggcgggtgagggcccggacccgggccagcagctcggaggtgtcaaagggcttggtcatgtagtcgtccgccccacagtccaggcccttcactttgtcggagatctcgtcacgggcggtgagcatgaggatgggagtggacacgtgggcggagcggaggcggcgggccacctccagcccgtccagcttgggcagcatcacatccaggacgatgacatcgtactgggcggtgagcgcataatccaggccgtcggcaccgttgtggacctggtccacctgatatttctgctctgccatgatctgggccagggcctccgccagccggacctcgtcctccacgatcaggatacgcataatgggcctcctttcccaattgggctctgttttttctcactataccacaaaaaactgaaaatgccctgaaaaattcagagtaatttcagcttctcctgttatactggccccagaagagcatcaagggacaggggggatactcgtgcgttatcgcgtggtgaccaccgtggccgcgttgctgctgtgtctgggcctgatcgcctgctttgtcccggggggcgtcccggcggcaacatctggggagggagacggcagggcggccctgacagcggaggaccggtgatgcctcctgtaaaagggaccggcgcggagccacaggctccgcgccggtccttttggcggcggaaagaggggggaaggccctcaggcggggaaagcgcctcggcgggtcagctggcgggagagggagagcagcaccgggatcagcaggatctgggccgccaccatgcagatagtctcggtgaagcgggcgggaagcatgccgaacaggcctttgccgtacatgatgtagagccagacgctgttgagcacgagccgggtcaggctggcacacagggaggcgcccaccacccgcagccacagagcgcgtccatggaagccctcccccttctggtggaggaacaggccgtagatcagtcccaccagtccggcggtgacagtgaagccggggaagaaggcgccgaaggggaagagggtggcgccgatcaagtcgcttaccgcgcccacggccagagcccacagggggccaaaaaggatgccggacagggcgacggccaggaaggagaagttgaccaccacgaaggtggtgttgatggagaggaaccgggccaggatgacctggagggccaccagaagggcgcaggtgaccatgatcttggtgtttttctgagctttcatttatctcttcctttcacgggctgagagagcctctcagcggtttcctcttcagttgccgtaaaaggataccctgatacgacagcggaagcggagcaccaccgcaagacagctgccttttcgtccggcggccacttcccatccgccggcacttgacgcggtactcctattctgtgtatggtcgctgggaaaacgggggaggggtcagcacagccccagatggtggcggatctcccctacggagtagagggagccccaggcgcagatcacgtcctccgggccggccagggccagggcggtgtccaccccctggtccagggtctcctggacggagactgggatggagaactgggccagccaggccgccagctcggcggcggggagggcccgggggctgtccggtgtcaccgccacaaaggcctttgccagggggaggacacggcggaacatggaatgccagtccttatcggccaggacgccggagaggaaaatgagcttccggccggggtagaggctctccagggcggcggcaagggcgtccacgcactgggggttgtggccgccgtccacgatgaagtcgggggagcggcgggccagctccaggcggccgggccactgggccgcggccagtccccgggctgccgcctcctccgggatggtccagccggcatcccggagtgcctgcaccacctccagggcggtgatggcgttggagagctggtagctgcccagcagggagaggcggtaggggccacggccccggtagcggaagtcctggccctccagaccggagcagaggacctccagctcctgggggtcggtctgacgcagggggatgtccagctggcggcagacggactggatcacctgggtgacctcatcgctctggcggtagaggacggcccggcagcccggcttgaggatgccggacttctcccgggcgatgagagtgagggtgccgcccagctcctgggtgtgctccaggccgatgttggtgatgaccgccgcctccggggcggggatcacgttggtggagtccaggcggccgcccagacccacctccagcaccacgatgtcacactgctcctccaaaaagaactccatgcccaccgcggtcatcagctcgaactcggtggggggatcggacatcccctccgccacctccagcacctgctgggtgaggcggcccaggacttcatccgggatgggtgccccgttgacctgcatccgctcgtggaagcggtaaaggtggggagaggtgaacaggccagcgcgcagcccagcctgagccaggatggaggctgtcatggccgcggtggaccccttgccattggtcccggtaatgtggacgaagcgcaggcggcgctcaggattgcccaggctggccagcagtgcctgggtacgctccaggcccggcttccggccggtccaggcccgctgatggatcagttcaatggcttcctgtcctgtcatgaaggagtccctccctgctttaagtgacaataccaaaggagcaaggccagcccagcaccccccaggatgttgcccagggtgacggggaccaggttggaggcggccccggtcagggtgagaggggccagatcgacgcccgcggctgctgccagcgaggcgtactgggggacagcggcggccattagggccgcgccgatgtaatagaggttggcaacggagtgctcaaagccgcacaagacgaaaaagcagaccggaagaaaggcgcccatcaggcggcccggtgtctcccgggcggaggcggcggccagcacccccagacagaccagcaggttgcacagcacgcccaggcccaaggcgctgccgaagggaagggcgcatttcgcggccccgacccggatggtgtatacggccagggccccggcggagtagtccagctggccgcaggagacacacagccaggccaccagcagcgagcccagggcgttcccggcaaagaccagcgcccagttgcgcaccatcaggaccgccgatcccccctttttctccaacagagtgagggggagcatgcagtttccggtgaacagctccgcaccggtgacgacgaccagccccagaccgaaggggaagagcaggccgcagatggtccggacggtccaggtgtctgagatgccgtagaccgccgtgttggtggcggccgcggcgatggcgatgatggccccggccagcgctcccagcaggagcaggctggcggcggagcgctccattttcctgacgcccgccgcactgtacgaggcgagcaattctgcgggggagaggtagttgttcatgatctcctttgttccagagaccggcaggccgcctgggccacatgcagggccagcacggtggaggtcaccgcgcccacgcctccggggaccggcgtgatggcagccacgatgggctccacctcgtcaaaggccacgtccccatgcatggcgccgtccgggccgatattgacgcccacatctaccaccacctggcccgggcgcacatagtcggcccggatcaggtccaggcagccggcggcggagatgatgatgtcggcgtcctggcagaagctgcgggtgtcctccttgtctgtgaagatgtgacagacggagacggtggcctcctccttcatcagcagcagggcggtgggcaggcccacggtggcgcttttgccgatcatagcgatcttcttgcctttcaaggggatatcatagtagtggagcagttccaggcaggcggtggcggtgcaggggggaaagccgatgtcactcttggtgagcaggccgcccatggaggcggtggtgatggcgtcgatgtctttctccggggccaggacgctggtcaccgcctcggtgtccagatggggcggcagggggcggaatagcaggcagccgtggatggagctgtcctcgttcactgtccgcagggtctggatcagctcctgctgtgaggcgtccgcgggcagcaggaagcgccggacggcgatgttcaggctttccgcccggcggatagccccccgctcataagcgatgtcctcctcccggcgtcccacccggacgatgcccagggtgggagtgacgccgcggcgggagagcttctcacagcggagccggatgtcccggcacatgtgttccgccaccggttttccgctgagcaaaactgccatgggtctcctccttttggtgattcgggcagggggaggcggcgtgcgcctccccctgcatgtggtcatatgctcagaacaggccggtgatcctgccgttctcgtctacgtcgatcttctcggcagaggggactttgggcaggccgggcatggctccccaccgaattttgattcggtgggggccctgtttttttagatcctcgggcgaaataaattcgccctgcggaaatcctccgctgtgcttcggatttacgccgcacgagcggcggggtgctgccgcacccgaatgcccatgcccggctcagaacaggccggtgatcttgccgttctcgtctacgtcgatcttctcggcagaggggactttgggcaggccgggcatggtcatgatatcgccggtgagggccacgatgaagccggcgccggcggagaccttcagattgcgcaccgtgacctcgaagccgctgggcgcgcccagcagggtctggtcgtcggagaaggagtactgggtcttggccatgcagatgggcaggtcgccgaagcccaggtcggtgagctgctgggcctgcttcttggcgttggcggtgagcaccacccgctcgccgtgatacaccttcttcacaatggtgtccagcttctcctggatggaggcctgggtatcatacacgaactggaagtggctgggctgctcgcacaggcggatgacctcctcggccagagccttgccgccctcgccgcccttggcccacacctcggacagggccacattgacgcccagctcattgcacttcctctctaccaggtccagctcggccttggtgtcggtggggaaggcgttgatggccaccacgcagggcaggccgtacacgttcttcacgttgtccacgtgctgcagcaggttgggcaggcccttctccagcgcctccaggttctcctggttcagctcgggcttgggcacgccgccgtggtacttcagcgcccgcacggtggccacgatcaccacggcggagggcttcaggccggccttgcggcacttgatgtcgatgaacttctctgcgcccaggtcggcggcgaagccggcctccgtgactgcgtagtcccccagcttcagggccatgcgggtggcgatgatggagttgcagccgtgagcgatgttggcgaaggggccgccgtggatgaaggcaggggtgccctccagggtctggaccaggttgggcttcagagcgtccttcagcagggcggccatggcgccctcggccttcaggtcatgggcggtgatgggcttgccgtcataggtgtaggccacgatcatccggcccagcttctccttcaggtcggtgatgctggtggacaggcacagcacggccatgatctcgctggccacggtgatctcaaagccgtcctcacggggcacgccctgggccttgcctcccaggccgtccacgatgtggcgcagctggcggtcgttcatgtccaccgcgcgcttccaggtgatctgcttgacatcgatgcccagggcattgccctgctggatatggttgtccagcatggcggccatcaggttgttcgccgcgccgatggcgtggaagtcgccggtgaagtggaggttgatgtcctccatgggcaccacctgggcccagccgccgccggccgcaccgcccttgacgccgaacacagggcccagggagggctcacgcagggcgaccacggacttcttgcccagcttccgcaggccgtccgccagccctacggaggtggtggtcttgccctcgcccgcaggggtgggggtgatggcggtgaccaggatcagcttgccgtcctgagcctgggtctcgttgagcagcttgtagtccacctttgccttgtagttgccgtacatctccaggtacttctcgtccacgcccgccgtggccgcgatctcccggatgtttttcatttcacagctctgtgcaatttcaatgtcgctcttgatttccatgggaatcagtctccttcttttatgatttatcgtggatgtctatgaagttagaagttaagggagggaacggacctgggccgccataaaggaggccgggcccgggcagtccaggtgcagcggagcgctgccggggtcctggatcagaacggcttctcctgaggcaatggtactcgattccccagcgaaagtcaaggtgccgctcccctccgcgcagtagaggatgagggtggaggagccgggttcggcggagaagctgacagggccgccgctggtgcgcaggggggagacactgccggcgcatctgtccttgcgcagcatcaggttgaagtccacgcagcggccccgggagtgggtgtccgccccgccgtcgaaggcgtggacctgatagggggccagggagatgagggggccgccgtcgtgggtcagttccatctctccccggagaggggcaatgagccggtggtagtcggggaggggggtgaagtcggactcgtccaagtccacggtggcggagctcagccgccagaggaagtcccggtccgcatagagggccccctggggggcgatggcgatctgggtggtggtcccgccggaccactgactgatctggtagtctgcctgggtgaggtgagtgatatggggtgccatggggactcctttctgaacgaggacgcccccgcggcggttcacgccgcgggggcgtcccgtcggtgattcatgggagggggatcacagggactccaggacctcctggtagatggcgtcggccagaggcagggccttgtccagcagggcctggcccttctggcggtactcgtcggcaaaggcctggtcctggataccgccgatgttgatgagcacgttgagccaggcgccctggatggcggccttgaggctcagggcggcgcagcccaggtcgctggcggcgctggcgttgagcttgcccaccacggagcgggtcagctccagggcctggtaggccagctccatcatctcaaagggggtcttggtgcagcccttcagggcctcctgcatggcggccttgcgggcagccttctcctcgtcggtgtccttgggcatggcgaacacggcgctgacggcgttgaacgcctcggtatcccggtccatcacgtccacgaactgagccttgagctcgttccccttcttctgggactcgatggccagctcctgcacgtcggcgtacttcttctttcccacggtgagggcgcacaccatagcggtgagggcggcgcccagggcgccctccagcgcggcggcggagccgccgccgggcgcgggttcatcggaggccatcaggtccacgaactcattgaccttcatttccacaagcttcataacagtcgattctccttttgtcagaacggcttattccatgccgatcaggtggtactccatgatctgattgtggcagtcgaagtcacgggccttcagatagaactcagcgcagtcgatcatggccttggcgggggtcaggcccacgatctcgctgtccacgatataggtgccgtagcgctcggccagggagcggatcatctcatagaccacatacagaggggtgtcctcatagttgaccatgttcatggagacctgagcgatgccccggtcctccagcatgaagcccatggccttgcagctgcggaagccgccggaggagccgcggatgaccttggcgatcttcttggcgatctccacgtcggaggtggccaggttcacgttgaaggccaccaggggcatgcgggcgccgatggcggtgatgccggcggtgggatggatcttccgctcgccgaagtcaggggcccactcgggctggagcagcttctcgggcatgccctcgaactgccccttgcggcaggtggccagattgcggcgctcgggacgggtggcggagtcctcatacaggaagctggggatcttcagctcgtcccagatccgctggcccagacgcttggacatctccacgcactcctccacggtgacgcccatggtggggacgaaggggatgacgtcggtggcgcccatgcgggagtgctcgcccacatgcttggtcatgtcgatgacctcggaagccttcttggtcagctggaaggcgacctcctcgatggcctcgggggagccgatcatggtgaacacacagcggttgtggttgccgtcggtctgggcgtcgaacagggtgcagccgggcacgctgttggccacttccaccagggcgttataggcggcctcgtccttctccttgctgcagctgaaattggggatgcattccacaagcttggacataagaaattcctccttaaaaatatcggtatcaaaaatgttttgagatgtagcgcttgaaaggatcagcccaccagattagaggcggcggggacaaagaacttgatgaaagcgatggtctggggctgatagatgatgtccaccaggaaggcgcccacgatggggaccaccatgaaggcccggctggacatgccgtaccgctcagtgacggcggtcatgttgacaatggcggtgggagtggcgcccaggccgtggccgcacaggccggagcacatgacggcggcgtcatagctcttgcccaggatgcggaagatcacgaagtaggacaccgtaacgatgaacaccacctggcagatgacgatgagaagcacgccgcccatcaggctggccagctcccacagcttcagcgtcatcagggccagagccaggtacaggttgagcatcacgtcgccgatgccgtccaccagggggaaggagaacttgtagaagtggaaggtgtcgttgaggttgcggacgatgacagccacgaacatggcgcccacatagttggggaaggacatcccgatcagcttgctgacccagccggacaccatagtgcccacggccatgcacacgatgatgacgaccacgttcttgataatgtccagagcggagaggggctccttgccggcggcattgacgctcttgatatcatcgtagttggcctgatgctcctcgggcttcaggtcatacttgacgatgaggcggcggcccagaggtccgcccacaagcacgccggagatcaggccgaaggtggcggcggcggcgcccacgcccatagcggcggagtagcccaggctctcaaaggtggagccgtaagagccggctgctccgtggccgccgatcatggagatggcggaggacagcagggcgtagggggcctccaggcccaccgcggtgcctacggcgatgccgatgatgttctggaagatggagaccacgccggcgcacagccagtagacgatcagtaggatgccgcccttcttcagcagggagaagctggcgcccagacccacggtggtgaagaaggccagcatgaaggggtcctggaaggtgttggtgaagttgaaggtaaaagtaccggtggtgtggccggcgaaagtgatgaacataaagatgaagccgccaatgacgggagcagggatacagtacttggccaggaagttgaccttgtttttgatcgcgtaaccgatcagcagaagaatggaagccattgccagggtcatgattgcgtcggtgttgatgttgaggacgttttccacagtttcaaatgacataatgttaccctcccattgattctcttttttcctcggaccgctctccttacggaccgaaacactgccccggccagccgacctcctttcgccggaacagaattagacgtttctgacgccagtatagtcaaagagcatctaaaaaacgtctaattctaaaaattgaaaaaagacgccgcagtccaaacggaccgctgcgtctttgcgtgtccataatatatccatagaagagcatctgtcaagacgcaccgataaattttaggcgcatctataaaaatggcgatcatgtgggggcggttactgctcattccgccataaaatgcttgtttttgctgtacagctcagaggcacggtaccgctgctgggtggcgatgccgttgcgcaggctctgggagagctgctccgcctcgaatacgctggggacgctggaaagcaggcggaccccctgccgggcgtagctctccggggagtaggtgagcagaggggcgaggggggagcccgtccgctgctccaggtccagccggctgcggatgtgcatggagacaaagtggaggatgaccccctccagaggggaattcagccgctgctggcaggactgggcatcggccaagctgaccgccgcccgctcgtagtccccctccatggcctgataataggcggtgtaggctgaggcggctgtccggccccacagctcgccggaaactttcgcgttgtcatacccatgctgaaacagctcacgggccctgggatggtcctccaaggcaaaagcggcccgcccgtaatggacatagacccagacgccgccgggccagggcaggtctcccagcagggagagggcccgcttatagtaggagcaggcgtcggcgtactccagccgctgacggcagacccggccgtagtcacagtagacggccgccagctggagccggaccgcggtggagcggggctgtccccgcagagcgtccatggcctccagcagatagtagcggctcttgtcataggcgccctggagacagaacaggccgccccgaagccgctggaactgggcctgctggaccgggtcccgggtgcgctccagcaggcgcatgccggtggcggtgtagcgctccacctgttcagtggcctggcggtagagggcggaggaggccagcaggtagcaggcccggatgagcacccccgtgtcggggtggatgctgccgccgctgagggcgcccaggatgtcgctgccccgggcgctgtccccctggaacagggcgatgcgcccctggatcagagcggtggccagctccagacggcccaggactgcggggtccgccccctcacggcgcagggcggacagctcccgcaggaactgctgggtctgctcctccagctcctctggggagcggggggcgggagcgtctccccccaggggggagaagggctcgaaggcccgggagctgtccagatcacaggcccggatgcggtactccagagcacgcaggcggctgccggccagctgaaagtggcgggcgatctggcggcaggcgcccccctcctggggctgctccccctgggagagcagctcggcggcctggaggtggaggggctgacgctgggagtaggagagccggtcgtagaccagctcccggatgcgctggtgggcaaagcggtaggtggggtccccctcggtgtggtgctccaggataatgccccggccccgcagctcgtccagaccggcggtgagcaggcggtcattctggtccatcagctccagcagcaggcggctgggcacctcctcggagaagagggagatgagctcggccacctggagggccgctccggacaggccggagagccggtccatcaggatatcccccagggtctggagggtggcctccacatcgccgctgcggcggtaggcctgggtcagctcggtgagcagatagagattgcctccggtctcccggtggaactggggagccatgcgccgggcggcctcaccgcccagctccctgcggagcagctcctctgtctgttccggggtgagagggggcaggcgatggcggcggagcaggccgtccgcctccagcgactccagccgggccagggcagagggggagaggtcgtcccgggcggtgaggatggtcatcagccccctgccctccaggcggcggagcagggcgtcccccagacgcaggctctcctcgtcagcccattgcaggtcctccagcaccaggagcacctttttccggcgggtgacagcggagaagaggagcaggaggctgtcctccagcccctggtcccactggcgcagcgcccgggcggagactccgcccggccaggcgttctcagagcggaagagagggaacgcctggcctaatcggacctggaccgggaccgggagggagagctgctcctcctggatgaactcccgcagggacagcaggatgcggtcccagggggccagagggaggccctcctccgactggaggcagccgcaccgcagcaccagcagggcggacagatcggaccagcggaggaagtggctgatgagctcgctcttgccggagcccacctccccgatgaacagctgggagcagcggcgcaccgccccctcggcgaaggagcccgccgccgcccgcagggcggcatagagggtctcccgtcccacggggacctggggcgcctctgcctccccgggggcctgggtggtgtcgttccactggttcatgatctcgtaatagagcatggtggtgctctccagggggtccacacccagctcctcggagagctgctccttcagccgctggtacacctgggcggcccgggagtacttccgggccgcccgcaggcgctccatgaggaaggcggccatggactcgtcaaaggggtcctcccgcagatactcggtggccaagcgggcagcctcctccgggtcgccggcctccagggcggcctgggcctgctgggccagccggcccagatactgctcgtggagcttctcccgggtgcggtccagccactcgtcgaaggagaaggcgtgcttgacggcgaagccctggaggaaggggcctcggtaggcggagaaatccccctgctgggtgaagcggtcgtagtcgcagtccacctcccaggcgctgttcaccaccaccagggacttctggggggagaggagaaagtcgccccccagggtctttttcagcgtatataaggtgttgcggagatttttcaggccggtggcctcgtcgcagctctcccacagcagagagatgagctcctgccgggtggcgctgcggcgcaccagcatgtagtacagcagggcgtccgcccgcttgaagggaaaggagaccgggaccccgtccagcgtgacgctgggggtctggagcatggtcacattgagcatcagaaagcccccctctttggtctgggtccagtatatcggatttggggccgggtgtgcaactgttcccgggcaaaaatttgccggggacgcgtttttgccttgccagggggaggggaaaacactataataatataaaaaggtaaaagaggggggcgtccccgtggcccaggacagagagaggagagagacatgaagctggataaatggatcgaatccgtccccaatttcagcgaggggcgggacctgaagaaggtggagcgcatcgtggactccttccgggccaagccgggagtgaagctgctggactactccacagacccagaccacaaccgctgcgtggtgacggtgctgggccagccggagcccctgaagcgggccatggtggaggccatcggcacggcggtggagctgatcgatatgacccggcacgaggggcagcacccccgcatcggctgcgtggatgtgatccctttcatcccggtgcgggactgcaccatccaggaggcggaccagctggcccgggagatagcacaggaagccgctctgctctacggacagcccttctacctctatgagaagtctgccactgccccccaccgggtggacctagccaacatccgcaaggggcagttcgaggggctggcggagaagatgaaggaccccctgtggaagccggacttcgggccggacaccatccaccccaccggcggggccaccgccatcggggcccggatgcccctgatctgcttcaacatcaacctggacacccccaatgtggagatcgcccggcagatcgcccgccgggtgcggaacatcggcggcggcctgcgctatgtgaaggccatgggcatcgccctggaggagcggaacctggctcaggtgaccatgaacctgaccgactacaccaagacctccatttacggcgcctttgagatggtgaagatggaggcccggcgctatggcgtccgagtggtgggcagcgaggtggtgggcattgtccccatgaaggccctgctggactgcgcggagtactacctccagatcgaggacttctcctccgagcaggtgctggagctgcatatcgaatagatggacaagctgagcggcccctctgtttcagaggggccgctcagcttgtcgaaaaagcctcgcagagttcgcgcccgcaggcgcgaatccagttctaatccgttttccctggcgacctgtgcgtcggggaaaacacttctcaggctgcaagtgtgggttttgtccgccgcaggcggacaaaacctgcgcgtggcagactgcatccttctcgaaaaagtggcttttccactttttcgacagtctcaggagatctggatgctgacgccgttaacctccacgccctcgttggcccggatgagaatgtaccgggtgccctcgatcatgcgggtctccaccaggtcgctgcgctccgggttgacgtggatggtgacgtcgggagtgcggacctccagctgcttggggtccaccagattgcgggggctcaggccggcctccgggccgaaggcctggtcatactgggcctcaaaggcatccacatggggggcggccacgccgcaggaggacaggacggaccgcacctcccccttggagagcaggaggggctgctcctccttgctggccttgtgctcttcaatcatgtcccgtagctggctgtggacggcctggaccacgtgatagctgcaatcctccgccagcgtctcccccaggagggattcaaaggtctccttctggacggcggcaggcatgggaggaggggtgcggaacagggcgtcaatgagctccgggtggttctccccgatgtcccgggagtagtagagggcattatagaggttggtggtgcgctcgtcaaaggcggggaagaggaagcctgcctccggcggagagacgacccagtccgccttcaggtcgtggaaggcattttcatagacaaagtagctcagggcgggcttggtcagcttcaccgggcagatggagcacaggatgtaggagaacacctggtcggaggcgtcgtccatccgctccccgtctttggcccggtaggggacgtcgtaggtgtcgtgggccaggaggatgagatagttcccctccagggtgagggaggagatgacccgctggaacagggcctgcacggcctcttcgtccgccagggaggagccccgcagggccatgaggagccggtgctcctcgctgtccaccacctgctgggtggagaaggtgatgtccgccaggtttttgcccagggtgccggacagggtgcgccggaggatggccagcagcttttccgactcctcctgggacatcagccccagggactggtcgaactgggagacgatctcccgattttcattgacataacatccgcggatgtgggagatgccgctcctgtccggccgaaaccggcggcggatctcggaaatttccttttcgttcatagagactccttttgtagatggattgttttgtatctgcagtcagaagggggcgcggacaggaataagagtgtcctgaagggattgggtttggagatagcggtccgggtgtacgccgaagaactgctcaaaggagcggataaagtggtacacatcatggtaggctagccgtttcgcgatctctgatgtggacatatgactccggagaagataggtcctggcagtgcgcatccgacagtagatcagatagttgataggggaagtgtggtaggcgttggagaacacccgggagatatgggaggcgctgaggtggaaggtctgggagagggtctccatggtcaccttttcgtggatatgggtctgaagataggtaaggatatcgttggcatactccggaaaagaggtcctgaccaccgtaccggaggcccggagctccgggaggaccagctccaaaatagagaggactagggcctggaccgggcggtctatctgtccgccgttttcaccggccagctcctgaatgatgtccagaagccgctggactgtggacatcttttcaaagggggcgcaataagcggggcccggagccagaaggtcgttccaggcggtcagccgttccgctggaccggtgaaccggatggcataatgtgtggagtccctatcatcgtcgcactgaaaacaatgaggagtcttgggcggaatggagacaacgctcccggcctgcagcgggatagtacagccggggaggtttaaagagaagtgccccctggtaatgaaggcgagctcatagtccgcctcgtgaaaatgcggatacacagtccagggaacgggaacagggagataactgatctgtgtgatgtgataaaaaggaaatccctgatggggatctcgttcctcagaagtgcgttcaaaaagccacatgggtctctcacatcctttgacgagttccaattataatggatatgacggagaaaatacaagaaaaagggcagaattatttgcgacatgataggatttttccaaatggaacgggaggaggggagacagacgggagaaaacagcggatcgatgataggattttaagcgggaaggcgaacatgtgcagggacaggtatggtatgctttgggaaacagcaggatcgctgctgacgaaagaaaggatgaatgaacatgagtctcaagcacaaggtactcagcgggctgatggcggctgcactgtcggcctccctgctggcctgcagctccgcccccgcacctgccgcgtcctctgcacctgcctcctcactcccctcagtctctcagcagacggagacgcccagctatgcctatcagcggggaacggtgcagaacacacgctatggcactctggaaggattttctgaggatggtgcgctgcactggttcggtgtcccctatgcccaggcgccggtgaacgaactgcggtggaaagcgccccagccgctggagccctgggagggcactttggacgccactgagagcatggtcgccagtcagaccgcaagcgtacaggccagcaaagacaaggcgggcaacggcacagtggaggccacaaccgccctgctgggcagtgaggagggggcggtcaccctggacatcacccgcccggacacggacgagaccggcctgcccatcttcttttatatccatggaggcaacaaccagactgggaaaagcgcggctttcccggcgactcagttcgcccaggaggtcaactgtgtggtagtctcggtgaaccaccgtctggggctgctggggtacaacgcgcttcccgccatccagacaggtacggaggaagaaaattcggggaattttggactgctggatctggccgccgctctggactgggtggcggagaacgctgagagtttcggcggagacagcgggaacatcaccgtcaccggctcctctgcgggaggccgcaatgtgatggccatgctgatctcccccgtgtttgagggaaaattccagaaggcgatctcttacagcggcggcatgacagtggccgatatggaggacagccagcgggtagaggccagagcgctggcaccgctggcggtggagaagggggtccagtctgacgaggagtccgccgcccagtggctgctcaccgatggagaggacgtgcgggacttcctgtacagtctgtctgatgaggagctggccgccgctttcggcggcgcgggcatccgcatgagcgcgttcccccaccactttgccgacggcgtggtgctgcctaaggaggggttcgataccaccgtttacaacgacgtgcccgtcctcatggtcaacggtgaccgggaattctctaccttctgtaagagctctcctcccttcaatacccccagcgtggccgagctgatgaaagatgaggtcctgctgccccagtatcgatttgccgagaagtacggcagcctgatgtacggatactttaacggggaggagtctgccgagcggatgctgggcagcggctatgagtccccaatctacacctgtatcatccgctggggcgatgatccggcggtggtaggagaggagtatgctacaatctatggatcttatcattgcatgaccactccgctgatgacccatgtgctaaccaatgcctcttccagctatccggagctctatgcctcccccagctgtcaggccgtctcctccatgctcaacacttattataagaatttcctgtggagcggcaatccaaatggtggggaactgccccagtgggatgcctggaccagtctggacggcaccactcagctgatcgtggacgccaatgacgatggggcttgggccgagatgtccaccgaccacatctcctatgccgagatcattgagaggatggaggcggaccactccattcctgatgaccagaagaccgagatgatccggactgtcctgaatggtcgctggttcagcggcgaaatggatgcatattacggaaatgaggacctctgggcctgaactgccgtacaaaatgtcccgcgagctctgctcgcgggacatttttgtgtccggcgctcaccgctgccgggccagctccttgcggacggcctgggtgaggatatcctgcccctcaggggagcgcagggcctcctgtaccgcggcgcggatcatatcctgaaacgccttgctgtggaggaaggcgtcaaacaccgtgccctggtcctggccggcggggccgctctgggggacgggccgggcggcgcggcggggcgggggagcgggctcctcctcatcctggaagccgccgtccatccaggtctcctgacgggtgcggtcgttgctctccccccggagatagaagagggagaccccgaaaaaggcggccatcttctcctgctgctcccgggtgggggtctggcggccggtctcgaacttttccgccgcatttttgggaaagcccagggcctgggagagggcgggacggctgagaccccgttcggtgcgcagggcttcgatgcgctgtgccaatgtgatcatagaaaagacctcctcagtggaatggctctattatacaacaagagggacagggggaaaagaggaaaagaagggggcggtcatttgacccactcccgggcgaactggaccgcggcgtccaccaggggggaggccgcgtcccggcgccaggccacccccacctccttgacgatccgctcctccagtttgatctcccggacgccggagagggtatgggagcggaagtcctccgagggcagaaaggccaccccaagcccgccctggaccatgtagaggctggtggtgggactgctggagcggcagacgatgtccggctcaaagcccgcccggcggcaggcggtgaggcacagctccgcggccacctggccggtctggtggaagatgaagtgctccccccgcagctcccgcaggctgacgtcctcacgaccggccagggggtggacacgggggaccgccaaggagtaatggtcctcccccagcttgacgaactccaggctggaggccagctgggacagggggcggttgagaaaggccaagtccaccttccggtccagcagcagctccagcagccggtgggtcccctcctgaacgatgtttaccgagatgtcggggtaactgccgcagaaggcggagagcatgccgccgaagttgatgcactggaggctggtgatgatgcccaggttgagggagcccttgcgcagcccggcatagaaggacatctccgcctggagggcctgggcgcgctgaaggatctccctggcccggagaacaaaatccttgcccgcctccgtcagggtggcaccccggggattgcgggcgaagagggccacccccagctccttctccagcttggcgatctgctgggacagggcgggctgtcccacgtggcaggcctgggccgccagggaaaaattccccgaatcggccacggccagcacatagcgaagcgtgtaaagttccatatggtttcatgcctcccagcgatgggtcggccgccagtccccgcggcgggcggagcgggcagcaaaagcgttttttcagaccaacaaaatagagagcatctgttttgtgcaaaatgtcaaatcaaaaggaaaagcgggggctcgttccagagtggagaagggctgccaaagctcagtatccgctattttcccggatttgtcaagaaagtttggggctgcgatatcatttttaatgataccagctgtcacaaacaagaattggacttttttcgccggcggaggtagtctatgggcgaagaaggaaacaggcccccggcaaaaggctgggagccagggagaacaaaaactgatgtagaaaggattgaatgatggtgaaccacaactacttcacccaacgggatgtggaacggctggaagagcaggccgtccagatccgacaggacatcatctccatgatccacgccgccaaggctggacaccccggcggctctctctccgcggtggagatggtgaccgccctgtacttccacgtgctgaatatcgatccccagaacccccgctgggctgaccgggaccgcttcatcctctccaaaggccactcctgcccggtgctctatgcggcactggcccgccggggctactttgaccccaaggagctgaacaccctgcgtcagtaccactccatcctccagggccatccggacatgaacaagacccccggcgtggacatgaccgccggctccctgggcaacggcctgtccgtgggcgtgggcatggccctgtccggcaagctgcatcaccaggactacatgacctacgtcatgctgggtgacggtgagatccaggagggcatggtctgggaggccgccatggcagccagccaccacgacctgaagaacctggtggccatcgtggactgcaacggcgtccagatcaacggctgggtcaatgacatcatgacggtggagcccctggctgacaagtggcgcgctttcggctggaaggtggtagaggtcaacggccacaacatgaaggacgtgctcaccgccctgcacaccgccaagaccatgcgccaccccactgccatcctgatgcgcactgtcaagggcaagggcgtctccttcatggaggacgactccgtctggcacggctccgcgcctgacgacgagcagatggtcaaagcaattgcggaaatcaaggaagggggcgttgtgtaatggcaaagactcttgccacccgtatggcctttggacaggagatcattgagatcgccaagaccaacgagaattttgtggtttgtaacgccgacaccaagacctgcggtctggagaagttcggcaagtatttccccgagcgggagttctccttcggcattgccgagcagaacctggtggccgcctccgccggcatggccgcctgcggcaacaaggtgttcctggccaccttcgcggtgttcgcctccatgcgggcctgcgagcaggtgcgtaccttcgtctgctaccccaacctgaacgtcaccgtcatcggcacccacgccggcctccaggtgggcggcgacggcgccacccacgccgccattgaggacgtgtccatcatgcgctccttccccaatatgaccgtggtgcagcccgccgacgccgtggcggcccgggccctggcccatgcggcggtggatttcaccggccccctgtacgtccgtctgcaccgcaacccggttgccgacctgtatgaccccgccacctacaagttcgagtggggcaaggccaacaccgtggtggacaacggcagcgacatgactatgatcgtctccggcatcctgctgaagaaggcgctggacgcggccgccatcctgaaggagcaggggatcggcgtccgggtgctggacatggccaccatcaagcctctggacaaggaggccgtgctgaaggcggccggcgagaccggggccatcatgaccatcgaggaccactccatcttcggcggactgggctccgccgtggctgaggtggtggtgggcaactgccccgtacccatggagatcgtgggcatccaggaccgctttggtgagtccggcgacccggagctgatctacaaggaccacggcatggacgtggactccatcgtggccaaggccaaggctctggtggcccggaagggttaaaagagacaggcacttcggacagggcgctgtccctgcccgaagtgcagaaaaatgtgagaaaggatgaacccaactatggcagcacctcatgtgtgtattcttcagaccagcttcgccaagcgggaggacaccgtcgccttcctgaaggagaaggtccccggcgtgcgggtggaattcatcaccgacagcaccctgctcactgatgtccgggccaatggcggccccagccaggcggtcatcgaccggatgaccctgtacgccaaggcggcggagatctccggtgcggacctgatcgtcaactcctgctctactgtgggcgaggtggcggacatctacgccaaagaggtcaacgtccccgtgatgaagatcgacctgcccatggcccaggaggccgttcggctgggcaccaagatcgccctgatcgccaccctggagaccaccctgggccccagccagcggctgatcgagaaggtgggcgcggagcagggcaagaagatggagtgcacccagtacctccagaaccctgcctgggatgctctccaggccggccaccccgaggagcacaaccgcatcctgatggagagcatccgggagctggacaaaatgggctatgacgccatcgtgatggcccaggtgtccatgcgcgccctgttgcccgacctgaaggacgtgaagacccccctgctgtgcagcttcttctccggctacggtgccatcgccgacaagctcaacgagatcgcggcgcagaagcagtaaatcccccctgaaattcggaagaccgagacaatcaaaaaacggaggaatcgaactatgagcaagaaactggtatctgacctgttggtggactacctggagcgccggggcgtcaccaagctgttcggactgtgcggccacaccgtcatcggtatgctggacgccctttcccgcagcaagaagatcgagtacatcggcacccggcatgaggccattgcctccaccgcggctgacggctacgcccgcatcacccacaaggcctccgtggtcatgtgccacctgggccccggcctgaccaacgtcatcaccggcgtggccaacgcctccctggactccatccccatggtggtcatcgtgggcgatgtgcccagctattacttcggccgtcacccccatcaggaggtccagatgcatgaggacggcgaccagtacagcatgctcaagcccgtgtgcaagcgcagctggcgcgtggacgatgtggaggccctgccctacatcctggacaaggcgttccgtctggctgaggccggccgtcccggccccgtcctggtggacgtgcccatggacatgttctcccgtgagatggacgaggagctgtgggcccgcacctacaaggacagccacgagaccctgaagcccgccctggaccccgctgccgccaaggccatcgccaagaagctggtggaggccaagaaccccgtcctgcacgccggcggcggcatcctgctggctcaggcctccgaggagctggccgctctggccgagttcctggatctccctgtgtcccgcactctggccggccagggctgcctgtccgaccagcaccccctgatgatcggccagaccggcttctggggcctggagttcacccactccctgaccaccaatgccgacgtgatcctgggcctgggcacccgcttcggcgaggccgacagctccagctggtatcagggcgtcaccttcgatcccgataagaccaccttcctgcagatcgacatcgaccccaacgagatcggccgcaactaccctgtggagatcggcgctatcggcgacctgaagatcggcctggcccagatcctggaggaagtgaagaagatctgccccaagggcaagagcaaccccgagctgcgggcccagatcgccaaggccaaggctgccttcaaggagagcaacgcggcgatctccagcgacggccgcttccccatgactccccagcgcatcctgaaggacgtgaaggaggtcatccccgaggacg

SEQ ID NO: 13679 - DNA, 12015 bp, Unknown
  gut microbiota DNA sequence
tatcaccctgcctggcaccatccaccactcctccggcctggccaccatgggcttcggtccctccgccgtcctgggcggcaagctggctgcccccgataagatcgtgctgaacctcaccggcgacggcggcttcggcatcaacccctcctgcctggctgccgccgtggagcacggcatcgcctgcacctgggtggtcatgaacaatgccgccttcggcaccatcgccggcctggagaacgccaactacaagaccaagttcggcaccgtgttctatgacgccaacggcgagcgctacacccccagctgggccgacgtggccaaggcctacggcgtggactccatctgcatctcctccgccgacgagttcaagcctgccctggagaaggccatcgaggccaacaaggccggcaagcccttcctggtggaggcccccatggagaacatcgtggtgcccacccccggctgctggaacatcaacgacatttacagccccaacgagctggtcaaggagggcaagctggtcaagaaggagaacggccagtacgtcgcccccagccactccaagtcccacgacgcctgatcgggacatcctgtttgctacctgtcttcaatcctctatatcagccgaagggccgctccatctggggcggcccttcggctcagtttgctgaaagccttttttcagagaagatgttttgggatcgggcgggggagttcgagggggcggaagtccgcctcgaatggaaatcccaacccccgccgcccttgctccgcaagggggcggcgagcagagcgaggcgagggcttttccgccctggacggggcggaaaaggatcggggtgccggctgagggaaaagtcctccagggactttttcctcaaactgaagggccgctccagatggggcggcccttcagcatttgtactgcaaagttttacggatagagtgccaagatccgggtccagacgccggtggcaccctgggagttggggaaggtgccgatggtatagcagcggtcggcctcgatgtcccccaggttgcacacgttctctaccacgccgacgccgttgcccaggaggatctggtggctctcggtggtggtggtgtcgggagagatagactccatggcgatatagcgcactcccttgtccaccatatattgggcagtctcggggagaagataggggtagttggtgatatactcgtcgggatcagtctcccagagggcgtcatggccggtatggaagaggacagcctcaccggactggatctctccgttctcctcctcccaggctttgacatcgtctactgtgatgccgtaggagccggcgggcacatccagctttactacacaagcggggccgatcagaatgagggggtccacggtgtcgatcccaccgccagtctcgatgacatgatagggagcatccatgtgggtgccagtgtggacgcaatagctgaggacctccaggttgtgcagtccgccgtctacgccgatacggccgaagaagtcagactgggggagctggagagaggggtccgccggcatatcggcttcttgaagatgagagatgtcgaccaccgtgtactggctcaggtccatgcccagggaggctggctcttcggcttgagtggaacaggcggagagggacgccgcaatggcgccggtcagaaggatcgcagtcagttttttcatcgtaattctcctttcaatctggtccggaaggtgatatgaaatcttccaggggcccgctggaaggacttcatcttgaaatggctctaccagggaagatcctggtccagataccactgggcgttttcccgcgtgatgatatcggtttgctgataattggagaaggacagaggctcgccgtccaggtagcggcagatctcttctacggcctccagcgccatatcgggatattgaatgacagtgccgtctatgccgccagcggcaatctcctccaccacagaacgctggccgtcgatgcccaccagagccacctctccggccagcccccggcggaccagagcctggtagcagccctcggccatgaggtcattttggcagatgaccccatggagatcagggtaaacattgaggcagtcatccaggatgctctcagcgttgaggcgggagaactccccgttataggtgcccaggagacggatgcggggctcctgagagagcacctgggtgatccccttgtcccggtctacggcgccggaggagttgggaatgccggtgaggtagatcacgttccactgggcggcgtcaggaaaatgctcctccagagcggagatgagcagccgggcggcctgttcccccatggtgacgtgctcagcccccacatatccgatggtgcgggagagggaggaggactctacccggttgtccaaggtgaggaccgggatgccgcggtcgttggcatactggatcgcgggaagggggccctccatggtataggggatgaggatgatcccgtccacaggatcatcgatcagatttaccaggtcctgattctgtttctcctggctgttttccccatcgcacaggatcagctccacagatccctcggagagatcgaactcctccagaagctgaaacatagcgctgcggaagagcaggctggtggtgggaaaactgacgccgatccggtatgatccctgatccgcctcctgagaggcgggcgaggaggatgggggaagggacgtccggcaggagcagagcaggagagcgagggtgagaaaaagcggtgtcagcggtctcatggcagagaggtcctttctggtaatatggccattcgccccctttaaaagtttgctttctctctctaccaacattgtatcagaaactttttcagggtaaatggggcaatctttcattttggtgtgttattttatgccttccctcagaacagatggctctcccggtattcccgcggggtcatccccacctgctttttaaagaccttcataaaatgcttcacatcctgatatccgacctgggcggcgatctcatagatgcgcctgtggtagtccagaagggcctccttggcatgctggatgcggagagcggaaagatattcggaaaatcccatcccttccacctcggcaaacagcttggagagataggtgggggtgagatacaccagggcggcagcggaattcagggtgatgcgctgggtgtagttttcctgaagatactccttgacctgctggatgagcaggaccttgctcccgcggggctgggcgttctcgtgaaaagaaggaggttccggtccgggctcttccagagggaccgggtcgtcagggccgcgggtctgatcgatgcgctcgatgcatttgaaaacagcttcaaagagctcgtcttcggaggcgggtttgagcaggtattccaccaccatcccgctggaaagcattttcctggccgcttcaaagtcactgtaaccgctcaatgtgatgacctttgtagagctgtgccggaggaccagctcgtccaggagctgaagcccgctgaggccgggcattcggatatctaagatgagaatatcgggctgatgtttcaaaagcagggccagggcctcccagccggtggaggcctgatagaggggacggatgttcagcgtgtcccaggagatatcctccaggatgtgccggcgggggatctcctcgtcatcagcgactaataaagaatagttagacatggggctctctcctttccagagggatgcgaaagaaaacacgtgtgcccgcaccggggcggctctctatgtggatatcccggggcccataggcaatgcagagctgctcatggatattgcgcagagcgaagctccgcccctggatgggcccctcaccattgatctgacgcagcaggggccccagatcctggggcgagatcccgatgccgtcgtcggccacctgaaagaaaagcatgtcgccttctttttgaaatgtgatctcgattcggtgctgcgcggggcgtttttcaaaaccgtggacgatggaattttccacaatgggctgaaagagatatttgagtgccacaaactgctccatctccgggaaacgctggatctgaaagacaagcgagcggccgaagcgcatctgctggagctggagatagctgcggagcaggtcggccagctggtccagagggagcttgtcgctgccctgagagagactgatccggaaatatcgggacaaggtcaggatcatccgggcagaggtgtccgcgtgttcatggctggcctggctgtaaatggtgttcagagtattgtacaggaagtgctcgtccatctgggactggagaaacgaaagctcagcctgctttcggagcagctgctggacatagatctcgtcgatgagcttttgcagccgttggatcatttggttgtaccggtggaagagcaggctgatctcatcccgctggaccgggactggagcctgggcgagtgtgccctgctccatatcgctcagatggctcataagggcggaaatgggcctcaccacataccggtacaggatcagactgcccagagagatgcccagggcaccgcacagcagggcaaggagagagaaggcccgagcgccgccggagccggagaggacgatatcttccgggacacaggagagatatttccatccgctctctacggcgttatagtaggagatcagatagtcggtgccatcctcctggtaggagtaagtcccatactggcggttttgcgcaaaagcctgggaaaagcggctgtcttggccaatgttctgggacgtggaaagcgtgctcccataggagaggagcacctgtcctgcataattgctgatccagacagaaccggagtacagctccagagcggaaagagcggtctgccaggcggagtccttcagattgcagatcaggatgcacttttcctgctgggcaggacctgagaccggccggatatgggagagcatccggctgcctccgccggcggaggggagcaggtgccagacgatgggggactcaaaaacatcgtagtacatctggtacagctgctgagcatagtggtgggaaaaggagagctccttctgcccgggcagcatggtgaccactgtctctgtctcggggaacatgagatagatggaatccagggtacgcagctggcccacatactggctcagagccagggagagctggctgcgtgctttttggcgctggtcagaaccggcgtcggcctgctggtattgggagatcagagagagaaagccggggtcctgactgatctcccggctgaaatcactgacctgttccatcacatcatccatcaggagagaggccccgtagaggttggtatagatcagatttgatgtttgactcagcatattttttcgggtcagctccatggaatggtgccagaagaccacgatggggaccagaaggacgagagcgatgacagcagggatgcggaagcggatgctgcggtaccaggaaatctgtttcataggcttcctccagcaatagagtggtcttgtttgtgttctattataggtattttccggcgcaccggcaagagaaatcgtaccggcgagagaaaagggccggacggcgaaagccgcccggcctcaggctgttgaaagagtccccgctaaggtgggggtgggagaaagcggggagaataagaccgcggccggacaggatgctcccgtccggccgcgtatcgtctggggacagcttcagttccccagcatgatgttcaggatctctacgtcggtgctcttcatacccacccggcccatgcggcccactgccgcgatggtgtcctccgggtcctccatggtcatgccctcgccgggctggaagacgttgcctgccaggctcagctccagggccatcagggcgttctccaccgccaggccgatcttggccgcacagctggccttggccccgtcgcacaccatgccgcccagggtctcgatgctgttggtgatggtgtcgcagaggatctgatagatccgctcctgctcccccttctggcggagcatcatataggccacgccgcaggcggccccggtggcggcgctggtggcgccgcagtaggcgctgaggctgccgatgtacttcttctgatgcacgctgatcagattggccagcaccagggcgcggaggatcagctcccggtccgcctgccaggcccgcccatagatgacgatgggcatggtcacagtgatgccctggttgccgctgccgctgttgatgactaccggcagggagcatccgctcatccgggcgtcgctgcctgcggcggcggcggcccgggcctggaggcggacacggttcagcccgctggcattccccgcgttctccataaggatgcggccggtctccacaccgtagttgcccttgagaccctcgtcagagatggcggtgttatagtcgatctggcggccgatgagctcctccacatcctccattttcaccgtgtccgcgaattccaggatgttggccacattgaggagcatccggtccggaccgccgctctgttttttgcagctggggtcggggcggctgtccagcaggaccgtgccgtccttcttcatgtaggtgatgttgttgtggtgctcctggatctcgatctcggcggagtgtccgccgccctccagctccaccacgatatacaggttgtccacgtcctccaccagctcgcaggtgcagaagccctccttcaccagtgcctgggtggtctggatatccgccggcgtcacggtctccagcacggccagctcccggtccgggtctccgcccacgatgcccagggtggccgccacgtcgatgccgcgcataccgccggagttggggacgatgacgcccttcacgtttttgatgatgttgccgctgcaccggacccggcagtgctctggcattacgcccagcagctgccgcgccttggcgccggcataggcgatggcgatgggctcggtgcagcccagggccaccagcaattcctcccgaaggatgccgaggtgattctgataaagtgcttgatccatgctgtatcgctctcctatctggggtggtatctgaaaatgaacacttgtaaagcacaagcaaatcgaataaaataagcaagagatagacaactgtttgattggaggagacggccatgttcagtctgaccagtctgaaatgctttgcggcggcggcggaggagctgaacttcacccgggcagccaagcgcctgttcatctcgcagcaggccctgagcagccacatctccaagctggaggaatattacggggtcaggctgtttgaccggggcatccccatgaccctgaccgatgcgggacgggccctgcagaagcatgcccgggagatcctgagctcggtggacgactacgcccgggaggtccaggacatcaagaacttccggcagggcgagctgaccgtgggcatcccggtgacccgggggaccatcatgctgccgcccctgctgtccgcctttcatcagctcttcccccagatccggctccatctggtggaggggaccgtcagcgggaacatcgcggatgcgctgtacgatggcacagccgacctgtgcatcggctatcagcccgaaaacacggaggagctggcggtgacgccgctgtttgaggaaaagttcgtggtgctggtccctgaccggctgatgaaggagcaccatctggaccggaagctgggggagggcgccctgtccatggaccgctttgcggagctgccctttgtggtgcagcatccggagaccatgaacggccgggtctttcagaccctgtgccggaacgccgggatagagccggaggtggtggtctcaacccagaatctgatcacggaggcatccctgtgcatggaggggatgggggcctgtgtgctgcctctgaccttcctgtcacccgaccagcggctctccggccacgggagcacccccctgttcagccaggaggggctggacagactctctattttcctgctggataccagcgggatcggccggttccagatctcagtctgccgtctgaagagcaagctgctcacccgggcgggccgggaattcatcagcctggcccgggaaatttacagcggcgtcagcgctggtcaaataccgcctcaatttcatttcgagtcgtcccgataaaggagagcatgtcgtcgtccagggggtagcggatgacgcagcccggggtgaggatctgatgccgtccgcccaggagcttgaagcactggaagatctggttctggatggcgccccggttctgctgggtgatgtcggtccggctcaggccgcccatgaggcacttgccggtgagggcataggcctcgtccagggcgggcagggattcccaggcgtgccagttgaagacctggacggggtaatccttgaggatgtggaacatgatgtggtctccgtggcagtggatggtgttcatccagcccttcccggcggcctccagcacccgcaggtcgtagggcttgccgtactccagatactggcggtccgtacacttgtcataggagctcatctgggaggccaggaagatcccgtcggcccccatgtcgatggccgcggccaccagctgggcggtggtctcggtgatgacctccagcgccgccttgacatcgtcgccatggccctcctcgatgtaggagatcagcttcccgccgctgatcttgtctgcgatggtgatgggggtgaaggcggtgaagatgacggggacctcctcgcccttcagcttctccaggaccagctgcagatggcgcagctcccgggcgttgctgccctgggtgcaggggcagaccgtcagcttccgccaatcggcggcgcaggagatgggggtgctcaccaccttggccacgccgcccttgacgatctcggagtagtccacggtgcagccgaagtcctcgatggcgtacatgccgttgttcatggtcttgacgaagtcgaagtcatattttttgtagaactcataggtcttctgggagatggcctccgggtccagatcggtgcccggcatgtgggtccagaaggagtagggcatcttgtccggcttctcgccgcggatggcggcctggatgcgttctttttttgtcatgagatcacagctccttttttatggcgctctcgtgcgcctgcgtcaagctccggcccgcctccagcagaggcgggccggtcaggttcagccttttttgatgatgatcttgtcccggggggagttggtcaaaaactcgaacccgtcctcggtgatgagcactgtgtcgctgttgcgcaccgcgcccagctctgcgctcatcaggccgggctccaccgtgaggatcatgccgggagccaggggggccttgttgcccttggtgacggaggggaactcgtgggtggacaggcccatcccatggccgcagcggccggggaggatgctgccgaagccggcgtcctcgtactccttcatggcggcgaagtacaggtcctcgaagatggcgccggggcggagcatgcggaagatgttgtcccgggcccggagcatggcgtcataggcccgggtgcgctcctcgttcacatggcccacgatgacggtgcgctcgttctccacgttgtagcccgcgatccgcgcccagctcatgggcatggtcaggtcgccgggcatggggacgtagccggtggggcagtcacagccgtagttgagccgctcgttggacatgcaccagaccacgaaggtgtcgatgtcggcggtctccgagttggagaagccggacacctcgtactgctgatacttctcatgccagcggttgcgcatggcgtactgtccctcagtggcggcctgagcctcgctggcgccgccctccagggcctcgatggcccgggtgacacccaggtccaccagctcgccggagatgcggcacatcttgatctcgtgggggtccttgatgagccgcaggtccacagcgtcctgggcgatatccacatagcccttgacctggagcttcgtcttcaggcggtccaggaagttcatgctggcgtagtcgccctccacgcccacggtgagggggccgccgcccagaagctcccgcatggcgtccatggcgtccatggccacggcctgggtggcgccccacttgccgtagcacaggaccttgtccaccgcgccctcattgacggcgtggtcgtggcggatgcagtggaccagcagaaaggcgtcatcccgggtgaggatgaagtaggggacgtggctgatgaggatggggttgaagttgctgaagtagaacacgttctcggggcgcatgaggatggtgacatccacccctttgcgggccatgacgtcctgcatcttccggatgcgctccttgacatagccgcgcagctccgggctggagcgcttttcgtctaaaacattcatagatgacctcctgagatacacatttttcataaaaagtgagagttacatggagaaatggaccgggctgttgggacccagcggcaacccaaggaagaagtagatcaacagctctgcgaccatgaagaggaagaacgcaatgacgtaaggcatggtattggacatcagggtgccgaagccggccttcttgtcatatttctgggccagggccagcagcatgccgaagtaggcgtcagacacattcatgggattggtaactgcgtcgccgatgcggtaggccatctggaccagggcgggggagtagcccatcagcatgaacatgggcacgaacacgctggccaggatggaccacttggtggaggcggagccgatcagcagattcaagaaacagcacatcaggacgaacagaaccaggatcatccagatgggcaggccggaggcttccagagcgttggcacccttgatcgcaatgacaagccccagattggaccagtcaaagtatttcaggaactgggcaatgaaatagaaaagtgcaatataagtcgccatattgcccatagccgtgctcatggcggcggcgacatcgtcaaatttcttgaagcggccggaaccataaccgaaggcgatgccggggatggcgaacatcagggcgatcagcacagtcatgccagacatgaggggagccttagaactgatgagagagccgttttcatcggccagtacgccagtgatgcacaacacgacaatgactgcgatataggtcagaaaagcaatcaaagcggctttcagacccttttggtccataggggaagtctcatcggagatgggggaataggttccggtgtagacgccgaggcggggctccacgacctttagggtgaccagggtggagacaatgaccaagcagactgccgataccgcggagaagtaccagttcatggagggacttaaagaaatctcgggaaccaacatctgggcagctgcctcggtgaagcccatgttgatcacgtccatggaggtaattagaatattggaagcaaatgcgccggtgacagaagcgtaggccgcaaacatgccagcaaagggattgcggcccatggcagaccagagcatggcacccagagggggaagaacgacaaagccagcgccgcccgcacagtcggccagaacgcacacagtgatgaaaacaataatgatcttcaggtcagcgcccttcgccttcgccaggccgcgcagagcaacctggaaaaggccggaggcctcggccacgccgacgcccagcatacaggtcagggtcagacccatggcagaggtgccagtgaagttggtaacaaaattggtcaacatgcggataaagccatctttggtgagcaggttgacaacctctacggtctcaccagtgacggggtttaccgcgctgacattaaaaaaggagcaaattgcagaggcaagaacgacgataatacaaagtgagataaacagcagcattggattggggatcttgtttcctaagacttcaacaccccgtaaaaaccgttccaacaatcctttctttttgacttccatttccatagatggatgacctccctaagcttttcttgtaatcacacacattgc

SEQ ID NO: 13680 - DNA, 1724 bp, Unknown
  gut microbiota DNA sequence
acttttgaacagaatgttcccatctgttcatgataaagctattttagtgccagacacaaactaagtctaacagaaaaatgaaaaaatcaacaagcaattggttgtgacattgaggaagccataggtttttcccccagagcggcccggggagctgcaaaaaatgtctaaaaccggcggataaattttgtatgcttctgcatcccatgcttgtggtcaggctcccagctggggccggggctggaaaacatgagggaatatgcctggataaggcggcccggggggtgagatcttggatattccgcacaaagatgggaagatgcacggaaagagaggagttgaaaaattccccgctttatgctctaatagaacaaactttcaaaggtaggggaagcagaatatgaagtttgcgattttgggagcgggaaataccggaaaggcgtacagcgcatttttgtcccacggggggcatcaggtccttctctatgaccggagccaggagcggctggcgcccatccaggcccgggggatctccgccaccggcgtggtggaggggcgcttccctgtcccggtgaccacacagctggaggactgcggggacagcgacgtgatcctggtgtgcacggtggcggcgggacaccgcccgctggcggcggggctgaggggcgtgctgcggccggggcagatcatcctggtgaccaactgctgctggggcgcggtggaatttgatatggagctgggagcggaggcggagcggaagggctgccccatcggggagacggggggacagctgatcctgtgcagctcccccgcgccggacgcggtctatctgaagaccgtcaaaaagagcatgggactggcatgcgtcaggccggaggataccgccggggtgctggagcggctcgcccctgtattccctcagctgtgccctgcggccaatgtgctggagacctcactgaacaactccaaccccatctcccacgggccgctggccctgttcaacatcacccggatggagaacggggaggacttcctgctcttcgggacaggagtgacccccagggtggccagctttatggagaagatcgacagggagcgggtggcggtggtccgcgcctgcggcgtgtccgcccccacagagctggagatgctcaattccttctggccggagccccaggagagcctgtacaatgtgctgcacaacacgccggcctattccgtcaccaagggccccaggaccctggaccaccggtatcttacggaggacctgccctatggcctggtgccctatgtgcgcctgggccggaagctgggggtggagaccccgtgcctggaggcgctgatcgggatgttcggactgtatatggaccaggattatttccagcagggaccggaggtggaacagctggacctgtcccggtaccggtaaggccagcgggggccgcacggatgtgcggcccccgctgcagcttgtcgcccccccccctcccacgtgaagcctcgcagagttccgtcgcccgcaggcgacggaattcaatttaaatccgtcatttccgaggacatgagcctcggaaatgacacttctcatggcgggcggggcgactatttcgcatgaaatcgagtcccacacgccatgcagccctcttctcgaaaaaggcacttgtgcctttttcgagagtctccaacgggggccgcacggatgtgcggcccccgttggcccttccttt

SEQ ID NO: 13681 - DNA, 329 bp, Unknown
  gut microbiota DNA sequence
gggaacagcatttccgtgtaaaaccctacctgcaagtagtttcgccctaaccggctcatgtccttgacaatgaccgtaccaactttcccggcttcaatgtccgcaagcatggcttgaaatccgggccgctggaagttcgcgccggaataaccgtcgtcggtgtaccagcgcagattggtaaagccgttctgttttgcgtaggtttcgagtatccttttttggttcgatatggaattactctcgccttgcagctcgtcctcatgggacaatctcggataaagggcggtaatgaggttttgggtggcttgtcttaacataaaatcctccgt

SEQ ID NO: 13682 - DNA, 225 bp, Unknown
  gut microbiota DNA sequence
aggacaaagcctatcacagcccggaagctgggggacgattttgacaaggctgctgtccttgccctgcttacacagaacgcccgcagagccgcagaacagaccaaagccatacccgaataccctgtcgcagttaaaaagccgtcacaaggggaaaaaaccacaaaaaccaccccggcagacaacaccttgcagcgcatggttgaccgggaagccaagcgagccgag

SEQ ID NO: 13683 - DNA, 219 bp, Unknown
  gut microbiota DNA sequence
gctcctcctatttcaatttcagcacaaatccccagatactcaccacaatcaggaggacacccaacagaaagaaaaccacacgccggtatcctctgctgtgtcgatgggcatcccgtgtgccggtggggtcgcagagccagttccagttgcggatcgctccaattaaaatcacggccccgatgagcaccgaggcaatgtaccaatgctcttgcaaaaatg

SEQ ID NO: 13684 - DNA, 1167 bp, Unknown
  gut microbiota DNA sequence
tactcgtccatctccatccgcagatggtggtaaaaatcctcgtaccagctttcatccacctccgtctccaccttctgggccagccccagcatccggcgtttggcctccgggtcaaccgtcagtgccgtcagccatttcagccgtgtcaccgtattgtggtggctgggacagccgtaagcgtagagaatcttcttttctttcatactcagtgtcataatgatttcctccatttctttgctacggagccatacgccccgcatgataaacttgtttcctgtccgccggtctgcctgcaagccgctcctgcccggaatttctcccggcgtatcggcctctttggtgcgctcgatttctgtcctggcgtcacttccccggaggccataccccttgcagccggtcattcgattttcaaggttctgtgcctgtctgcaagaaccagtttaccgaaaaaagaggccctttcccgtatatccaaaacgtcggaaaaacacttgaaatccgcatatttccacgcttatggaatcgtgctataatgggtgtaatcactgaaaaacgataacgagagagggggctttggatgtacgcaaagctgacaatcccggagcggctcaaagacctgcgggtggtggacaagcacctgacgctggaacaactggcggagcagaccggcctgtctaaatctgcgctgggaaaatacgaaaccgatgactacaaggacatcagcccgtttgcgattgcaacgctggcggacttttacggtgtgtccaccgactatctgatggggctgacggaaaataaaaatcacccaaacacagaacttcaatctctgcatctgagtgatgatatggtggaacttttgagcagcggcaaaatcaacaaccggcttctctgcgaactggctacccacccgaatttccggcggctgatgatagatatggaaatctgtatcgaccagatcgccaatatgcgggtggagcagatgaatttggtaatggaggccacccggcagaccgtcatgagcaagtatgcacccggagaagatgacctctatatgcggacgctggaactggggcaggtgcaggaaagcgatttttacagccacgtcatgcacgatgatctggacagcatcgtccgggacatccgggaagcacaccgcaaagacaagac

SEQ ID NO: 13685 - DNA, 270 bp, Unknown
  gut microbiota DNA sequence
actggatgctggccgccaccgccaagggcaccgctctgggcctgtacggcgacctgaagctggccgccaacgagggtctgacccgcgacaacgtggctgagctggtgttcaacgccctgaccaaggctgtgcccgttcagtacaatgagctgctgggcgtgtactacaacgagaacaagggtatcctgtactccctgacctactactacaccgataccctgggctacaagaacttcgacctggtctacaagaccaacgagaacaccgatt

SEQ ID NO: 13686 - DNA, 17934 bp, Unknown
  gut microbiota DNA sequence
cgtccagctttccttactgtcgccattataccacttcttcctctcccgtccaatacttcatttcaatgaaaatgatagaggcattttatgaaaaactttttcattctttggccttttttctgtcatatggatgatttttcctctcttttcccccgaagggacaatggttatgcttgacaccggccccggaatagaatatctttataatatgtccttaaattagacccggcaccaggaatcgactccctcaggctcgactccggcttcgccaaaccatgcagggaggtggacttcttgactttgcttcagctccaatattttcaggtcctggcccgtgtcctgcactacaccagggcggcggaagagctgcacatctcccagccctccctcagctattccatcagcgagctggaaaaggaactgggggtcaagctgttcgagaaggagaaccggaagatcagcctgaccgcctatggggaacagtttctcccctatgtgcagcgttccctggccctgctggacgagggggccgctgttctggaacagatggcgggcaatctgccccaagtagccaagctgggctacttccacagcatctccgcctccctgatccctgcgctggtggagggcttctaccgggaggaggacaaccggagcatccgcttccagtttacagagggcccttcctttgatatctttaaccaggtgaaggccggggagctggatatggccttcgggatgcaccgggatgactgggccgaatcggtcatcatcatgcgtcagcccctgtatctggcggtccccagcgaccaccccctggctgcccgccactccgtcacctttgatgactttgcccgggagccccaggtgatgctggacaagcccagcagcctgcgcacccagatggaccgcatcttcgcccagcggggcgcggtgcccaacgtggtgttcgaggtgcgggagtgcaatgccgccctccagtatgtggccctgaaattcggggtgtcagtgcttccccaggttccagccatggacacggagaaggtgtccatcatccccatctctgaccaggacaaggagtttgtccgcacggtctatctctcctggtcccgctcccgccccatgtctcccgctgcccagagggtgcgggactatatcgtggagcactactccatcccggaatgaaccgttccgccggaggtccgcccggacctccggtgttttttctctccccggcacaccgcggaaaatttccgaaaaaccccgattttttcctttacagccgggccaaactatgatatagtatcccagcatggaatcatgcgtcatcctgcccatccgcttcgtttcagggtacggcccggacaagagcccggggcttcacccacctgttacgcagccctttgggcaaatcattggaaaggtggaatctcccatgatccgcaaggacgaaaagacggccgtgattgaggccaaccgcacccatcccacggacaccggctcccccgaggtccagatcgccatcctcactgcccgtatcaacgagctcaccgagcacctgaaggtccacaagcaggacaaccactcccgccgcggcctgctgaagatggtcggtaagcgccgcaagatgctggactatctgatggccaaggacatcgagcgctaccgcgctatcattgccaagctgggcatccgtaagtgatttgttgaataaggggtggcgcgcctgcgccaccctttcttcccatctgagaccaacttttcccgagggcaatgccgcttttttagcagttgaatccgggcctgaagcgggcgggcgccggcatgaggagggccttccttcagacccggattcaagtgctaaagggctggtattccacctccgggacaaaaaacttcaacaaaggagtgtagacatgtcaaccatcatcaagcacaaggaattccccaagttcaagagctggaccatggacctgtgcggccgtcccctgaccatcgaggtgggcaaggtggccgagctggccagcgcctccgccatggtcaaatatggcgagaccaccgtcatggtggccgtcaccgtctccccccgcccccgggacggggtggacttcttccccctgtccgtggactttgaggagaagctgtacgccgtgggccgcatccccggctccttcatgcgccgggagggccgtccctctctgcccgccgtgctggccagccgcctgatcgaccggcccatgcgccccctgttcccctacgacttccgcaacgacgtgtgcatccagtgcaccgtcatgagcgtggactacgactgctcccccgaggtggccgccatgatcggtgcctctgcctgtgtgagctattccgagatccccttcgccggccccatcggctgcctggaggtgggctatgtggacggtcagatcgtcctcaatcccaatcaggagcagcgcaagacctcccgcatggacgtgactgtggccgccaccgctgagaaggtggtcatgatcgaggccggggccgacgagatccccgacgagatcatgtacgccggcatcgtgaaggcccacgaggagatcaagaagcaggtggccttcatcaaccagatcgttgccgaaatcggcaagcccaagatggagtatgagcacgctcagttcaaccaggagctgttcgacaagatcgtggccgacttcatggacgaggccaaggccgccatggataccgacgacaagaatgtccgggagacccgctggaacgccatgatcgaccactggcacgagaagtatctggaggagtatccggatatggaccagtacctggaggagttcacttacaaattccagaagaagatcgtcaaggcatggctgctggagggccaccgtgtggatggccgcgccaaaaacgagatccgtcccctggccgccgaggtgggcgtgctgccccgggtccacggctccggcctgttcacccgcggtcagacccaggtcctgtccgtgtgcaccctgaacaccctggccgcctcccagaagctggacaccatctgggaagagaccgagaagcggtatatgcaccactacaacttcccgccctactccgtgggcgaagccaagccgccccgctccaccaaccggcgggagtacggtcacggcgctctggccgagcgggccctgctccccgtgctgcccagccaggatgagttcccctatgccatccgcgtggtctccgaggtgctctcctccaacggctccacctctcagggctccatctgcggctccaccctggccctcatggacgccggcgtgcccatcaaggcccctgtcgccggcatctcctgcggtttgatccaggacgacgacggcggcttcaccaccttcatcgacatccagggcgtggaggactttcacggtgagatggacttcaaggtggcaggcaccaaggcgggcatcaccgccatccagatggacctgaagaacgacggcctgacccacgagatcatcaaggaagccctggacatcacccgggatgcccggtacgctattctggacgagatcatgctcccctgtatcgccgccccccggcccgaggtgagcaagtatgcccccaagatgatcaccatcaagatcgaccccgacaagatccgggaggtcatcggcaagggcggctccgtcatccagaagatcaccgccgagtccggtgctcaggtggacatcgaggatgacggcaccatccacatcgcctcccccaacgccgaggcctgtgacgccgccaagaagatgatcgagaccatcgtcttcgtccccgaggtgggccagttgtattacggcaaggtggtccgcatcctccagttcggcgctttcgtggagctggcccccggcaaggacggcatggtccacatctccaagctggcggagcgccgggtggagaaggtagaggacgtggtcaatattggcgacatgatctgggtcaaggtcaccgacatcgatgacaagggccgggtcaacctgtcctacaaggacgccctgcgggagatcaaagccaagcaggccgccggtgagagcgtgaaataactatccacacgtgagtttggcggcggagtgcgggcactccgccgcctttttctgatggggacaaagctatgggctattctgtgttaagcaaatatcgctctgagctgatgggggccgccatgctctgggtgatgctgttccatgccgctgatctgaccttccccatccccgggctggacctgtttcgggcggcgggcttcggcggggtggacatcttcatcctgctctccgccatggggctgtccctctccctgagccgccgggagcaggaatacggtgcctttctggtgcgccgggcccggcgcatcctccccgcctattttgtggtgatggttccctacaccctcttcctcattcttcggggacaggcccccctctccgccctggtgtggaactccaccctcctcgcctactgggtccatacccctggggccttcaactggtatgtgtccggcatcctgctcttctatgtcctcaccccctggtgtttccgccggctgcgccgctccaggcaccgggtgctgtggacggcaggggccggcgccgcggcggtggctgtgtgccacgtgctgatccaggacgagtactggcactacctggacgtcttttaccgcttccccatcttttttctgggactgctgatggggctctatatgtgggaggaccgccggctgggcaggcgtgatctgctgttctggaccctgtggctggcggccggcctgtgctacctggccgcggccctgccccggctggaggtcccccacctccccatgtgccatctgtttctgttcaccaccgtccccatgtgcctggcgggctgcgcctgctttgaacacctgcccctgggatggctgcgccggggactgcggctggtgggggagcacagtctggagatctatctgctcaacgtcagcctcttctccgagactgccctgctgcgcagctggctccctctggggactggcccctactatttcctcgcctttttcctgaatatccttttgggcatcctgctccaccggggggtggaggccgggatgcgccgcatccaggcccgccgggccgattgatccgcaaaggaggccgcactatgggaaagatcaaacgtctgctggaccgcttcgacgagatgggccgctaccccatccaggagctgggctactcccgcacatggctgatgttcagctatctgggggcctttctggtccaccgctgcaccatcgccgactacttcctctaccacttctatgagcgcaaccgccggggccgggcagaattcgtcaccctgtacgacatgcgggatatccaccgcaagaacccccagaccgccttcgccgactttgaggagaaggaccgctttctggaccggttccaggcctatgtgcaccgggactggatcggccgggtgtgccggaacagccgggaggaattcgacgcctttgcggaccgccatccccgctgcatcatcaagccccgcactgactccggcggccacggcgtggagctgtgcaccatcactccaaacaaccgggatcaggtgtgggagcggctcacctcccaggatatgatcgccgaggagctgctggagcagtgcccggagatggccgccctccaccccagctcggtgaatacagtccgggccctcaccatccggggaaagctttgctccgccgtcctgcgcatgggggtgggcggcggctttgtggacaacggctgctccggaggcattttcgccggcctggacgtggacaccggcatcgtcaccacccagggggccgatctgatggagcaccgcttcctcctccaccccaccaccggcctgactatccccggctttcaggtcccccagtgggaacaggtgcgccggacggtggaggaggcggtgaccctggtccccaacgccatcatcgtgggctgggacgtggccgtcaccgcccagggtcctgtgcttatcgagggcaatgcctatcccagcgtgcagatcatgcagacagccgggatgcagggactcaagcgcctgtggaacagcgccctgcggggctgaccgccttctgcccgggcgcggaggccgaattttcggcccccgcgcccttcttttcgtcttttttcttgattttccgaccattctgttatagactgtctaagacttgccaggataggtggctgcctcccccgcagtcaatcttttcgaaggagagatctatgtaccgttccattaccctgcccaacggggcaaagctactgaccgaattcgtccccggagcccgcaccgcggccctggggttctttgtgggcaccggctcccgccacgagcgcgccgcggagagcggcgcggcccactttattgagcacatgtccttcaaggggacccagcggagggacgctggcgctctggcccgggagaccgacgccatcggcgggcagatcaacgcctataccactaaggagctcacctgttactatgcccggtgtctggacagccacctgcaccgggccatcgacctgctcagcgacatgctgttccactcccgttttgctcagggggacgtagagctggagcgcggggtcattctggaggagatcgggatgtatgaggataccccggaggacctggccgcggagcggctggccgccgcggtctaccagggttccccgttgtcccgccccatcctggggaaagcctccaccctgaacaagatgacaggggagagccttcgggcctatcaggaggcccactaccgccccggcaatctggtcaccgccctcaccggcagcttcaccccccaggccgtggaggagctgcgcgccatcctctctgagctggagcccggccacgtccccagctgcaagggggcccgctaccgccccgccttcaccgtccggcgaaagcccacagagcagaaccacctgatcctggccttccccgccttcagctatctggacccccgccgttaccagctgctgctgctcaactccatcctggggggcggcgtctcctcccggctgtttcaggagcttcgggagaagcgggggctgtgctacaccacttactcctatgtagccgaccacgccgacaccggcctgctgggggtgtacaccgccctcagccccgagctggagggggaggcgctggatgctgcctgcgccctgctccgggagctggcggagcacggccccacccaggaggagctggagcgggcccgggagcaggccaaggccagcgtgctcatggggctggaatccattcaggcccgcatgagccacctgggcacctcccagctgctctacggctctgtgctggagcaggacgacatcctggatgcctatgacgcggtcaccgtccctcagctgcggcagatggcggagcagatctttgacttctcccagctctctctgtccgcggtgggccgggtacccccggcggaggagtacgcccagctgctttccccctgactctccctcccagttctgtctcagaccaaagcccggggcggcacatcagtgccgccccgggcttttacgattttaccagcttttccgccagcttcccttccgcaccagaaggacagccgacaggaccagcatgggcatccccgccagtatgccggtgacggcaggaccccagatctggcgcactgccccttccgccccccggaacagcagagcgacctgtgcggcggcgttgatcgtcccgtgggccagcgccgccggccagagggaaccgctcctctccgacagccaggccaggaaagtgcgtgccgaggtggtaaagaggcacatccccagaatccccagccatgggaagccgggatagctggtgccatagttgtgtcccataagattgatcggtgtgtgccacaaaccccaaatcgcgcccaccagcaggcaggcagggagggtggacatcctctgccgcagggccggatagagaaacccccgccagccgatctcctctcctatggcaaagaacagattgatcaccggaccgtagaccagtacccccagcagcagggataccgccgtgcccctagagatccccgcctgttccatcattggcgccaaggctggaagcgtgctgtcaaaatcccggggatatacgccaaaatagagcagcgcacccaggactgcggcagccagggatagggcccaggcagccagataccacttccagttccttctcagggcgggccgcagggagaaagacagcaccggtctgcgcctccccgccagccacatcagccacaccgccaaggcaggcgtccacatcaccaccgtgttgagcagctgagcagtgacagcgcccgggggcatcattccacacatcagccagatcccccacgccgtcccataggagaggagcagatatccccccatctccctgcccccgggccgatcggtcatttatacttcaccgccgtgccgtaggcaatgacctcagctgccccctgcatcacagaggaggagccgtagcgcacgttgatgaccgcgtcggcccccagggcctccgcctcatccaccatccgcttcaccgcgatctgccgggcctcgttgagcatctccgtatagccggtgatctcgccgcccaccagcgtcttcatacccgccatgaagtcctttccaaaattcttggactgcaccacagtccccttcaccatgcccagtgcctcgatctcttttccagggatatattcaatatttacgagcagcatccagctctcctccttcaatttctttcattcgttgcttcagcacgatccacacggctgggatggtcaccaggtcgcccactgccaggatcaacaggagcagccgcagccagtccagcccctccagtccggccagctgggatctgccccacagcaggagcagtgccatggccagctggaccagggcaaaaaaggccgcgcccttcctggcgtccttcttctgggcgcgctggcccgggtcaatattttttggcatcctcttcctcccctcttttaatttccctcagccgctggatcagggcggccagcactcctcccaccaccgccagccccaccacgccgtacagggccatgacgcccaccgcgatggtatccgccccgcctgcgctgaggaaggcccacagcatggtgcctaccaggatgaacaccaccaaaatggtgcccagcgccgccaggaccggggccagccggctgggttttcggtcagtattgcttcgcatcctccgcctctcctttctcgatctcccgaaatcgctggatcatagccagcaggacccccaggatcaccacgcccgggatagccaccagcaccaccagcaggggcagcgggggcgcatcctccgcatcgatggagaagccccacagcatcagggcgatcagcccccccatcaggaacacggtgagcagcgtcaccaccaccggggccacataccggatcctgcgggtgtctccctgctggcggtccagaaaggtagccccctcctgctccatctgttccatctcccggagcagtccccccgcgtccagactgtccaaccggacctcccggtccttcagcgcctgacagaactggaccgcctggtccagattcttccgctcccgctccagcgtgaccagatgccggcgcatcccgtcccccagggtccggctgcccgtctgcatctgccggatctcctccagggggactcccagctttctcagcagcttgatctgccgcaggagctccacctccggctcaccgtactcccgatagccgttctggctgttccgtcccggcttcagcagcccctgctcctcatagaagcggatgttcttctttgtgatgcccaccagggcctcgacttcgttgatcttcatcggtatccccctcgctctgtggttaggttataccctccagcgaggggaaggtcaagcattttccgtcatttcataaagattttttctctctctgccgccagatccaccgtgccagcacggccagggccacagcccaaaccagcgccaccagctccacccccgccaggggcatatgggccgcggccaggatggcacaggcgtccacccccgcgtggagggcaatggccgcggggaagagccacagggacgcccggcgctccacagcccgccagaccagcaccgacagggagatgtggatggcaacggccacgatccgctccagcccgccccacagataggtgtggggcggcgcggccaccgcagccgccagcgcctgggccgccgcgtcatccagctggcccatgtgctgctccagcgtgcctgtgttcagccagaaggagagcagcaggttgctgacgttggtcagccccaccagcagcaccgcctccatgccgccgtggcccgccccgtagatcagggcgtcctggggcgtgccccccttcccgctccgcctcagcagctgaaaggcggcaaatctccccgtctcctcaaacagccccgccatcaggcccccatacagtgcgtagagtcccagatcgcccgtaatgaccccgcccgcagggccgcccaggatgagctggtgggctctctgctccagcaccagggcaaataccagaaacaccgccgcccccagaagaaaggcccgccagcgcccgcctctccggcggaaaaacagccccagtcccaggggcaggccaaaggcgattagcagagaggccgtcatgcaggccatggcggccccgggcatcgttccgtatccttccatttttatccctcctttttcgaccggccccggcgttttgtcccggccggctttcgggcccaccctacccctttcccccggtagaaagtcaagggtttctgcaaaaaaagtttccttccccctggtggaaacttgtgtttctgccggttttacccctgtttttcccaaaaacgggtgccccggcgcgctctgcattgagatgcgggcccggagaggaaaacagcggacgcctgccatgcgcccgccgttctctatccggaacctcggccctgtacgcgccgcggtccttcctgttctctgtcagcccttctcttttacttccaccaccgtcagccgctctccccgcacctggaaacggatctcccagccggcgaactccatgccgtagatccgctccgggtccctctgataggagggccgggggtcctgggccagcacgcccgcggccgcctgccgccggtcctccggcagcagggacagccaccgctccgggaactccacttccagcagccggtccgccccgggtgcaaagccccctgtggcctccggccggcagtccccataggggaggtagggcttgatgtcaaagatgggggtcccgtccatcaggtccgcccccgccacgtggagcaccgggccctggggggtatggggctccacccgctccaggcggacggaggacagcccgacagcgttgggccggaagggagagcgggtggcaaagacccccatgcgggtattgcctcccagccggggcggccgcaccgtgggggaccagtcctcccgcaccgcctgggagaactgccagatcagccagatgtgagaaaacccctccagcccccgcaccgcctccgggctgcggaagtccggctcaaagaccactctggccttcagcgcctccaccagcccgctctggcggggtatcccgaacttggacgggaaatcattgtggatgcgggcaatgattttcataggcacagtctccatgggctctcctcctgacaggcatctgtttcgggcccctgctgcccctattatagcggagtgcaggcccactgtccatgcccctgtcactcttgtggcaggacatttcgtttcaggctggtataggccatcaagatatagaacaggtagatcaggcagaacagccccagcgccagggcggtgatggctgcggggtgatagatccccgtcatggttcccggctccaccgcgccgcccaggttcaggagaaagggaactgcaatgagcgccggcggaagggcaggcatggcgtaatagatggcaaactggcaccccagcgcccgccgcatctcacgccggtccatgcccagcttccgcagcagggcgagctgtccccggtagcggtctgtctcgctgagctgctggactgtcaggatggtagcggcggtcatggtgaggaccagcgccagatagtacaggggaaacaccaccatggcggacatggaggccgcttctgtctcctgatccgccttggagtaaagggtgtcgtagaggccctcggccgcgtcatagcggtcccggatggcacagagccccgcaaactgttccccactcaccggttcctctgtcatggcggctatggcgccgtggctgactggacagttccgggccagctcgtcgggcaccaccagcacaaagccgtgtccattggcatcccacagattctgattcagcgggcctgtctctatccccgccagctccagtgtctggccggagatccggatgggctgccggtagtccgccagggacggtcccagatagtcctggcagtggatcagatactccccagtttccagagtcactgcgggccaccccttcatggcccggagggtggcatagtcgctgaatgccatcagcatgtcccggctggaaaacttgtggtagctggcgtggtccgccagatagtcggtgacctgggcgtcctccccctgatagaccgcgtaccgccgcaccgctgtcactggaacagagcggcggatctggtcctgataggcatccagatgagcctcgtttttcgtgccgatgtacagatcaaaggcggatgccttttccatccggctctgaaacatggcgctgaaggtcatcccgctcccctccacgatcagggtggcggtgaacagcagagagaccgtggccatgacgatccccatggtggccagcttggcggtgagagtgcggaagaccagcagagtctgcccagcgtactttttcgccggacgcttttcaaaaaaggcggggacccctgaggcaaagctgagaaagaacccgtagaggaaggcgatgacgcaccccgtgcccagcaggctggggagcatcccgcccatcagcagcagaagggtccccactgcccccaggatcaccgagagaacaaagatccgccggcggctccggctcttttcgatgacttcctcctcgttccgtcggtccaggtagatcagctcccggatcttcatccttcggatgcgcctccggcctttcaagagagcaaagaggtagatgaacagaaaatagaccagggtcagccccaccgccgggggcgagaacgccagggagacccggtagggcgcgccgaacagagccagcatcacagccctcaatgcctgaaacagcagatcccccgccgccaaccccaggagcagagccgcgccgcccaccgccagattttccagaaaaaacagccgggccacctgacggtgctccagcccgatcaaaatataggtgcccagctcccggctgcggcgggagagcatgaagccggtggtataggagaccagccagccggtgatgagcactgcggccgcgctggccaggacgatcatcaggggcagagaagccagtttttccgacagatcggcgatctcccgggaaaagaccagaccgttgaaggcatagatcagagcggcggccatcacaatggtgacgaaatacaccagatagtcccgtgcctgccgccgggcgttgcgccaggaaagcttatataacgtcactgacatcaccccccagcagagccagcacgtccaggacctcatggtaaaaaaccggacgcccccgctcccctcggagcagttcgtggaacagccggccgtccttcagaaagaggacccgggcggcatagctggcgctgtatgcgtcatgggtcaccatgaggatggtggcccccatgtcccggttcatcctggtcatgatctccagcaggtttttggatgccttggagtccagcgctccggtgggctcgtcggccagcagcagggactgtccggccaccatggcccggacgcaggccgcccgctgcttctggccgccggatacctgataggggaatttctccagcacgtccataatctccagcctggccgccatctcccgcacccggcgctgcaccgtctccgggtcggtgttgttcaggctgagggccaggccgatgttttcctccagtgtcagggtatccagcagattaaagtcctggaacacaaagcccagccgctcccggcggaaccgggccagctcccggggcgggagggcggcgatgctctccccgtccagcaggatgtccccggcgctgacggtgtcgatggtggagatgcagttgagcagggtggtcttcccgctgcccgacgcccccatgatggcaataaattccccgtcatccacttcaaagctgacccggtccagcgccttggtcacattgtttttgctcccgtagtatttttcgatgttccgtacttgcagcatcttgatctcctcctttgctgtcccttacaggatactgcaagaccggccccactggtatcggctttctatggcctcagcttacaattttgaaaggttctcccgggccggaaagaggagggtcatccgggtcccctttccctcctccgaggcggcccgcagctcgatctccaaggcagccgccagcctccgggccagatacagccccattccggtggagccgccccggctgcggccgttgctgcccgtaaagccccggtcaaagatccggggcagctcatgggcggggatgccgataccgttgtcctccactgtcagctctacccgcctccccagtgcccgggcggacagggtgacgacaggctgggcgctgcggtagcgggcggcgttctggagcagctgccccagcaggaagcatacccatttcccgtcggtgtagaccctctgatccagatcccgggtctccacccgcaccccgctctggatcagcagggccctgtggctctggagggcctggtccgccagctcctccaggctggtctcccggatcaccaggtccttttccggactctccgccctggcatagaacagggcccgctccacgtgggcgtcgatctgggccagttcccgctccagcctgcgccgggtatccggccctacggtcctggagatcaatcgggccgccgtgatgggggtcttgatctcgtggacccactgttccacatactcccgatactcccgctgggccgcctgcgcctccgacaccgcgcccaccatggcctggcccgactggtgcatcagggcgaacagctcccgttcccagagcccttccggctttggggcacactcagcaaacagctgcttctggtccagcccctccataatggcctttagctccgccaagcggcggcggagccggacgcactcccagagctgcgccagcacaaagaccaggatcagccccatcaggagcagagccaccacgccgggctgtgtcccggtggccagcaggaagagggcggaggccgccgcgcaccccccctggagcacaatccgccccagccggtcggacagaaaatcagcgatcgtcatactgataccccattccccgccgggtcttgatctgctccggcagccccagctcccccagcttgttccgcagccgggtcacattgacactgagggtgttgtcatcgatatagatcctgctgtcccacagcgcctcaatcaggtctgcccgggacacgatctccccggcgtgggccatcaggtgggccaagatcttcagctcgttccgggtgagctccgcggtccgtccacttgcccacacggtccccctggacaggctgagccgcactcccccagcctccaggatgtccggctccgacggacctccgctgcggcgcagcaccgccttgatcctggcaagcagaatggggatgctgtacggcttggtgatgtagtcgtctccgcccagactgagcgcccgcagctcgtccgccgccgagttccggctggtcaccaccacgatggggaccgggcatcgtctccgaagctcggcgcacagggagaaaccgtcccgcccgggcagtcccagatccagcaggaccagatccggcccaaaggtccccgcctgccccggcacgtccccaaaatccgtcaccgccagagcctgatagccctcattctccagcaggagggccagctcctcccggatggctgggtcatcctccacgatcatgatcttccgcatggtctccgtccccctctacatcccgtttggcgctattgtaccacgcccaagcccgggcgtctacgctgctccctggcatattgccgccaagtcaagccctatcttccttctctgaagccccttgcccctccctgccgatttcctgttttctaaagcgcagccggcaaaatatactttctacgggctccagattttttgtttctcggcattttcacaagaactactgctttcccctgtttgttttcttttaaaagacaattgtccctccttagattacgatggtaacatgtgcctctctcatatgtgtctatttcccagttttttaccaaagcttcctttatatttcttcagtctatcagaaaaataaattttacgttctgcacagatttcttattcatgaatagggtcacacagactccctcccttattttgttaaattttagttttgacttcccccttttttcatggtattttgttttgcgtgcctcccagacaagatgcactctttcagatactggcagacaattacttgatacaggaaaggatgactcaaattatgaatccccctacttcctctctcaaaaagggctccaaagagtcccttacttctgtaaagagtgaggagcctcccagttctccggccacgactcatatttccattcaggtcacccatcgctccagcaagtctggccgcagccacattctaccccttctgctcctgatcattgcggctgtccttcttcttttccttctgaccgtttttcctggttctgtttccgtgtttttttcgctgaatacataaagggtatcctctatttgaggacacccttccgaaaatccaaatttttacccgaaagaccgattcgtaaaataattccggtctttcgggtacattaaaccacaaaccaaaccgcactccgctggaataaggaggcgcaacgactgagcacgctctctaactgataaaacaaatcggagcaagctttgtatcgcttactccgatgtggagctgctacccagatttgaactggggacctcatccttaccaaggatgcgctctaccgactgagctatagcagcatacgttcccccaatgggggttatattagcaacaggtaaaacctgacatttttaaatggcgactcggaagggacttgaaccctcgacctccggcgtgacaggccggcgttctaaccaactgaactaccgagccatttaatcaatataaaaacagatcactctgcaactctctggcaggggcagaaggaatcgaaccctcggcacgcggttttggagaccgctgctctacctgctgagctatacccctatatggtgggccttcacgggctcgaaccgtggaccggccggttatgagccggctgctctaaccaactgagctaaaggcccattaaccgttcacacgttattttgaaattacggcttgccgtcacgagcaagtggcggcaagccgcatttttggctccccaagttggactcgaaccaacgaccctgcggttaacagccgcatgctctaccgactgagctattgaggaatgtaaaagggtccggtccggttggaccggacccttgtgtaggcactacctattttcccagcccgtctccaggcaagtatcttcggcagaagcgagcttaact

SEQ ID NO: 13687 - DNA, 4162 bp, Unknown
  gut microbiota DNA sequence
aagggcatggccgccgctgcgcggcggtgctccgcacccttgacagggggccccggctgtgctaccccccaaggcgcgacgggggaaaatcctccagagccgcccccctttccccaagaatggggaaaggggcggggggaaaagaggttgaccgctcctctccaaacaatcctgttgtacctatccccaacaattctatctacatctgaacggaggttatcaaaatgaaaatgcccctggcgtatgtcaccgccgcatggagcggcgaccccacggaggcgacggaacaggccgcccggtactgtcgggccgtctatgaggcgggtttttcgcctatctgccctacgctgtatctccccctgtttctcaatgacgcggtgccggaggagcacaagagcagcattgacatgagccgggacctgctgcgccgctcccgtgtgctggtggtgtgcggccacgctgtcactgagagtgtcaagaacgacatcgccgttgcccagcggttgaagatcacggcgaccaccctggagggtattctgaccgtaaagggacagggccgccggacgtgctgaccctgggcagtctctttgacgggatcggcgtgtttcccctggccgcccggcgtcaggggatcatccccctgtgggccagcgagatcgaaaaggcccctatctccatcacaaaacgccacttcccggacatggagcacctgggcgacattacccggctccacggcggcgaggtcccgcccgtggacattatcacgtttggctcaccctgtcaaaatctgtccagcgcgggccgccgtgaggggctgggcggggcaaaatccagcctgttcttccaggcggtgcgcatgattgaggaaatgagggatgccactggaggtcaatttccaactatcgttatttgggaaaacgtcatgggagctctgctatcaggagacaggctggattttagagccgtcctgcaatctctcacagacgccgaaattccaatgcctgcttctggacgctgggccagcgccggaatggtgcgaggcggacagcgtgacctgtgctggcggctgctggacgcccagcattgggcagacccccggctggcccggcgtcagcgggtgtttgtcgtggccgatcttagaggccgacgtgccggagcgatcctgtttaagccccgccgcctgttcccgatacctgcgccttgcggagactttgggctgccccccgccggagcggatcgaatatctgctgttgaagcaggggggccgctaccagtcgtccacccctttcaaggctaccgtatgcggggcgcggccaaggcgggggacgttgggaacttcctggggagctttgggaaaccaactgacccttttccaaccctaatggccggggggctgacggtgtttgccctgtggcgggagggccgggaggcggagggtgtcattacctggctgacccccacggagggggagcgggcgatgggcctgcccgacggctggacggcctacggccacgacgggcggcctgtctccgcccgcgcccggcaaaaggctttgggaaattccatcgccctgccctgcgcggagtacatcatggcgggagtaaaagaggaactggagggagggatcaaatatagcgatacttgaagcctgcgtgacgaacctgggcaagtacaacgagggggtgcttgcctatgagcgggtaacattccccaccgacgccgaaaccgtacagacagctttgaaaaatatcggcatagacggcattttgtatgaggaaatttttattgccaactatgaaagcgatatagcggggttacgggaacacctgggcgagtatgagagcatcgacgagctgaatcatctggcctgtgtgctgtcggagctggacgagggcgggctgaaaatgtttgaggccgtcatggacagcggcgagtacaccagcagcgtcaaggatttaatcaatttggcccaaaacctggacgcctacattttttatcccgaaattgacagcgaggaggccctggggcggatgtatcttttggaggtagacagctcccaggtgccggagcacctgatcgactacatcgactatgaggcatacgggcgggacgtgcggatcaatgaggacggccattttgcccccggcggctatgtggtaggggatcacggctctttcgtggagcactaccacgggcgggaggatattcccgacgagcagcgggtgttctccatgcccaagctgcccatccgggagcagatggccgcttatcaggaaatggcggatcgggcggccccgtccgctgaacggcccgcgcccaaggcggaccgggaagatcggtagtcctctggacacggtgtccagaggcggcccggcggcaaataggaggtggtatatattgtagatgaagatatttcccggcggacaatcgccctctccatccgaacgggaaagctgacggcgcgggcgctggcctgggcgctgcgggcggctggccggaagatccaaaaggagcggcagacccacaagacgccccacggcagacagagcgtcaagcagctcatgaagcagggcgaggccaccaacagcctccccgtggaggcccccagggagtttgaccgggtggcccggcgctggaatgtggactacgccttttacaagaacggcgacggaaaatatctgctgttcttcaaatccaagcaggccgacgccattaccgcctgtttcggggaatactcccgccgggtgctggaccggcccagggcgcggcgcgttcccattctggagcggatgaaacgggccggggagctggtacggggccgggagcggacccaggagcgcaaaaaggaggcggtccgtgaagaaaggtagcttgaaaaaatacctcctccccaacctgccctacctgttcatggcctggggctgcttgaagctggggacggcctaccggctggcggctggcgccaacatcggccaaaagctggtgggcatgatgggcacgatcaacacggcctttgcctcccccgcccctgggctggacccggtggactggctggtggggatcgcgggggcggcggccatccggctgttcgtctacgtcaaggccaaaaacgcgaaaaagtaccgccgggacgaggaatacggctccgcccgctgggggacggaaaaagatattgcccctttcgtcgatcccaagtttgagaaaaatatcattctctccgggaccgaatttctcaccaccaacacccggcccaagaacccggccaacgcccggaacctcaacgcctgcgtgatcggctcctccggctccggcaaaacccgcttctggctcacgccccagctcctccaggctcacagctcctatgtggtggtggacccaaagggcggggtgctgtcccaggtggggtactttctccagaagaaaaaggggtacaggatcaaggtttttaacagcattgatttttcccgctctatgcactataaccccctggcctatatcaaaaatgaggcggatattctgaaattcgtgaatactttgatagccaacaccaagggcgagggcaaggagggggacccgttctggaccaaatcggagacacttttatactgcgccctgattgcctatatcatcttcgagggcccggaggaggaccggaacatgaataccctggtggacatgatctccggcatggaggtcaaagaggacgacccggattttatgaacgccattgactatatgttcaagggcctggagaagcgcaagccggactgcttcgccgtgaagcagtacaagaagtacaaattagccagcggcaagacggcccgctccatacttattagctgcggggcacggctggccccctttgacattccccagctccgggagatcatgtcctacgacgagatggagctggaccgcctgggggacaagcggacggcggcttttttcatcatcagcgacacggacacgacctacaatttcattgtggcgctggcgttctcccaaatgttcaacctcctgtgcgagagggcggacaacgtacacggaggccgcctgccccaccacgtccgagtgctgtgggacgaggccgccaacaccggacaggtgcccaacctggagaagctggtggcggtgatccgctcccgcgaggtcagcctgaccc

SEQ ID NO: 13688 - DNA, 590 bp, Unknown
  gut microbiota DNA sequence
ttctatcaggcccagtcccaatgcaaggccatttacaaggacaacgccgaaacgatcatgggcaatatggacagcgtggtattcctgggcgggcgggagcactccaccgtcaaggagatttccgaggcgtggctgggcaagcagaccatctccatgcagacggacagccggtcccgcgggcagtccgagagttacagccagaatacccaacgactgggccgggagcttatgacgatggacgagctcaccaccatgcccggcgacaagtgcattatccagctccgggggctacggccctttttctcccccaagtacgacttgaagcagcaccccaactaccgatatacggcggaggcggacaagaaaaattcctttgacctgtcccgcctgataaaccgccgcatggagaagctggaccctgacgagcaatataccgtatacgaggcggacgtgccggacgaggcgaacataggcgaggacgaggacattctcaactatgacgacctggacgacccggacgcttttgtatagcttctggcaaagggttccccgcaaagtcgaaagactttgtgggggaggaggcgcaacga

SEQ ID NO: 13689 - DNA, 354 bp, Unknown
  gut microbiota DNA sequence
gatgaggaataccagtctccgctggatatcctgtttgaacgtttggagatgcgcaatccggaaagcattgcagtcaagcagtatgccatttacaagcaggcggcaggaaagaccgcaaagtccatcctgatctccgtaggcgtccgtctggctgcgttcaatttaaaacagatcgccaatctgacctgtaccgatgaactggatctttacagcatcggggagaaaaaggtggcgctgttttgctgtatcccggatgcggataccagcctcaattatctggtgggcatgatttatagtaacctctttcaaaccctttactatgtggcggaccggaaataccatggaaaacttcct

SEQ ID NO: 13690 - DNA, 461 bp, Unknown
  gut microbiota DNA sequence
ccagcacaaagggattttcggtgagagccttgtagtcctcgggactgacatagcaatccatcttctccgccccgtcaaagagttcggaggggaagacctccacgccgccatccagggtgaagcggttgaaggcggggcctttcaggaagcccacgcagttggggcagcaggtggcagtcaggataccgtccagccccaggaaccggagccgctcatcccgtccgtccaataccagtatgtccaccatgcgtccgccgcagtgggggcatgtgtcctcccgtgcccggccaatgcggacgggagatttctcgccggtggttcctttgaccataggatagcaggtatcgaagttgagttggattctctggccctccttgtcaaaggtccagccgccgatctgcgcatagctggatgggtccacatagaggcccttgcgccagggccggggatttcgctccagc

SEQ ID NO: 13691 - DNA, 477 bp, Unknown
  gut microbiota DNA sequence
agctcgccccccacgacgcgctggacgcggccaccaggggcttcaaggcggctctggtggaggccttcggcgaggatggggtgaagtttgacgagcagaacgccggcggcgagtacaacaactgcgccaccatcgtggacggctttgtgtcggaaaatgtggacctgatgctggccaacgccacctattcgctccaggcagcccagtccgccaccgccgacatccccattctgggcaccgccatcaccaactacggcatcgccctgggcctggacagcacagaggacaaggtattgggcggcaacatctccggcacctccgacctggccccgctggaccagcaggccgccatgctccaggagctgttccccgacgcggagaacgtgggcctgctctactgctccgccgagcccaactccgtgtttcaggtggagaccatccagggctatctggaggagatgggctacacctgtaccc

SEQ ID NO: 13692 - DNA, 607 bp, Unknown
  gut microbiota DNA sequence
gcctgagccgaatcgttgatgaaccctatttcacccacagtgcctacagcgccttcaccaccggcatccaggtaaaatgccccaagtgccatggggcgggtgtggtgacagcggacgatgataacgcctatttccggtgcctgagctgcggccaccggatgacgcaggatcggacggtctaccgctatgatgtccataaccaatgcaggaactgcggcaggtactatcgggtggagattgaagatgaggcaaagcagcacttttccgttctccatgtgtcctgtccctattgtggaacaaccatgtcaggagaagttcataaaacagcggaggcgttttcatatattggcgaaatcagagatggacgagaaccttacttcggcctggaactttggtttttgacctccttccagggtaagccagtctgggccctcaaccgggagcaccttgcctatctgatcgactatctcagtgccgatttgcgggaaaggccaccgggaaaagcgaaaatgactcaggctgaccatctccccacctttatgaaaaccgcaaagaaccgggagcggatcgtgaagctgctgaggcaaatgcaggagaaatgaggatg

SEQ ID NO: 13693 - DNA, 5089 bp, Unknown
  gut microbiota DNA sequence
ccctttatttgggggcggggccggcgctctgtggaaaaatctttgcagagttcgcgtccgcacgcggacaacccctgcccgtggcagactgcctcttttcgaccgtctcgcttccccgtctcggacgcttatttcacttccaccatcacagtggggcgcttccggtatgtggccaggctgactcccaccagcaggacgccgcaggcgatggcgccggggacggtggcacccagacccatgggctcgcccaccagcttccagaccacggtgaccacgaagccccccagcatcccggccatgatgccggcgctggtggctttcttccagtacagagccgccagggcgggcagtccggccgccgctgcgtagaaggcccaggcgaacatgagcacgtcgtaggcactcttgatatacagggcgatgaccagtgcccccagggccagcaccaccgaggcgatgcgggagaaaaggatctcttgcttctccttcatggcggggtggaaggtcttgcctaggtcgctgaccaccgtctggacagagaccagcagatagctgtccgccgtgctcatcatcacggagaggatgccggacagggccagccccgtcaggccggggggcaggattttgatggccaaggcaggtatcacggcatcggcggtgccgaactcctccaccacgttgggcaggatctgctgggccgccagccccatcaggaacagcaaggcgatggtcacgccatagacggcggtgccccagaacatgccccgcttggccgactttttatccttggccgcgaaggcccgctgccacatctccgcccccgccatggtgaacaccagataggtgacgatgtcccccagtatcttgccgtcaatggcaggggtgatgtagctcttgtccaggctggcccagaagctcccgaagccccccagatagtccagactggaaaatgggatcatcaggtagacaaagataatgagcatgaaaaactgcaccacatcggtgtacaccacgccgaacagtccggaggcggcggtatagatgatgaagatggcggtggcgataaaagcccccatctcgtagctgatgcccacctgtccccccagcagcttaataatggtagcggtggcggtgacctgggcggccaccgtgcccaccatggcgaaagccaccatagcagccaggacgcatttagccggctttccgaagcggtactcgaacaggctggggatggactcgatgtggtacttctcccccacctgctgaatacgcccggcgtagccggagaagataaacatgcccagcatatagggcagggcggtggcaatggccatgaagcccgtggtgtaggcgatgcccgcccgccccatcatggcgctgcctccgataatggtggcacacacggtggcggccaggaccaccggccccagtgtgcgtcccgctacataatagtcatccgtgttcttgatgcgcttgacgaaccacacgcccaccagcagcatgaagagcagatacagtccaataatgaccagatccagagtggtgacttctaccataacaggcctcctttgtctctcctccgacccgggccgctccggcccagccggctccttcccttcctttttcaggtatctttgtcaaaattataacacagatccggcgccacggcaacaaaaatcacaaatcccgtgtgttgggtgtgcccttgaagtctcaggccccgctttttcttgacacctgccggggaaaagcctataatccccctaaactacctgacagttagaaagaacggaggataagcgctatgggaaagatctatacctcagtagagcagctgatcggggggacgcccctgctggagctgacgcatcttgagcgggagctgggcctgagcgcccgcatcctggggaagctggagagcttcaaccccggcgggtccgccaaggaccgcatcgccaaatccatgctggacgacggggaggcccggggcattctgaaatccggctctgtcatcatcgagcccacctcgggcaacacaggcatcggtctggcactggtggccgccgccaggggctatcgggccatcatcgtcatgccggacaccatgagccaggagcggcgtcagctcctgctggcctatggggccgaggtggtgctgaccgagggccggctgggcatggcgggggccatcgccagggcggaggatctggcccgggagatccctggcagcttcatccccggccaattcgaaaacccagccaatcccgccgcccaccgcacctccaccggcccggagatctgggcggacaccgacgggacggtggacatcttcgtggccggggtaggctccggcggcaccatcaccggagtgggcgagtacctgagatcccgcaggccggacgtacagatcgtggcagtggaacccgcctcctcccccgtgctcagcggcggaacgccggggccccacgccatccagggcatcggggccggcttcgtccctcaggcgctggacaccgggatctatgacgagatcatccaggtggaggaccaggacgccctggccatgggcggccggctgggccggctggaaggggtgctggttggcatctcctccggcgcagcggtctgggccgcagtgcagctggcccgacggccggagaaccggggcaagaccatcgtggccctgctccccgacaccggagagcactatctttccacccccatgtacggggactgaccctgtcctgcccccagccgccggagccctctgctccggcagccggggctctttttccgcctcttcccctcccgctctggttttttgtccctctccatataaaattcatattttcctgttatcctgtcattggggtgaacaaaatgaaccgaatcctgatcgtggaagacgagccggacatccaggagctgctctccgcctatctccagcaggccggctaccagaccagcctggccggagacggggtggaggccctggagctgttccgctccgcctcctttgacctggtcctgttggacatcatgctgcccaaaatagacggcttcggcgtgtgcgagctgatccgccaggaatcccaggtccccatcctcatgctcaccgccctggacggggaggcggagcagcttcggggctttgacctggagatcgacgactatgtgaccaagcccttctccatgccggtgctgctgaaaaagatcgccgccatcctccgccgtgccgggggtatcagcaccgcgccctcccttctccgctacggggatctgaccctggacccggaggccatggaggtgcggctggccggccggtctctggagctcaccgcccgggagttcgagctgctccacacctttctctccagccctggccgggtctttacccgggaggtgctgctggccaagctgtggggctacgatttcttcggggacgagcgggtggtggacagccacatcaagaatctccgtcacaagctgggcatcgactgcatcgagacagtgaggggggtgggctatcgtgctgcgaaggaagctccatgagagcctcactgtccgcatcttcctcattaccctcctcatcctgcttggggcgggggccatcaccttcgccctgattgcctgggccacccccatcacctacacagcggcggccagcgacgatctgcgggcccagactgacctgctggtggaacgcctgtctgtcaccgccctggaggactgcggccccatcctggacgagttcatccgcgcctccaaatcctccgtcatgctggtggacgccaatgggcacatcgttcaggacaccaactcccagctctccatccagtcggtctatgaggacgagagcacgatagtgactgtcacctccgactccatgttcaccgcatcggagatccagtccctgtggaacggggacccgcccgcagccatcatccaggaggatggccgggaatacgccctctccatagccagcgacacccaggttaccgaggtcacctttgccggcgggcagacctgcgagctctatgtctcccccggagtacgctcggaaaacctggcagtggcggccctggcccggatggccccctgggtgctgctggtgctgctggccttctctgccctgtgcgcagtggtctattcccgctatatcacccgccccatcgtccgcctcagcggcattgcggggaaaatggcagagctggactttggctggatctgcggggagacccgccgggatgagatcggcgccctgggccgcagtctggatcgtatgtcccagcgcctctccgccgccctgaccgacctgagagcggccaacgacgccctgctgggagagatggagcgggaacgggagctggagcggcagcgcagcgcctttttcgccgctgcctcccacgagctgaagacccccgtcaccatcctgaaggggcagctcaccgggatgctggacgaggtgggcgtctatcgggaccgggaccggtatctggcccgctcccttcaggtcacgtcccggatggaggccctggtgggggagatcctcaccatctcccggatggaatcggggacgggtctgcggaaggaagaggtggacctctcccggcttgtggaggaacagctggagcaggacagggagctgctggatcagcgggagatggacctctccctgtccctggcccccggcctcgtcctccggggcgatcccagcctgctgggacgggcggtggacaatctgctgtccaacgcggccctgtactcccccgccggggcccgcatccgggtgcgcaccctgcgcctggacgggcggcccaccctggtggtggagaacaccggtgtccagattggggcggaggccctcccccgcctgtttgagcccttctaccgggaggagcagtcccggaaccgacgcaccggtggcagcggtctggggctctacctggtgaagatgatcctggatcggcacggggcccggtgcgagatcgagaatatcaccgacggcgtgcgggtccgtgtgatttttccgccggaaacggccagttgatcccctccgctctggcgcacctgccatataaacagcatc

SEQ ID NO: 13694 - DNA, 507 bp, Unknown
  gut microbiota DNA sequence
cggagattggcccgcatacacgcaacggcaaaatcctccccgccgcagttcagcgtagacagccggtagtcctcgcgggggataagcctgccggtttcatcaaggacgggcttcatggtaaattcgtcatgctcaaagagcaggtattgttcggcggctccgtagtcggcgtttttagagttgatatgtttgagtgttgccaaccgcgtcacctactttctttaagacttcatacttgagggcggcaaggtcggctatggcggcgcgtacctcgccggacaacgcatgatagggcgcgccgtactcgttcagataccgggcaatctggttgaggttgccgccgatcctgccgtactcggctgcgagcttcccgacagcggagagcagttcgtcattgaccgacgacacatggagtacggggcgtatggtggtacgccggatcgcctgccggagaaattccgactggctgataccatagggcgcaagccgcgctgtgaagtcggcgta

SEQ ID NO: 13695 - DNA, 551 bp, Unknown
  gut microbiota DNA sequence
tccagcgtgaggttggtcgtgacgatcagcggcttgccgctgcggtaacggctgtcaatcacattgaacacctgttccagcccgtattccgtcccgcgttccatgccgaagtcgtcaaggatcagcagcggataacgacaaaggcgggaaatgtactcgttgcgcccctcaaagctggcggcaaggtcattgaggataagagcaaagttcgtcatgcggacggggatttctttctccatgagggcgtttgcgatacagcctgcaaggtagcttttgccggtgcctacgccgccccagaacaggcagccgatattgtctgtccgcatatcttcccaatgctccacataccggcgggcaagcccggtctgcgggttcctgccgttgtcgttctcgaaagtccagtcccgcatggtggggtcggtaaagccccggcgtttcagttcttccacggtgtcaaggtgtctgcgccgcttttcggcggcttcccgttcctcgcgggcggttctctggcagtcgcactctgccgggtggcggtcgcgcccgaagatagc

SEQ ID NO: 13696 - DNA, 775 bp, Unknown
  gut microbiota DNA sequence
gaaagcactgcgtgatgaccctgatctagcagaggagtttgattccctttttgacttcttcctgctggatgagttgtctccgagggatgaggcggacggccgagcaaccttcacactgcccggcatggcttttgccagagatggctccggcggagaataccacctgttggaagatggctccatcggctattacagcagcgaaggtgaggcaggccgtctggctgagagcatggatgaccttttttcactgattgtgagctgcatctgctggcacgactgctgtgacgcaaaggagtatgcggactccaaaacactggaggaatacggacagaggcagcgcaacatcaacttggaagatatggatatggacagctggcggcgggtagctgatgctctcggcatccctaccaatgagccgctggcaccggttttggagcgattccgcaaagcaacacagcgccagcctctgtatcagtgtattttccatgaggatgatggcagcctgaccgaatcatacggcctgatgtttgaatgagaaaggagcaatccctatgaaagcatttgaccccaattacaaactgctggacgagatgtatcaggacgattactatcctgcctttctggtggacaaggtaaaggacgagcttcagaaggtcatcgacctgctggagagcggcgaaaccgacaccgaagcggtgcaggagacgctggacgaggcggtctgcggcatcaatgatctccaggaggagtttgacgagaacgacagcgagatcga

SEQ ID NO: 13697 - DNA, 501 bp, Unknown
  gut microbiota DNA sequence
ggcggtgagcttcaggtcgccatacaggcccagagcggtgcccttggcggtggcggccagcatccagtcattgccgaagtcagcggcgctctggaagtagcccagggcgcggcacagcatcagcacagcctgcgcggtggtcacggtggcgttggggtcgaacttgccgtcgcccacgccggccacgatgcccaggctggagcacaggttcacatagccctgcgcccaggcggggacgtcggtgaacacattggtctccgcgaactggttgacgttcacaccggcgccatacagcatggtgcagatgatgaccgccatctcggcgcgggtgactacgttctcggggccgaaggacccgtcctcgtagccttcgaacatgccgatggcagaggtgaccgccacggcatcctgattgacgatctcagccttgtcggtgaaatcgtcgatacccttagcgctggagcccacgaccatcatgcccaggagcataacggaagccag

SEQ ID NO: 13698 - DNA, 4985 bp, Unknown
  gut microbiota DNA sequence
tgggccttttccagaacatttcggcccactatgcctgtacaacacttctgacacaggagaaattggttataaaaagggggagatcaggggaaaaatccccgagattacgcctaaaaagtttccctggtagacatttggtagacacatgaaaacagaaggaacggcagggccctgaaactccaggcccccgccgcccttttttggtagacttttggtagacgaaaattcaaattgcatagcacatagggagtcccgcaggccggagcatctcctgcgcttgagggacaaggagagaagcggagtaggaaccttgtaaaagtaacggaaattttgtgaaaaacttagcggcggacaggcgaatagaggaaatttcagagaaatgggaagaagggccttgaaaagtgggcgggagtgtgttaaggattatatagtagagatagagtgtgaccagagaaggtctgaagctttcgggatagatggaaaggaatggcggatcgacccatgagaagacagagcaagggctatgaaatcgatatgtgcaacgggacgcttgccaacaagatcctgctgtttgcgctaccgctgatggcctccagcctgctgcagctcctgttcaatgcggcggatgtggtggtggtaggccagttctgcggaaaggcgtccctggctgctgtgggctccaacaccgcgctgatcaatctgctggtcaacctgtttgtaggtctgtcggtaggtgccaatgtggtggtcgcccaggacctgggcgccggacggaaggccgaggccaaccgcgctgtgcacacctcaatcctgctggctatgatcagcggcgtggtcttgatgatcttcggcgtcattatggcccgccaaatgctggagtggatgtcctccccggaaaatgtgattgggctggcctcggtgtatctgaggatttacttcatcggcatgccggccaccatggtgtacaacttcggcagcgccatcctgcgcgccaagggagacacccagcgtccgctctatttcctgctggctgcaggtgtgctcaatgtggtgctgaacctgttctttgtcatcgtttgcaggttggatgtggcaggtgtcgccatggccaccagcatttcccagtatgtctctgcctggctgatcctgcgctgcctgatgcgggagcacggggcgctgcacctgaaccttcaccggatgcacttgaataagcgggtcatcggccggatctttcaggtgggcctgcccgccggcttccagggcgtcatcttctccctgtccaatgtggtgatccagtcctccatcaactccttcggcgacacggtaatggcggggtccgccgcagcccagaatatcgagggcttcgtttacgcggccatgaacgctttctatcagagcgccctgaccttcagcgggcagaactatggtgccggcaaatgcgaccgcgtggacaaggtggccctctactgccagggctttgtgattctgaccggcctgatcctgggtaacctggcctttttcttcggctctcagctccttggcatctacgcacctggggagccggatgtgatccagcagggactggtgcggatgtcctatatcggccggctgtacgccatctgtggtattatggataccatggtgggcatcctaagagggatcggctattctatcgtgcccatggtggtctccctgctgggctcctgtgtgctgcgcctgctgtgggtctggttcgtgttccccctggacccggttccagggaacctgtatatctcttatcccatcacctgggcaatcacaggagcggtccacatcatcatgttcctggcgatccggaaaaaggcgtacgccaaggtacaggggagcggtccctcctatctgtctgtggatggacaccatccggaagcgacggagcattgaaaagaaaaagcggctggggtctctgcgcggagatctcagccgcttctgcctgtttaaaaagaaaaaatcgaccaacagaaaacttttctgtcgtcatgaccgtctgaactaggtagaagggccccttctctctgcatggccccgtggcgcggggattgtaacaaaattgttgcttgcatccggcagtgaaacccggtattctgttgcaggaggagggggaggctatggactatgacagactgctcaatctgaccacggatctgggataccagctgatggccagcggggcggagatctaccgggtggaggaatccatgcatcgggtgctgaatgcctatggcctggagcggccggaggtgtttgccatcccgaactgtatcatcgtcagcgtgactacgccccaggggcatcctatcacccggatgcggcgcatcccgggccatgggacagacattgagctgctggagcggtgcaacgacctgtgccggcatctatgcagccaggtcccaccactggaggatgcccagagcttggtctccgccctggagagagggtatccccgctactcgtcccatcaggtactgatggggtatggtttggcccccgcttttttcacccttctattcggaggtcatttcctggacggcctgtgtgctttcgtgtgcggcttggcggtagggatctgccttttatatggggggcggttcattgggagcaacagcttcttccgcaccgtagtatgcagcacagtgggctcgctgctctccctgctgctggtgcgcctgggcttcggatacgacgtggatactgtgactatcggtgtgctgatggtgctggtgcccggcgtggcgctgaccaacgccatgcgggagatcatggccggggacatcatctcgggcctgagccggacagcggatgccatcctggtggcttcggccattgccctgggcacggtggtggggctggccatcggccagatgctttaggaccgttggaggtggatcgggatggagcgaatttttctggactatgtcttgccctgcctctgggcctttctggcctgcgtaggctttacactggtcttcaacatccacggagtaggaaagctgatctgcggcttcgggggaggactgggctggctggtgtatctgctggcgggcagcagcatcgtggccgcattcctggctgcggtggccataggcgtcttttcggagatcatggcccggctgcgccgctgcccggtgaccggctatctgctggtagcacttctccccctggttccggggggaggtatctattacgccatgagctactgcgtggcgggagatacagaccggttcctggctgagttgctgcacacctttgggatggcggcggccctggcggtgggagccatgctggcctcgtctgtatttcggacggtgtttcctcggctgtaccaccggccggccgggtcctgagacggggcaaagagagagaatcatgcgactggaatttttggaggtaatctgatgaagcgttttccttcctttctctgtttcctgatggcagcggctatctcggccagcctgaccgggtgcggcggcagccccggcgcaggcagctccgcccagggacagtcggctgacccgcctgcccagagcgctcagccggaggccggtaccccggcggctgacccctccggggcgccggatcataatgtgcctggagagggccctgccggagctgtgccggagggagagccctccaccctgtccggcggatcagaacaggggcagaacgtcccaaacagcccggaggacaagcctgcccatgtgggagagagcggagagagcagctacgacttctcccagcccgcgccggagagtccggcagtggacaacacctactttgaggacgccgcttttgtgggggactcccgcacggacggcttcctgctttacagtgggatcgggactgggaccaacctgacctccaatggcctgtccatcttcaagctggcggagaaaaaggtgatcacgattgatgggaccgcctatacgctgctggaggccctggagctgggcgaatatggaaaggtgtacctgtccctgggcgtcaatgagctgggctactacaacgacgagggcttttaccaggcatactgtgacgccatcgatgctatccgggcttgccagcccgacgcggtcatctacatccagggcctgatccctctgaacgagtcggtggtggcggcatctggcggccccagctatctgaccaacgagcacctccgggtgtacaacggcctgatgcagaaagcggcagaggaaaagcaggtggtgtttctggacctgtattccgaatttgccaatgagaacggggaactgcccgaggaggccagcaaggacggggtgcatctgaagagcgactactgcaagcagtggctggagtatctgaaagtccatactgtggacttcgaaacactttatccggagggaactgagacatgagacgatttgctgggatagcggcggtactgtttctgcttttgctgccgctggccgcctgcggcggcgcggaggagaaggctgggtttgacccggagatcaccctccaggcgctggcggacgctggagccttctctgaggaactggaggagctggacggcgacactgcctttaccctctacggcttgggaaactccgggctggagcgggaggatctgaccgccgccaaggtgctgcgctcagcgggcgccacctgtgaggagggggctgtcctggtcttcaccagcggggaccaagcgcagacagccgtccaggcgctgggagactatgtgcagaagcagatagactccaaccgggactaccgtcctcaggagctgcccaagctggagagcgccgtcatccagcagcgggagaacactgtgctgctgctggtggccggtgacctggaggcggctcagggcgtgctggagcagtaaagggagatagacttggggggcgggccgcatctgcggcccgccccttttatgcctgactgcctggaagaaaacggagcaccaaaacttacagcttgccttt

SEQ ID NO: 13699 - DNA, 1301 bp, Unknown
  gut microbiota DNA sequence
aatcgggaacattctcaaaaccagtgtagatggtattctcatccacatcaacaaagacagtgtcctcgtccacaatataggtcttgccatcggcggtgatgtaggccgcgtcattgatgatctcggcgcccgcgccggtcacattggaggccacatccttgtagttcttgtacaggctgttctggttctcgcggtccgcctggtcatccatgtccaggatggggcgcagagtgtagacatcgtcgtccacggaataggcatacacgccgcccaccaggccgccattgttgtacgccttctccacgtcggccacgttcatttcggtgccattgacccattcgttgtcaatggtgaccttcttctcggtgccgtcggtgaagacgaccttggcctcgatggtcttcaggtagctgtcggcggtatccacatacagatagttggcatagtagtcatccatcgccaggaagccaatgacatagccgttggggtccagatacagacggtaggcaatatcgagagtgggatggacctcgttgatgtcatccagatcagaggcggtgtacttggaataggtgtacttgttgccgtcgtccagcttgacatagctgcccttgtcctcatcctcgggctcagaagccttggcgacataggtcacgctgccttcagcggtggcgggatcagcgatggaagcgacgaaggagtcgtcatcgtcgttcacgtccacggtaatgaccacatagtcgtcctcagcgaagccgtcggcggtgatggtgcgctcgtcgatggggttagtcttggccttgtcgctgagcacgcggaccgtgacctcgccgtccttgaccttggtgacctcggccatgtagtagttgatcatgaccacggtgacggtgtcgttcacgtcgtccacatagatctcggtggtggcgcccttggcggtgtaggcgtagtcggtgtccttgtcgttggcgggagccagatcgtcgccggcctgctcagcgccgtccacatagacattccaggtgtagtcgtccaccacgctcttgccaacagccttgtagatcacgttctccttggtgttggcggtgtaggtgaagtcgggggtgtcggccacagtgatgatctcatcatcggaggtcatcttcacccgctcggggatcagggagccgtcctcattcagaacgccttccttgttgccctcgccggaggggttgccgtccatccgataggagccgatgccccaggtggtgccgggacggccgtaatcggtgttctcgttggtcttgtagaccaggtcgaagttc

SEQ ID NO: 13700 - DNA, 253 bp, Unknown
  gut microbiota DNA sequence
tcgcgtccagcggcaagcgatacaagagccatgccgccaccatctacaaatgggcgcaggaggacgcaactaagaaagccccgaaaaagggcataccagactactcatgcaaggagggcgagagtttatgaagaacgaaatcaacgctgttttggagaatatgacggccaccaccccggagccggaggactacaccggcgaggacggtttgctgtactgcggcaagtgccgcaagccgaaagaagcctatttt

SEQ ID NO: 13701 - DNA, 33365 bp, Unknown
  gut microbiota DNA sequence
aaagcgaggacttttccgcccgggcggggcggaaaagcaacgggatacaaggctgtggaaaaagtccaccagggacgggactttttccacagcctgagcggcggagaggacgcgtgtcctctccgccgcctttttgtacaagaaaaaatattctttcaggcggggcttgacagacgggcggacctgtgtataatatgaagtgcacttcacgtgaagctaacttcatgttttgaggtgaagtgaaaggggggagagggagatgaagaaccgggtgaaggagctgcgcaccgccgcggggatgacgcagcagcagctggccgaccgggtccacgtctcttcccgtaccattatttccctggaaaaggagctgtacaacccctcgctgctgctggcctatcgcatcgcggagctcttcggcgtgacggtggaggacctgtactgcctgaaagaaaatagggaattggaggaccggcagtatgaagatctacaataagaaaaagtttgcggacgggtgttttttcctggtccttggagcggccctggctggggccataatctggaagcgggagatagatggaaagagtgtggtgcttgccctcatagccctggtcatcggggcagacgcattggtccgcagcctctccagacgcctgtcttaccaggacaaggtggaggcactggacgagcgcaacatccaggtggagctgcgggccaggagccggacgctctccctgctgcggggcaccctgatggcggtgctgatcctcagcctgatcggcgccctggccaacccgaagggcgagctggtgtacggcgggatgatggtcgtatccggcgtgctgtacaccctctccctgttcattgagctggcatgcagcttctattatgaaggcaggatatagggatcggatcacggaagatccggatgaaaaggaaagcgaggaattccatatgagccatacccgtgaagaggagtggaagcaggtccgggcgctccacctggtccgggacgagcgggaccgggaggtgggggccgcggccaaaggccgggcgggggatgcggtgctggctgcctcccagctgtttgcggcggtctgtctcctgaggggggacccggcctgggccgccttcctgtccctcaccttcgtggggggcggggcgcagtgccttcatcggttctgggaggatagggagaggtttttcctgatctgcggcctggccgcgtcggcctgcggcgcggcgctgggatgctggtatctgctccaggacccggggacagggccgtccctggggcggctggcggcctttgccctgctgatcagcctgctgaccagcctgtccggcctgatatttgtccctcttctgctgggggccgtatggctcaagtataaggtgggccgtatggatggggaggcgtgggagcactatttccagtccgtgtccacggtggggctcctgctgcggggcggcgtgctgctgctgttggccctggggctgaccgccctgctgagctggccgctgttcgccctgctgggcttccccatgccggagcggctggccctgctgttctttttgatcgggggcgcggacctgttccgcaagctgagccaggagcgggacgagctggtgcggaagctgctccggctgaagctccccggggggcggaagggcgtcacggagcagtgagtgcccctccggacggaaaagagggccgtatggggcctgcggggcgctctggcccgatctgttaagcgggaaaggaagggatcgaattgaaggtcaaaaacatccggcacctgatgctggggatcatctgcctggtgctggcggtgatctgtctcgcggtgggggcggcaggcggatctgcgcccaaatatctcatcagcgccgtcctgctgctggctctgggcgctgtgaactttcacggcgcgctgaagggcggggcggagcaggagctgctgcgctggacggacgagcgggaccggctggtagccatgcggagctgccagatcaccctgcaggtgatgaacggcctgctgttcggcggcgcaatgaccgcgctgctctgctacgccatcacccgcagggccctgttccagacagtgggcatcacgctgtgtgccgtgatccttacactgttttttgtgacgatggcggccaaccgctactttgagcggcggatgtaagatgggaaaagtcccggtgcattttctgcaccgggacttttcagcttgtagaaaaagcctcgcagagttcgcgcccgcgcgcggcagactgcgatattctcgaaaaggcggtttccttatccagggaggtgagctggacggccatggccgaaatagagggatctgggaccgagagagcggatgcgggcgatgctatcccgctgggcggcggggtcggagcagaggcaggaggggcccgggcggaacaggttcatcatggcgtcccccacaatgagggagtgcccctccacgtccaagccgatggagcccgccgtatggccgggcagctccagaacccgggcgtccacaccccagggggccaggctgtccccttcccgcagctccactgtgggtgtaaaagggaggaacgcctgggtctggaagctgtgacgggagagagacagcaggagccggcccgccggtccctgggcggacaggggctgagattgctgatcggtgagcaggcccagatccgccggatggagggcggcgggaacgcccagccgctccataagcagggcggtgttctgaatgtggtccaagtggccgtgggtcagcacgatcagccgcaccccggcccccaagcaggtatccagcaggcgctccacgtagccggtgtagccggtgtccactaggacggcgccctcctccccctgcaccagatagcagttcacattgccgcaggggatgcggcggatgcccctcacaggaccacccccttgagggtgttcccctccagcccctccagctgtacctgcaccaggcagttgtgaagatcccggggactgggagcggccacagcgcagtagtgggcggtatggccccgccagagaccgccctgctcctcctcgaaaagcaccggaacggtctgccccacccactgggacagataggtgtgctccatctctccggctgtctcagcggcccggcgggcccgctcttccttcacggcgttgaggacctggccgggcattttggccgccggagtgtcggggcgcttggagtagggaaagatatgcatggcggcgaaggcacacctatggaggaatgtcagggtctgttggaactcctcctccgtctcaccggggaagcccacgatcaggtctgtggtaatggcggggcggtcaaagtatccatggagcaattggacgctctcataataccgcgcggaatcatatttccgattcatccgggccagaacggcgtcacagccggactgcatggacagatggaagtgggggcacagattgggcagggcggctgcccggcggcagaagtcaggggtgatggtgcggggctccaggctgcccaggcggatgcggacctctccgggcaggtcccggcagacggtttccagcaggtcgataagggtctgctcccctggcaggtcctgtccccaggaggagatctcaatgccggtgaggacgatctcccgataccccgcctccagcagccgctccagctcccgccgggtgtcctggggggagagggagcgcacccgcccccgggcgtaagggatgatgcagtaggagcagaagttgacgcagccgtcctcgatcttcagcatggcccgagtgcggccctccaggccgccggcgggcaggatctcaaaggagcggcggtcgaaggcgttgtccagggcggtgacgggctggcgctcctgccaggtgcgctccagcagaccggcgaagcccagccggtccccggtgccggacaccagatccacccccaggccgtccatggcgtccgggtgggtctggggatagcagccgcacacagcgatgacagcgtcaggggcggccttgcgggcccggcggatcatctgccgggatttcttgtcactgacggcggtgacagtgcaggtattgataatataggcgtctgcctccccgtcgaaggggaccagggtgtggccccggccggtgagcacctgttccagggcctgggtctcatattgattcactttgcatccaagggtataaaacgcgatcttcatggtcagggcacctcatgttccggcggagcggggcggccgcgcccatcacgccgtctctgtctcgttcaggtcctccacccgcagctccatcagctgctcccgggtgggggactccagctgggccacccggtcggactggcgggacaccgccttctcgaacaggttgcgtacgtcccgggcattgccgaagttctcgtcccggccttcatagagggagagaaagtcctgctccgcccattgggcggcctccggggagaggacatacccgtttttttggcacatggactgaaagatctccatgagctggggaccggtgtagtcctcgaaataaaaatatttgttgaagcgggactccaggccggggttggagtggatgaacttctccatcagaccggagtagcccgccgcaatgacgatcaggtcatcccggtggtcctccatgtttttcagcaggacctcgatggcctcacggccgaagtcgttgccgttctcctggttgaccagagcgtaggcctcgtcgatgaacagcaccccccccagagccttctggacggcctcctgggtcttgatggcggtctggcccacgaagccggctaccaggccggagcggtccacctccaccagctggcccttggagaggatgccgatggcgtggtagatcctggccagcagacgggctacggtggtcttgccggtgcccgggttgcccagaaagaccaggtggagggacatgggcgagacgggcaggccctgttcctggcgcagcttctgcaccttcaccaggttgatgagactcttgacgtccttcttcacccgctccaggccgcacagggcgtccagctcggccagcacctggtccaggtccgggggagggagaggcttgtcctccaccggggcgggctcctcttccggtggagcgctggtctggggccgggtgacgaactcgtccgctttcagggcgggccggtccccctccaggcctccgcacagggccagcaggaggtcggagcaggcattgacaaagccggcctccggctcgctgaccacgtcatccaccgcagcaaagagcagcaggagcagcgtcagctggtcaatgaaggtgcgggacagacggctgtgggtgaggcggtcatactcccggagacggtcaaaaaaggcggggggctggaactggtcaaagccggccaccccggtggccacctcccagtacagggcggagggggcggaggagccgttggtatagatagcgttgtagaactccacatgacggggggtgatggaactggcgttgtccgcctgccacacccccagggcgcagcggcggaaatagccgtccgcctccccatcgaaccgcgcacgcagggccgggtccgcgatgagcctgcggaatgcggagaccacctcattgtactgcttgtggacggtagctgcggacatggttcctttcatagcggtcacctcttcagggttagtggtgcggggccggggccccagcgggctgacagatttcattataagaggccgggccccggcggtcaagggtaaggaaagaaagaagtagacataaaaacggagaaaaacaattatttcatggttttccgttgacgcacctgtaaattcacgctaaaatagagacaagtacccggctgccaggccgcaggccgggccatcctgatccaagattaaggcggaggtgcgtgccatggccagcagccccaaagatcccaagcagcagaagacgaagcccattcggcgcaacgacgtgatccactgtgaaaactgtggcgaggactactccgtcacatataagcggtgcccgttctgcgacgagcggccggccaaaaacgggcgccccagaacggcgggtggccgcagagtggccggtggaggacggagcggccggccggccaacccccttcaggtggcggcgctggtgggctccctggtgctcatcatcgtggccatgtatattgtcttcacctccctggctcccctgttcagcaagggagaggatgatcccggcgggagccaggcagaccccggcgcctccaccagccagaccggtcctgctgcctccagcacccccagcggctcccagggagacatctcccagcctgagcccgagcccccggtgacggtggatgtgacctccctgacgctggataagagcgacttcacccttcaggccggggagtccgccaccatccaggccgccgtggtccccgccgacgcagagatcacctggagcagcagcgacgagtctgcggccaccgtcagcccggagggcgtggtgtccaacgtgaacaccggctcctcccaggtgaaggtgaccatcaccgccaccgccggggacaagacggcggaatgtgtcgtcttctgccgcgccggcggcggggccgggtcgtcctcctccggtaccaccggaacagtgaccggcgcaggcagcggcctgttcgtccgctccggaccgggcagcggcaatgaggccatcgccaccattctggagggaaacaccgttaccattctggaggacatgggcaacggctggtaccggatcagctttatcggaagcggcggcagagccacagagggctatgtgtccaaagattatatcaaggtctcctgaactgctgtgttccgggccgtcccccaggggacggcccggaatttttgcagttttcggcttgacaaaataattagacagttgtaaaatctaaaaagacaaacgtctaataaagggggagatgacatgaagcagatctcacgtctgcccgacgcggagctggaggtgatgcaggccctgtgggccgtcccagagtatccggcccgcaccagcgatcttgcggctcggctggaccgggactggaaagcgcccaccctgctcaagctcctgtcccggctggaggagcggggctttgtccggggggagaaggaggggcggtccaacggctacacccctctggtgaaccggccggactatctggctgcggagagccgatccttcctggagcgggtccacggcggttccctgtccagcctgatggctgccctgtacccagagaaggagctgagccgggaggacatcgccgagctggaacgcatcctggagaaagggggaaaatgaggtgctggagcaactgacggccctgctggcggccagcctggggggtggggcagccatcctggtgctgctgaccctgggccccctgctgacgcggaaggtctcaccgcactggcggtattgggcctgggccgtggtggctgtcagcctgatggcctatcccattctcggccccgtattgggggccctctttcccgctcccattcagctggatgtcccccagatggtggctcatggcgcctatgaccggtacaacgcctatcatttggataaccagcggatcgtggaggccggagcagggggagcaggagggacaaatacctacgtggacggagaaccaatgtggtacagtcatcatgtccactatacagaccggcagggcagggaggtgagcatccgggacaacgactacctccgcaccgtcactgtggagggggtgacctcttacaccgtccactggacgggggtgatctatggagcatatcggggggtgaccgtcctctttctcctgtggatggctgcgggctatggactgggccgccggcgactgctgcggtggagcaccccggcgggggaggaggatctggccgcgctggagcaggccaggcaggagacgggctgccggaaaaaggcgtccctgtaccgctgccccaaggcaggctcccccctgctgctgggctttgcccacccggtgatccttctgcctgagactctgcaggaggggggacgggaggccgccctggcccacgagctgacccacctgaagcggagggatacaggctatctgctcctgctgacctgtgtccggtgcatccattggtttaacccactggtgtggaacatggtccggacggcccggcgggacatggagctgtgctgtgacgatgatctgctggcgggccgggaccaggaggcccgccgggcctacggccgggcgatcctggaccagatgaccgccggaaaaggggggaggaccggtctgactaccggctttactggggaccggggagggatctttctccggtttcgggccatcatggacaccacgccaaagaggaggggacgcctgctgctggcctctgcctccatcctgatcctcctggccgggggactggtaagctgtgcgcccgccgcggcagagagcagcggaggcgcgttggaactgtcgggagcggacgcgggacccggggagatgctgcccttggaagagcggtttgagtcctacaaccgggaaagaggacgctccctccctgtttcccggggggagtgggctggagaggtccgctaccgctttgccgaccaggagcagggggtggaggtgctggtcggactcagcccggggaagggggacccctttcctgcggaggtcctgttccagaggcggagctttggcttcgacatgccagtccttccgctggcccagggcggcgcagaggggagtgcctctttgtccctggccgacctgacgggagacggcgtcccggagctggtgtacatctggggcggcggcgggaccggcgcctgggaggacaactgccgggtattcgacctgtctaccggggaggagtaccccatcatcctggacccggagctgatgctctcccaggtgcgggcggagcggctggaacggcgggaagatcatctcatttatcaggtcaccggccccggcggtcagtcgggggaagcagccctgtggtgccccgagtctgaccaggagccggaagggggaccagccctggggcagatcagcctgatccggatgaacgaaacgggggatgcgctggagtggaccgcctccctgacgctggagggcccgccggtcctgtacgggaacagcctgggtgagctgacggcggtgctggagttctccccctccctgcgggcgttcacagcggcaccgccctgggggatggtgctctaccccctggaataacacaaaatttttaaggggagggccctggaggggggccctccccttgtatttgcccccaaattacggtatgatatcccttgatgcaaagaccacaaaggagggttttttatgcgggacggatttatcaaagtggcagcgggcaccccgaagatccgggtggcggactgccgctataacgcggaacagatctttaccatgatgcgggaggcggacaagcagggcgtcaaggtcctctgcctgccggagctgtgcctcaccggctatacctgtggggacctgtttttgcaggacaccctgctgtgtggggcggaggaggggcttcagaccatcctggaggccactcgaaacttggatatggtgaccgtgctgggcctgccggtgcggtgcaaatgggacaacaagctgtataactgcgccgcagtcatccagagcggcgagatcctgggactggtgcccaagacctatctgcccaattacggggagttttatgaacagcggtggtttgcctccggagcgggtgtggagaccagtgtggacctgtgcggggagaccgtggacatggacgccgcggggctctttgcctgtgagacagtgcccaacctggtcctgggcgtggagatctgtgaggacctgtgggccaccgagcccccctccgcccggctggcccggggcggggctacggtgatcctgaacctgtcggcctccaacgagctggtgggcaagtctggataccgccgcaatctggtggtggggcagtcagggcgcctggtgtgcggatatgtgtacgccgatgctggggaaggagagtccaccaccgacctggtgttcaccggccacaacatgattgccgagaacggtgccctgctggcggagcggcgctttgccacggggctcaccatcagcgagatcgatgtggaccggctggcctatgaacgccgccggatgaccaccttcaacggccagagacaggcggatctctggcgggcctccttctccctgcccctggaggagacacggctcacccgggcggtctctcccgcccccttcgtccccgctgatgcggaggaccgggcggagcggtgcaatgaaattttgaaaattgcggccctgggcctgaaaaagcgtttggagcataccggggccaggacggcggtggtgggcctgtccggcgggctggactccaccctggccattctgatcaccgcagtggctatgaagctgctggaccgcccggccagcgatatcatcgcggtgaccatgccctgcttcggaaccaccgaccgtacccgggataacgccgtggagctggccgagcgcctgggggccaccctgaagcgcatcgacatcggcagcgcggtaaaggtccacttcaaggacatcggccagtccatggaggaccactcggtgaccttcgagaacggccaggcccgggagcggacccaggtgctcatggacatcgccaatcagaacggcgggctggtcatcggcaccggcgacctgtccgagctggccttgggctgggccacctacaacggggatcacatgtccatgtatggggtcaacgcaggcatcccaaagactctggtgcgccatctggtggccttcgtctccgacgacaagggcagcgaggacccacgcctgtccgccgtactggacgacatcctggacaccccagtctccccggagctgctgcccgccatcgaggggaagatcagtcaaaagacggaggacctggtgggcccctatgagctccacgacttcttcctgtactacgccatccgctggggcttccctcccagaaaggtgttccgtctggcggagcacgccttgggccggacctacgaccgggccaccatcctgaagtggctgaacagcttctaccgccggttcttcactcagcagtttaaacgttcctgcctgccagacggccccaaggtgggctctgtcaccctgtccccccggggcgactggcggatgcccagcgatgcggtggcggcgctgtggctggaggaattggagggcctggagtaagagctctcccgatccgccggccgccgcggccggggcaccgcgggggccgggccgggcgggccgcactttgctgaaaaatttatggagaggacgttgatctgttgaacctttatttggacctgtttctgacctttgccaaggtgggagtgtgtacctttggcggtggctacgccatgctgcccatcctccagcgggaggtggtggagaaaaagggctgggtcacagaggaggaagtcactgactactttgccatcggacagtgcactccgggcatcatcgccgtcaacacatcggtttttatcggccaccgtcagcggggggtcccaggaggaattgccgccgccctgggagtggtgtttcccagctttgtggtcatcaccatcatagccgcattcctcacaaaatttgcgacctatccggtggttcagcacgccctggcgggcatcaatgccgcagtggtggcactgattgcagtcagcgtgctcaagctgggaaagacaaatttgagggggagacccgcagtatgcatctttttgggagttctggtgctgggagagctgtccgggctgctggctgtggacccggccaccccgctgggagcggtgctggatctcctctccaatcctgcattccttgtggtggcagccggagcgacaggctggctgctgggccgggtgaagctcccatcccaaggaggtgaggacagatgatcctgctgcgcctcttttatgagttttttaagactggtctgttctctgtgggcgggggtatggccacgattccctttctgcagcatatgggggagaccaccggctggttcaccaatcaggatctgactactatgatcgcggtttccgagtccacaccgggcccgctgggggtgaacatggccacctatgttggctaccagaccgctggagtccccggggcgcttgtggcaacgctgggggtgatcacgccgggggccatactgatcctgataattgcgggatttttgcagaagtttcggagcaaccggagcgtggaggcggtgtttgccgggctgcgtcccgcctccactgcgctgatcgcggcagcgggcctgagtgtggcgtattcagtttttacggcatcagacgccctctcaccgaacagctttccggccattcagtggacagcggtggtgctgacgctggcgatgttcgcggcaatgaagtggacgcccctgaaaaaacttcaccctatcgcctttattgcggcaggagcggcagccggcattttacttcagctctaaacgaaaaaagtgtcctcttcccatggcgggaagagggcactttcttattccgcctcttcattggcggacagggactcatagttcagatccgacagggtccgggccttatcggctgagatgaggaagaggtcgcagccgggggcgggtgcctccagggcggcgtagacgtagctgccatcctcggtctggccgccgatggccagggtgaaggtctcgccggaggtcagggagacggtgagaagggaggcgccgtccatgccgcaggcggacagctcctcctggtccgccttaaaagcggagcagctgtccaggtatagggtggacaggtcgtacagccagtcctccagcccgacggccccctcgggcagcggctgcccgtccagcgaccatagggtgatctcctctgtctccgtggtggtctcatagatgggctccccgttctcgtcggtctcgccggtttcggtctccacctccgtctcccgggtctccacagcggaagtcagctggcggacagtgccgtcggtcagctccagctggacggaggtgatgttcttctcgtccaggtcaggcagctggggcagctccatcaggtccagcagttcgctgtccagggaggaggtgatggagccgtccactgtgtagacctccgtccctccatcgagcatggcgtaccggtggctgcccccagggtccaggctgcccagaagcagggtggtggactccccggaatcagtgcgggcggtgagggtgtaggcgggctcctccaggccgtagtcagccagtgcgtcgggttccggaatgatccgctccgccttcagggcggccaggtcctctcggagggcgtccagctccgtgccgttcaccgggaactcgctgtccccgtcccaggtccagcccgtctcctccagggtgaaggagagggggccgtccccggaatcaaaggagagggcggtgacatcgctgagctggagcacatagtcggcctgggcggcctcccgctcctcctcccccgtgttccagacccgcagggcggcgtaggcgcccagcccgacggcgaggacaccggcgagagccaaaagctgttttgtctgtcggttcatcacagtttcctccgcttgatccagtaggccaggccgccgatcaggacccccagggggatgacggccagatagagggtgctccacatgcccgggttgagaacggtgttataggtgatttccaggctcttggcggggatggagatggcggagatgtcctccatgccggaggtggccgcgttgaggaagatgtccaggttcaccatgctggggttgaaggtgaggatgctctggtccactacgctctcggtggtgaagacggtgaggcgggcggtgccgccgtcggtctcctcctccgcctgggcgcccaggatataggtgccggtctgcccgccggcgtcggagtagccgctctccgtggtggtcatgaagggggtcacggtgatggtgtcacggaccggatcgcactgggtcatgccgtgggcgccgtagatcagagtcaggtcgtcgtccccgaactgagcagtgatggggctggaggcggacagggtggcgctgaagtagaagcggccgtattgggcatagtaccgggcggtgtccccgatatagccctgggccatggcgaggccgtagtcggcgaggatggcattgaagttggccaggtccgtgcgggtcagcaggatcatcacctggccgcccccctccaggtagtcccggaccatctgggcctcgccggcggacaggtcggtctggggctggttgaagaccagcagggagcagtcgtcaggcaccccgttgtccagcaggaggctgacggtggaggtagacaggttggccttgctgatggcgtcggtgaccgagccgcccaaggcgctctccccgtggttttcggcgagatagaggatgtggctgttgtctgaggtgacgtagtccaccgcggaagtgagctgcccctcggcgtcgaactcggaataggtataggtgccataggtgtagtaggacatgagatcggccaccaaaatgtcggagaaggggaccacccgctgcctgccggtgtcggcacagcggaccacgacagtgttctggtctgcctcatactccgtcagggcggaggggtgctccacagggtccacgaaggagagggagagatggccggacagggcggcatagttgtgcagaaatttggtgatgcgctggtccgtggtgtcctcgctggccaggacgaccagctccacgtcccgctccagggcggagaggtagtccacagaagtgtcgctgacggtgtagagactgttgtccgagatgtcccgctccaccaggtcagagggcagctgccccaccaccaggttgaccaccacggcgatggccagcaccaccgcagtggtagcggcggaggtgatccccttccggcgctggaggacctgcacggtgaggaagacgaagacggccgccatggacagatagagcagcagtccccccagatcgaacacgctgtaataggcgaagttgtccagcacgccctggaagtcgaagctggagaggagctgggccagggagtcggggagaaaggacaccagatcggtccacaggtagaggaccagcagcgcggcaaaggtgcccacggcggcgatgatctggctctcggtgagggcggagacgaacatgcctacggcgatgtacacgcagcccatgcagaagaaggccaggatagcggcgtagtccgccgtcagagtggcggagccgttcatggcgatgatgagcgggcagaaacagatcagcaggatggggaccagcagcacggtgaccatggccagatatttgcccaggacgatgccggtgagggagacgggggaggtgagcagcagctggtcggtcttgccccgccggtcctccgccatggagcgcatggtgaggatgggaacggccaccatgaagatgatggtgcagctgagcaggacatagccgaaggaggggtagccgccgaacaggttgtaggccatgaagtagatgcctacaaaaaagatgaggatggcgatgaacacataccccaccatggaggtgaaataggagcgcagctcccgcttgtagaccgcagtcatggctccgcctcctctccgtgttccgtgatggctgtctccggagcgggagcgggctccggctccgccgaatctctgcgcccgaaggggcgcctgcggccgccagcctgtccggcggcggaggcgtcggaggtcagctccaggaagatctgctccagggacagggactcccgcctcatctccaggatcggcaggtccgcccccgcacaggcgcggaagacggcctccctgggatcggccccctccgcgggagtcaggcgcagcagggcggcgcccgcctccccgcagggcagcggcgccacctccgctacgccgggtacgccggagagcaggacccggccttcctccggggcggccttgagcagcagggtgatggcaggggtgcctgccagctcccgctccagctgggccggagtgccttgggccaccagccggccgtggtggatgataaagatgtggtcgcagacctcctggacctcggagaggatgtgggagctgaggatcacagtgtgctcctgggccagctcccggatcagggcgcggatctccaggatctgcttggggtccaggcctacagtgggctcatccaggatcaggatgtgtgggaagccgatcagcgcctgggccagccccacccgctggcggtagcccttggacaggttgcggatcagccggccggacacgtcggcggtccgggtcatctccaggatgcggtccagctgagcggcccgctcccccccggggatccgcttgagcccggcggcgaactccagatactcccgcaccgtcatgtccacatagaggggcggctgctccggcagatagccgatgcaggccttggcccccgccgggtcctgagtcacgctgtggccgtctacccggacctccccttcagtgggggcgagatagccggtcatcatattcatggtggtggatttcccggcgccgtttgggcccaggaagccgcagacgcagcccttctccactgtgaagctcaggtggtccaccgccagatggccgccgtaccgcttcaccagattttctacttcgatcacggtctaacctcccgttccaaatcaaagatcaggaacaggataacacccaaagctgaaagaaacctgaaaggctgaccgaaattttgtaaacattttgggaacaaaaagggcgcgtcccggaacgaaagtgtcccaggacgcgctgagagcgggaaggggctgtccaggcaggctcagcccagataggtgagcaccgccgtctgggcgggggtgtcttgggtcagctccaggacgttgccctcatagcgcaccacgccgctctggagggcgaggaaatcctccaccgaaccgatgacctcgtagccgaagtccttgccgcggtagtgcatgggaacgaccacccggggcttgagctggtccactaccgccttggcctggccggcatcgatggtgtagaagccgcccaccgggatgagcagagcgtccagaccggacagggcctctgcctgctccggtgtcaggccgcagcccaagtctcctagatgggccacccgaagcccctcggcggaaaagatgcgcatggtgttcgggccccgcttggcgccctgaacctcgtcgtgccaggtggccagctcttccacctccacggcacagggcttcccgctgagggccaccgcggcccggttgccgtggtcccggtgctcgtggctgcaatagacggcgtcagcctccagatggaggggggacagaccggggacggagccgtcctcataggggtcgatgacaagggtgcccgcctcagtggccagggtgaagcaggagtggccgttccagatcaatttcatttcaaaatacctcctgatatgggtttggatgggcaaaatatggagaggaataataaaattatagcacgcttttctccgtttgaaaacagaaaatccaggaggcccttctttgaaggcggaaaaaggcgggaaggcagctgctgatgggcggatgggcaggggaagcggcaggttgagggaaaggaaaagaaaacaaggagaggaaaaaacagagaatcgggaaaaagagaacgaaaatgcgcatagaagaacttcaaaattgcacttgaagctattttgggggaaattttgatttttttgcattttttcgaccaaattacagttgaatttccgggcgaattggaatacaatgatagccgaaacgcgaggtggacccattgctgaacatcgtattggtagagccggagatcccccagaactgcgggaacattgcccggacctgcgccgccacccgcagccgcctccacctgatccgccctctggggttcgacatcagtgagaaggcggtgcgccgggccgggctggattactggcccatggtggacctgcgggtctacgacggactggagcagttttttaccgagcatcccgctcccgacctctggctggccaccaccaaggcgccccgaagctatgaccaggcccagttccgggatggctgctacctgttctttggcaaggagactgcgggcctccccctgggctttcgggaggagtacagggagcggtgcatccgcatccctatgcgccctgacgcccgcagcctgaacttggccaactctgtggcagtggtggcctacgaggccctgcgccagctgggctttcccgggctgtccgggcagggcgagatggcggaggggctgtgacctgtttatttccctttcccacgcctgacgagaaagaaaggagctcatagaagaatgaactacaacaagaagacagtgcgcgacatcgatgtggcgggcaaaaaggtgctgctgcggtgcgacttcaacgtgcccatggccaaggacggcagcggcgtcatcaccgacgacaagcgcatccgtgccgccctgcccaccatccagtatctgctggagcagaacgctgcggtggtcgcctgctcccacatgggcaagcccaagggcgaggtcaagcccgagctgtctctgaagccggtggccgcccgcctgagcgagctgctgggcaagccggtcatcatggcggaggacgtggtgggccccgatgcccgggccaaggccgccgccctgaagcccggcgagatcctgctgctggaaaataccagatttgagcccggcgagaccaagaacgaccccgccctggccaaggccatggcctctctggccgacgtgtacgtgtccgacgccttcggcgcggtccaccgcgcccatgcctccaccgccggcgtggccgactacctgcccgctgtgtccggctttctcatccagaaggagctggaagttatcggcggcgccctggccgatcccaagcgccccctggtggccatcctgggcggctccaaggtatccagcaagatcggggtcatcaacaacctgctggagatcgccgacaccatcatcatcggcggcggcatggcctacaccttctccgccgcccagggcggcaaggtgggggactccctgctggaggccgattgggagagctacgccaatgagatggtccagaaagcggcggctaagggcgtgaagctgcttctgccagtggacaccgtgtgcgccgacgcctttgcacccgacgccaacagccaggtggtcaaggccggggagatccccgacggctggcagggcctggacatcggacccgagaccgtgaagctgtactgcggcgccgtggccggcgcgggcacagtgatctggaacggccctatgggtgtgttcgagttccccgcctttgccaaggggactgaggcggtggccgaggctctgtcaaagacggacgccatcaccatcatcggcggcggcgactccgcggccgcagtgcagcagctgggctatgccgacaagatgacccacatcagcaccggcggcggcgccagcctggaattcatggagggcaaagagctgcccggcgtagcctgcctgctggataaataaagaactgcccgggcagctccggggacccgcgcgagcccagcgaaatggggatgggatttcaccggcaggcgaaagtgaaaaatatggcgcatgctttgacgacgctgagatacaggaaagagggatcgtgcatgaacaaaaaaatgagaaatatccttctgaccattctgggggtccttcttgtagtgatgcttttaagttttgcggcgtagtgcgggacaaatcacagctgggaagccaagatccgggcagactaggctcaagtgtgtaacaaactaggaagagaaggaaaaatagaaaggggctttaccgccatgaacagaagatatcgcaagaccattattgccggaaactggaagatgaacaacaccctctcccagaccaaacagttcgccgaggagatcaagcccattatgccccggggaaagtggtgcaacgtggtcctgtgcgtcccggccgtcaatatcaccaccgccgtccgcctgttcaaggactgccacatcgccattggcgcggagacctgccactatgaggaccacggcgcctataccggtgagatcactgcggagatgatcaaggaggcgggggccaagtatgttatcattggccactctgagcgccgccagtactacaacgagaccgacttcaccgtcaataagaaggtccacgccgccctggaggtggggctgaaccccatcgtctgtgtgggcgagagcctggagcagcgggagctgggagtgaccatggagctgatcgcctatcaggtgaaggctgccttggccggcgtgcccgccgacaagatgcgccatgtggtcatcgcctatgagcctctgtgggccatcggcaccggcaagaccgccaccgccgagcaggctggtgaggtgtgccaggctatccgtgctgtcatccgcaagctgtacggcgcccatgtggcccgctccgtcaccatccagtacggcggctccatgaacgccaagaacgccgccgagctgctggcccagcccgacgtggatggcggcctgattggcggagcctccctgaagcctgcggacttcgtggagatcatcaacgcggcaaaccaggagtaagcgagccgtccatgccggatgggtccccaacgaaagcccagcgcagcgggttttgttgggagaggcggagcgggggagcggcaggcattttgcctctccccatcccgcaccatcgaaacacacggagaggaagacacggaatgcggagcgggagcctgctcttcatgccccttccctctggattctctcaagaaagggtttctatgaaaacaccaacaactttgatcatcatggacggctttggcctgggccccaaatatccgggcaatgcggtggaaaatacgccgaagccccatctggagaatatcttcaaggagtgtcccgggtgccgcctgtctgcctccggcctggacgtgggcctgcctgaggggcagatgggcaacagcgaggtgggccacaccaacatcggcgcgggccgggtggtattccaggacctgccccacatcagccgggacatcgacagcggggagttcttcaagaatcctgcctatttggaggccatggagcactgccgggaatgggggaccgccctgcacctgatgggcctgctgtccgacggcggcgtccacagccacattacccacctgttcgccctggtaaagatggccaaggagcaggggctggagaaggtgtatgtccactgcttcctggatggccgcgacgtgccccccagctctggaaagagctatgtggagcagctccaggccaagctggatgagctgggcaccggcaggatcgccaccgtcatgggccgctactacgccatggaccgggacaagcggtgggaccgggtgcagcgggcctatgatgccatcgccctgggggaggggatctttgaggaggaccccgccgccgctgtccagaagtcctatgactccggcgtcaccgacgagttcatggagccggtggtctgcgccaaaggggctcaggtccgggacaacgactccatcatcttctacaacttccgccccgaccgggcccgggagatcacccgctgctttgtggatgaggactttcaggatgtggagcggaaaaagggcttcgtcccggtggattttgtctgtaccaccgagtacgacgctaccatgcccaatgtgacggtggcctacccccggcagaagctggagaacatcttcggcgagtatatcagcaagctggggctgacccagctgcgcatcgctgagacggagaagtatgcccacgtcaccttcttcttcaacggcggcgttgagacggtctttcccggggaggaccgggtgctcatcgcttcccccaaggtggctacctacgacctccagccggagatgagcgcctatcaggtgacggaggaggcggtcaagcgcatcgagagcggagcctatgatgtcatcatcctgaactttgccaactgcgacatggtgggccacaccggcgtgtatgaggctgcctgcagggcggtgactgccgtggacgagtgcgtgggccgggtggtggaagccacctcccgcatgggcggcgtctctctcattaccgccgaccacggcaatgccgagcggatggcggacgaggatggggagcccttcaccgcccacaccaccaacctggtgcccttctatatcgtgggggccagcgtccgcctgcgggacggccgcctggccgatatcgcccccaccatgctggacctgatgggcctggaaaagcccaaggagatggacggggagactctgatcgtcaactgacggactgggcccccgctggaccgatgcaccggtgcggagctgctgcacagggcatatacgctccgggcgggaggacccgcccataaaagaaaaaaggagactgattatcatgaagcagatcattgagatcgtagacgttttgggccgcgagatcctggacagccggggcaaccccaccgtggaggtggaggtctacctggaggacggcactgtgggccgcgccgcggtcccttccggcgcctccaccggcatctatgaggcctgcgagctgcgggacggcgacaagggccgttaccagggcaagggcgtggtgaccgcggtgaacaacgtgaataccgagatcgctgaggccctcatcggcaccaacgtgctggaccaggtggccatcgacaagatgctcatcgacctggatggcactcccaacaagagccgcctgggcgccaacgctatccttggcgcctccctggcctgcgccaaggccgcggcagagagcctgggtgtctccctgtacagctacatcggcgggaccaacgctaagatgctgcctgtgcccatgatgaacatcctaaacggcggtgcccatgccaccaacaacgtggagatccaggaattcatgatcatgcccgtgggggcccccagtttccatgaggctctgcgcatgtgcactgaggtgttccacactttgaagaacaccctgaaggagaacggcacccccgccgccggtgtgggcgacgagggcggctacgcccccaacctgaagaaggacgaggatgccctgaaggtcatcgtgaaggccatcgaggaggccggctacaagcccggtgaggacttcaagatcgccatcgacgccgcctcctccgagtggtgggacgaggagcagaagtgctatatccagcccaagtccggcaagaagctgacccagcagcagctggtgaacatgtggaagaagtttgccgacacctaccccatcgtctccctggaggacggcatggccgagaccgactgggagggctgggctatgctgacccgtgccatcggcgacaaggtccagctggtgggcgacgacctgttcgtcaccaacgtggagcgcctggccaccggcatcgagaagaaggtgggcaactccatcctcatcaaggtcaaccagatcggcaccctgaccgagaccctggatgccatccagatggcaaaccgggccggctacaccgccatcgtgtcccaccgctccggggagaccgaggataccaccatcgccgacatctccgtggctaccaacgccggtcagatcaagaccggggcccccagccgcaccgaccgcgtggccaagtacaaccagctgctccgcatcgaggaggagctgggcgacatcgcggagtaccccggcatgaaggcgttcttcaacctgaagtaagttttcaaattttgctgcaaagccgcccaatcgggcggctttgctcttcctgtcgtccagctcctgggggccccatcgcagatggggcgcgccgtgcactgggaagcggcgacggccatccagtcccttctgtgccgccggactgtactttttgttccagctgtggtatgatgcagcaagaccattgaagaaaaggaaggaccgctatgtacatcgaccccaccgtctaccagggacgcccctccgatgaccgtatcccccaggagctggctgtctacgacaaactggaagagctgggcatctccttcacccgggtggatcacgaccatgccgacaccatggaggactgcctgctcatcgagcggaccctgggggcccgcatctgcaagaacctgtttctgtgcaaccggcagcagactgacttttacctgctgatgatgccgggggacaagcccttcaagaccaaggacctctccccgctgctgggctgctcccgactctcttttgccggcccggagcatatggagcgcctgctgcgcaccatccccggctcggtgagcgccctggagctgatgttcgatacgcaggcacaggtacggctggtcatcgaccgggacctgctgaaggaccggtatctcagcggacacccggggatctccacctccaccctgtgcctggagcgggaggagatgatccgcttcgtggaggccaccggccatacccccacctatctggacctgccggacccgcgcctgtcggagcagggcggaggtctgtaacgaaatcgtagccgttttgtctctctttgccaccggtttgcaaacctttcgcaacccctttttcccctggctctggtatgatggaggcagaaggaaaaaggggctttccttttgccccgagccatgctggaagagaggaggatcaggatgaagaagacccgcgtatggcccgccctgctggcggccctggtgatcctggcgggatgcgccgccgctccgccggaggagagcgatccgccgacagaggagttcgtctttacccgggagaatatgccccggctcaacgggtccacctccgccgtccccctggcggaggcggtgtgctccgtcctgctgggagagagccgggaagaggtggccgatctggtccagttctcccgcaccaccgcctcctatgaggcacttatggcgggggaggccgacctgctgctggccggcgagccagagcaggcggtgatggagcggctggaggcgggggaccggtggctcctgacccccttcgccaccgacgcactggtctttgtagtcaacgcggacaacccggtggacggcctgaccacggagcagctccaaaagatctataccgaggagatcaccaactggagccaggtggggggcgaggaccgggacatcatccccttccagcgcaacccggaggcagggagccaggccctgatgaagaagctggtgatggacggcctggagatgatggagcctccggtagactacacggcgggctccatgtcctctctgctggagggggtgcggcagtatgacaacagccccgccgccatcggctacaccgtctactactatgcccacgatatggagatggcccagggactgaagctgctctccatcgacgggaccgcccccagcccggacaccatccgcagcggggaatatcctttcctcaatccttactacgctgtcatggacaaggacgaggcggaggacagccccgcccgcatcctctacgactggctgctgggagaggagggccagtccctggtggcccaggagggctatgtgtccattctggaacaggaggggtgaatatgagagggcgcggcgcggcctgggtcctggccctggtgctgctggcggggtgcgcccccgccccggcggcggagcccccggaggagccggaggtccgggtgcggacccactgggaggctctggagacccgggcggggtccctccccgacgtggagactccgtggccgggcgggatcggggaggatctgatccccggggaggactacggccccctctacccctatgcggggacagtcatcaatgcggcagagtgggaggggggtccctttcgctatgacagtttgacctacggcctgatgacccgggcgggggagctggtgacggagtcggtgtacacccgggtggaggtccctacctattacgacagagaggggacggatgtctttctccccctgctggtgctgaaaaagtcggtgggagagggaggctggccctatggggacggcacccttttggcggtggccgcccgggacggcagctggcgcacccccgcccggtggtggacctatgccgccggggcggagggcctgatcctctacgggccggagggggtctgctggctgggcacggacgggaccgtccagggggagtggccctgggaggagctggtggccgttccggagatggcggccgaggtgatgaactgggagcggctgatgttcgagccgacctggcgggatgacttggtgtggatgggctggaccgacgagagccggagccggaatcggctgctggacctgtctctgggccgggtgcgggaggaggagccgggggagtggcgtgccatccaggacacctggctcgtgggccggggggagggctacacctactttgacggggaggataccttcgacggcagctgcacccgcctggagatcggcgggcagatctgtgagatcccctacggcggcaccgagctctactgcaccctgaagcggggcctgctctttttcaatgacagcagctcccggcagagctctccgtccggggcggtctaccgcctggacggcatgccggtggtggaggccgggacctatacatccatctccctcgtgcgggacgagatgggggaggaggggcccgtcctgctgatgggagagcggactgacgggagctgtgacctgctggatgaggacggagcgctgtggatggaggatgtgccctcctatacttacccttaccttacaggtgagatcctgcagctggaggagaaggtctccggccggcaggtggtgagctgctatgacacaaggacgggagagctcctctaccgccgcactctgggcctgggggacgaccagcaggagcccttggaggactggtgagccttgacagggggacggacaggagggatccattctggcggcatggagactgcataagatcacgcgccccggaggaaagcctccggggcgcgcgtgtcatactttgcggatgatcatcagacgctttggcggatcagcggagcgggacgcagtgccagagaatcaggcgccaaactggatcaggacctgatcgtcccgtttgaaggcggaggcactgtagtagcgggcggtcacagcgccgtcttcgtcccgctcacagcggtagtgctccaagaagtcccacagcatggggatctcggaggtcaggcagttgtgggggcggtacaagctgttggtgtactggaccaggggaatgtcctgtccattgatccaggtataggtctcgaaacggtcataggggcctgtgacggtgaaaacaggctcggagacaggcacgccgaaggtggtgactgttccgtcagcggcgtaaaccgccggggtgtacacaaagccgttgactcgcaggaaatactgtgcccagtcgtctgtgcggttccagcggtcgtcatagggggtgccggtgtcatctttgccattgccctcgccattgatcaggtaagtggggatgggcttgtcagagtgggcgtcgggatagtcctgatagaaagaggtggaggctacagcggcgtagtaatccggggtctcctgggcaaactgctgagattccatagagcccatggactggccggtgctgtagatccggctgagatcaaactggaatttgccggagtcattccaaccctccaggagatccagcatggcgtggtagcaggcatccacatcggcgggggtgacagcgacagaggtgttgtaggcttcgttggtaaaaatcagcgcgatgccgttttggtttgcagtttcccaccagcaggtggagtcaaagaagatgatgttggtctggctgccgccagcccagacggtgatgacaggggcgccgtcgggctggagttcggatgcgttctcagggatgtagaacaggatctcgcggggctcgccctcgatgtccacgatggtgcagatcattgtggcggtcgcgccatcgggcatagtgaccttctgttcagcatagcggtcaggggacttgtgggcgttgacgatcacgtcggtataatccccccgcagcatcagggcatttccgtaggcggaagtgttgtcatagcgggtgtagcaggtcaggaaatcatggatctcccggccggagagggactgtcggctgtccacagccaccttggagatggggcccgcatactgggtctgccaggcgtcagagtccccggcctggacatatacggtgccgtagtcggcgttctgggtgccggaaggggagcagtcgttggcagtcttccaatactgaaggctgtggtccgcggcatcatagttgacgaaccaagtgggaacagggatgtcctgattggtgatcatctgatcgccgcgggccgccaggcggctcttcacattctctgtgatgtcatagccgttggtgcctaccgcatagacctggctgcctacttcggacagatatgcctcgccggcgctgacgccgttcagatacacctgagcgatgacgaagatgggatttttggctgaccaagcctccagaggggcacacccttcaccatagcctacaaaataccactcgccaaaggcggaccagtaatttttgtttttgtcaggcgcgttgggatcggcctcgtcggccacaggcgtgttcagccaggagagagcggcagtcaagaaaggcaactcttcctccacggacccccagccgccgctgccgggggccagcacaaacagacattcgccgttttcttccgccaaatcgaaccagccattttccatcagaaattgggtgggatcgaccttgtcgggcagggcgatcacgtaaaaatagggccgacaggaggcatgctcggagatatagatgtaggcctctcgctgggccgagttcccctggagatcgggataggtcaaagtcttgctgaaatagcccgtcatgggcagctggttggcatcggagtaatcagaggcgggggccggtacgccatccagcgagatggggcctgtggaggtggtagacacagagactgccttggaacctgcatcccaggagaccggcatgttgtaagcctgggccagataagcgagggggacgtacaaggtcccatcccgcagagcagggacagtgtccatctcagagccggaaaaagtggcatcgctaccggtgaaataggtgctgacgccgttccgggtgaactgtactctggagccttcctgcttctgagtcagtcccagagcgtccgcgatatccggcgagaccatggtgcggtcgttttgatcaatgtatgcggcggactgtaccgtcttgccgtctacctgcacagaaacactgccctctgccgaggcggaggagatgagccccagggcaagagacacaccgagggtaaggccaaagagatgtttgatcgatttcctcatgaagatgctcctttcagatagatccctggatttgtgctgtttaaataaaaagtggagagatataaataaattatatcacggataaaataaactttaactctaatttttgcataaattcatgaaagatataaatgaattcaagacaaagagggagtaaaaagcggcgccccggaggattccctccggggcgcgggctcgtatgtcatactttgcggatgatgcccattggggtgcactcactggactgacccaaggggttgtcccccaggatcctggccagcagggccatggagggctccttctgggagcagcccaggatgttggcccccaggtcgttgatgtccacgattgccaccgggtggcccagagcctgggccagcctgcgggaggtacccatggggtcggcgggggtgaggaccacgtagtggtcatagggagggatggtgccctcggtggggccgtcgatgccccgggccttgggcccggccacgatgtagaaccagcccttccggcggaacagcttgccaatgacgctgcagaaggcggcgaacaggatgcgcagggtgccgcactcccgcagggccatctccatagtctccgggatgcccagaccgatgccggcgggggtcttggtcacatagcggctgagggtgacggccagcttccggggcttgatgtcctccatggggatggcccggttctgggtgcaggccaccgccttctcggagatgaaaagaatgtccccctcctgcatccggtccttggcgtagcggaccaccacgtcggccatgtcgtcagtgttggtgatcaggtgggtctttaccgggatacgctggtagtccaccccgtccaccgtgcggaccagctgcttgccggggtttgcggaataggtgctctgttcttcgctcatggagatgctcctctcaggcggcagtcctgccgctgcgttgtatcaaggtaaggatgcccagttttccagggcatccagtcctgtgcgttgatttgattttcctattatatcaccaggggctcctgttttccacgctttggcgcaagttttcccgcttattcgccgatctcttccggcagagggcggcggcggtgctccaccgggccccactcgggcagggggaggcgctgcatggagccgaagacccgggacttgagtccggggtagcggccctggagctcgtagatcagctccttgatctcctggcgcttggtgttgccgttggcagggcaggggttctccaccaccgggagagagaggcgccgggcggtgtgacgcaccagattctccccgcagtaaagcagggggcggatctgggtgatctgagtccggtccagccaggtgacgggctggaagcaggacaggcggccctcaaagatgagggacatgaaaaaggtctccactgcgtcatcgtagtggtggcccagtgcgatcttgtggatgccccgctccagcagggcactgtggagggcccccctccgcatcttggcacacatggagcaggggtttttctccttccgcacatcaaaaatgatgtgctggatctcactgccgaggatggtgtaggggacctccatctcccggcacaactgggcaataggagaaaagtccatcccgggccggccctctgccgcccccatgtccagggtgaaggcctccactgtgaaggggatggggtagaattcccgcagcttggccagcgccaccagaagggtgagggagtccttgccgccggagacccccaccgccacccggtcgtcaggctgtatcatgtcgtagtcctccacacagcggcggaccagagaaaggattcggttcatagggcctccttttcaggttttttcctcattttcacaacttttttcaaaaaataaaattcaaattgaaaatgagataaagagagataataacagaaaacaagagaaaacgggagattatgaaatagaaattaaaaaagatggaaaaacccgttgacattgggattcccaaatactataatacaaaaggctccgcttgtacaggggagcgactgattttgtctgcaaaatgatttttcagataaggaaagaaaatggaggtctcacctatgtccacttttatggccaacaaggggaacatcgtgcgtaagtggtacgtcctcgatgctgctggcaagcctctgggcaagaccgctgccgccgccgccaacctgctgcggggcaagctgaagcctgagtacaccccccacgccgactgcggcgacttcgtcatcatcatcaatgcggagaaggccgtcctcaccggcaagaaactggagcagaagtattaccgcacccactccggctggatcggcggcctgaaggaagtgcagtacagcaccctgatgcgggagcgccccgagctggccatgaagctggctgtccgcggcatgatgcctcgcaatgtgatcagcaaggattccatgtcccgcctgaagatctatcgcggcggtgagcatgagcacgccgctcagaagcctgagctgtgggctctgtaagcaaggaggtagacgagcatgtataagagcaagaagccttatttctatggcactggccgtcggaagtcctccgtggcccgcgttcatctgttccccaacggcactggcgccgtgaccatcaacggccgcgacatcgatgagtatttcggcctggagaccctgaagctgctggtccgccagcccctggtgaccaccggtagcgagggcaagttcgacatcgtggccaccgtctccggcggcggcgtcactggccaggccggtgccatccgccacggtgtggcccgcgccctgctgctggctgacgagaataaccgcgccgccctgaaggccgccggcttcctcacccgtgatcctcgtatgaaggagcgcaagaagtacggtctcaaagcagcacgtcgcgctccgcagttcagcaagcgataatcgactgctcagactatatcaaaatggttcaaaaaccccggaaaatcaaggttttccggggttttcttatacctaaatgggctgatatagtttgaccaaatttggcaaaacgagagccgttttcacccaatttttagtggttaaatataggacaaccgccaaaaatggggtcaaaaaacggtcttagtggttaaaaaataggacaaccagagagcaatttcgggggtatttttgagggtgattttggcactctcagacaccggatttttcgctggagggtttggcataatctgaccaaatctgaacaattaaatacgattctaatgcaggcactcagtaacaaataactgggtgcttttttgtttcagagattccggcactagaaagggccgtcactttatgattttgaagtggcggctttttctatttccagaagcaacagcaataattagaaatgaggtgaagtcaatgaacacgcaaatcatcgccattgccaaccagaaaggcggcgttggcaagacaacgacctgtgccaacttgggaatcgggctggcgcaggccggaaagaaagtcctgctgatcgacggggacccgcaagggagcctgacaatcagcctgggccatccccagccggacaagctgccctttacgctgtcggacgctatggggcgtatcctgatggatgagccgcttcgtcccggcgagggtatcctgcaccacccagagggtgtagacctgatgcctgcggacatccagttatccggtatggaggtatccctggtaaacgccatgagccgtgagactatcttgcggcaatatctggacacgctgaaggggcaatactcccatatcct

SEQ ID NO: 13702 - DNA, 450 bp, Unknown
  gut microbiota DNA sequence
ctcagccaccagcagatcgatgatgtgggtgatgttgtccttggtgaggggcttgtagaacacaatctcgtccagccggttgaggaactcgggccggaaggagtggtgcagcagatcgttgacggcatttttcgcctcggcggtgatgtcgcccttctcatcgatgccgtccagcagatactgggaccccaggttggaggtgaggatgataatggtgttcttgaagtccacggttcggccttgactgtcggtaatccggccgtcgtccaatacctggagtaatatgttgaacacgtcggggtgggccttctccacctcgtcgaagagcaccacggagtaggggtggcggcggacggcctcggtgagctggccgccctcctcatagcccacgtatccgggaggcgcgccgatgaggcgggagacggagaacttctccatatactcgctcat

SEQ ID NO: 13703 - DNA, 602 bp, Unknown
  gut microbiota DNA sequence
atcgttttccataatcaaatcataaaactcaaccgctataccttggaattcctctgggatctccagcgcggcaaagaaatccactgactgagcattttggaaaaattcaatggccgttttactgcattttactataatccctgtttgagtggtcaactctttcatgctttcgctgcctcgctcatgttcagatacatccccatcgttttttcatcggcacaggccgcccggatcattttggccagcatcatcaaatcgtcgatgtattgggagtacacgcagaacacatcctcgtcggagtcgaagtgaaacagatcctcgccgctgttgccttcctcgaactcttggatcacaccccggaccagccgttcccagtctccgctgttgccggtcagtcccagccggcagaattcttctacccggaatccgtcgctgattttcagcagaagtgagatcgcataggggtggtggggaatgagaaagaatggcgcgatctgctctggcttcacccagattttgaagggcgggcgcggatcgggtatccagggcagtatttcccattcatcatcccgtctatttccgtattggcataggtctttcat

SEQ ID NO: 13704 - DNA, 377 bp, Unknown
  gut microbiota DNA sequence
ttccatgatctcccaggaccgccagattgctgtaagcccgactcaacttgacggttagcaaataatctcgctcctgctccgggatagcctcaatggcctcaatacatcgtgagaactcgtccgcatcattccactcctcaatctgctccagcagttttgtttcttctgtctgattcatcatttcaccgccttttctgtgttatcccttgccttttctgaagtgttcgctgcctcgccaggtgttgaccacacaggtgaagatctggccgcagtgcttgcaccggatcatgtgagccataatttcgtctgcccagccatcctctgtctttaccttctccagtgggcaggtggattcctcttgcatcagttcaaattcc

SEQ ID NO: 13705 - DNA, 825 bp, Unknown
  gut microbiota DNA sequence
gatcagctgccccccgatcttaattggggtaaacagatggggatagggtgtcataaatatcctccttttgtttatcgcggctgcccgcacggctgtcagggaaccaggaaaatcttgatcccctttttgtcccggaactgggcaaagccctccttccagtcggccagcggcagccgggtgctcaccagaggctccagcatcaggctgttaccctccagcagcttcaggaggatctcccaggaggatctcgcctgggcaaagccggcggtgaccttcagctccttgcgcaccaccatatccatgtccatgggtaccggcttgccatagaggcccacctggataaaggccccctgtttgcgcaccaggctgatcccctggctcagggccgggccggcgccggagcattcaatccacacatcggggccgtaggctgtctcccgggccaggagcgccgccagatcatcggcgttgtcgcacacccactccgctcccaggctcttggccagttccagccgttcccggtcggccttggtgccgctcagaatcacccgcgcaccccggagcctggccagctggacgcacagcaaaccgataatgcccggcccggacaccaccgccacatctccggcgtggatctccgacttctccagcaccgcccggatacagcaggcaatgggctcgctgagcgccaggatgtcgctgcccttatactgttcaggtactttcatcgccgagtctgccggaattaccatatattccgccatggcgccatccacattgacaccgatagaggccttctgtgtgcagtgaaccggatcgcccttg

SEQ ID NO: 13706 - DNA, 681 bp, Unknown
  gut microbiota DNA sequence
ccatgggctggccgtagttctcccgccggtggcaggtcacaaggatgatctttcggccggtgtagtccagatggttgagaagatccgttgtgaagtgataatccttcacaaccgtggtcttgagggcgtcgatcacagtattgcccgtgacaaacaccccgtcggtgatcccctcccgctccaggttggcgcggttagcccgtgtggggcagaagtgcaggtcggcgatgtcgcccaccagcttccggttcatctcctccggaaagggagaatacttgtcacccgtgcgcagccccgcctccacatggcccaccctgatctggtggtaaaaggcggccagcgccccggcgaaggttgtggaggtgtccccgtggaccagcaccaggtcgggtctggcctgctccagcaccccctccatgcccagcaggcacttggaggtgatggtggagagggtctggcggggctccatgatgttcagatcgtaatcgggccggagctggaagatctccagcacggaatcgagcatctcccggtgctgggccgtcacacagcagaccggctccaggcccggacggcgctggagctccgccaccaggggagccatcttgatggcctccggccgggtgccgaagatggtcatgacgcgcacctgcttcatttctcttcccccttctcgtccgg

SEQ ID NO: 13707 - DNA, 599 bp, Unknown
  gut microbiota DNA sequence
atcaggcatttattgacggccttgtggagcggaaagacagcatgacggccctgtgggtcaagggtgatggctttcccaagacagaggacaacaaggcgaaaaatgaacttctcgccgcactgacaccggagcagaaaggtgtgctggctgagatgcttcaggacgaacatattgcgggtatccacgatacccttgcatatatcaatgagatgatgaatctggaggggctggagcttcatcaggacggtgaatcctatcccaacgactattttgagagcctgcactatgacttcaccagccattgtgacggagatgagtggccggaataaaaggaggcgtgacagatgtatatcaaaaaatactggggcaactttattggaggctcggatgacagcctgaaccttgtggcctttttagaggatcagaaaaagaaggaaatctccctcagcgagatttttgccaagatcggtctggacaagcagaactgggacttccaccagactgtggagtatctggagttcacccattccaatggcgtggagatggactttcacttcgccattgatgtggtcaccgacctggccgccatcctgctggag

SEQ ID NO: 13708 - DNA, 321 bp, Unknown
  gut microbiota DNA sequence
cacgccggcggcggcatcctgctggctcaggcctccgaggagctggccgctctggccgagttcctggatctccctgtgtcccgcactctggccggccagggctgcctgtccgaccagcaccccctgatgatcggccagaccggcttctggggcctggagttcacccactccctgaccaccaatgccgacgtgatcctgggcctgggcacccgcttcggcgaggccgacagctccagctggtatcagggcgtcaccttcgatcccgataagaccaccttcctgcagatcgacatcgaccccaacgagatcggccgcaactac

SEQ ID NO: 13709 - DNA, 198 bp, Unknown
  gut microbiota DNA sequence
gccctggagaaggccatcgaggccaacaaggccggcaagcccttcctggtggaggcccccatggagaacatcgtggtgcccacccccggctgctggaacatcaacgacatttacagccccaacgagctggtcaaggagggcaagctggtcaagaaggagaacggccagtacgtcgcccccagccactccaagtcccac

SEQ ID NO: 13710 - DNA, 348 bp, Unknown
  gut microbiota DNA sequence
ggctttacttccccggagcagttagaagccgccgttgataccgcctatgcggaaatgcgccagaccagcggcgaactgaaagcactggaaaccaagctgcaagggaaaaaggagttgcagcggcaggtgttggcctacgcccagaccaagcccgcccgcgacgggttgaaagcgcagaaatccgagaaagcccgcgccgcataccggcaggcccatgagagcgattttatcatagccgacgcagccccccggtatttcaaggcgcatggcattaccaagctgcccgcccggaaagcgttgcaggccgagatcgagcagcttatctccgagaaagacggcctgtataac

SEQ ID NO: 13711 - DNA, 174 bp, Unknown
  gut microbiota DNA sequence
ggggccgaaggacccgtcctcgtagccctcgaacatgccgatggcagaggtgaccgccacggcatcctgattgacgatctcggccttgtcggtgaaatcgtcgatacccttagcgctggaacccacgaccatcatgcccaggagcataacggaagccagagccaggctgagagc

SEQ ID NO: 13712 - DNA, 574 bp, Unknown
  gut microbiota DNA sequence
ggtttcctcctctccttatccctgtatatccgcatcaatggggccttttttcagcgttccatccacagtgatcacatggccccaaaacatatcgtcgtcttcataccaggcggtaaaacggccgccgggagacactgtaaactcggtgagcaggatgcgccgggcgaactcatcctcagtgatggggtctttctccgggtcccggtcggtctgatcattgtccgccagccattcgttggcctgatcagtgagcttctgggctgccatcgctcgcagggacttgtcccagacttcctgatctgccaccagtttcttcatcacattggtgacgcgagtccaggacgctttcttttcaatctccacatccagtgagatttggacgtcttttcccatccaccagcaagtcccgttgaacatactcatttcacgatccagtgtgagggtccccagcacttcgtccttcagaagaatcggctttgtgtactccgcccagatatcctccagtgccggacagggtacgctttcctccagtacctccatgacataccactgaggttcgctgagggaatcacct

SEQ ID NO: 13713 - DNA, 654 bp, Unknown
  gut microbiota DNA sequence
ggacgatgcggagcaggtccccgagttggacgagacgctgacgggcatggactacatcccctacaccccgcagaacgaagaagaattcttccagcagctggagcagtggaacgacgaggacgagtacacccgctgcatccaggcgttgaacgctatcccggaggacaggcggaactaccgcattgcctacgccatggcacgggcgctggagaactatgccatcattggggaccacgacgagggtactcctaactataagggagatagggccctgcgccgagccatcgaggtgctggagtctgtccgagaagagggtcaggataaggcccagtggaatatgcggatggcctatgcctatcagtatctctatggtcaggaggaaaaggccatcccttacgcccagcgttgggcggagctggaccccgaggacaaggatgccccggcggtgattcaggagtgccagagggagatcgcaaagcgggccgaggcagagaccgaggatgagagtgaccacacaggtgtcttcaccggctttgtgctgctgtccaaagcagaatgggataaagagcagtttatccgggacatgaaggaaaagtgggacattgctgtggatgaatacgacgagagcgaggagaaggacgacgacgcgctggt

SEQ ID NO: 13714 - DNA, 147 bp, Unknown
  gut microbiota DNA sequence
tggcgttgtcggagttgaagtccacccgctccaccttgtccgcggcctcccactgggagagcccataatactgagtctgtccgcttgccataaaaaatccctcctgtcctgactgggcccggcagatccggacccgctcaaaaccgg

SEQ ID NO: 13715 - DNA, 209 bp, Unknown
  gut microbiota DNA sequence
ttgaactccagggagtagatgatgccctggttctcgttgtagtacacacccagcagctcgttgtactggacaggcacggccttggtcagggcattgaacaccagctcagccacgttgtcgcgggtcagcccggcgttggcagtgagcttcaggtcgccgtacaggcccagagcggtgcccttggcggtggcggccagcatccagtcact

SEQ ID NO: 13716 - DNA, 312 bp, Unknown
  gut microbiota DNA sequence
aaataggcttcttccaaatggtttttgatcccgttgaccaggtaagggaacaaagcgaattggaagtcagccgcccagttcagttttttctgctccagataccactcacagcacaggccgaaatacttgcggtaaaaccgctgggtggacttcatcatcggggcaccatgctcggcgtaatacttttccgcaatggagatgtccacttttcgcccttcctgccatccggcgtactccatcagctgcttgaccttgcttttaagatcgccggaaatggggatgcgttctttgatcatggtggttacctccatt

SEQ ID NO: 13717 - DNA, 428 bp, Unknown
  gut microbiota DNA sequence
gcgctggctttggatctgaccatccttccctggctggaggagtggtattacagcaatgtgagcgatgagcacatgatcgccatgacggtggcggccatccggctccaccgggagcaggagctgatggaggcgctgacgaaggaacaggcgcgcatccgggctgagaatggcctcccccagcgggatcgtttctgtgacatcctgatgggctacctcaagcggggcgttatgccctttgcggacaacgacaagaactacccctaccatgaaccggaggagccgcagacgaaggagcagctctgggcaaagctggtggaacagaataaaaagctctcgccggacgatcccgatgccaggcgaaagctctataaccactgctgtatgttcggaaccgccagggatgccgtagatctctttgaggagattca

SEQ ID NO: 13718 - DNA, 446 bp, Unknown
  gut microbiota DNA sequence
atgaaaagaaagatgcagagatttgtgactgtgtccactgcggcggcgctgtctctggccatggcggtgcctgggagcgcggcgtatcagccggagcagaagttccaggacgtgagccggagcgcatcctactacgaggatgtgatggacgccaactactacggcctgatggcgggcgtgagcgggaagaccttcgatacggagagcaccatcacccgggccatgtgggtgacgatgctgtacaagatggcgggacagccagcggtgcagagcaaggacaccttcaccgacgtgaagacgggcgactggtttgcccaggcggccacctgggcggtggagcaggggatcacggcgggctacgaggacggaagcttcggtgtgaaccagaccatcacccgccaggagatggcggtgatggcgtccaagtttgcggcgcagtataagga

SEQ ID NO: 13719 - DNA, 675 bp, Unknown
  gut microbiota DNA sequence
cattgaaatgaagtattggacgggagaggaagaagtggtataatggcgacagtaaggaaagctggacggaggtccggcaaataataaggaaaaggagatcattacaatggcgaaagaagtcactcctgagcagatcgaaatgctggacgggatggtcgctaaggcccgcgctgcggcggagatcatcgccacctatgaccaggagcgcgtggaccggctgtgccaggcggtcgccgcttctgtgatcgacatgaaggtttgggcgaacctggctgacgaggcagtggacgagaccggcctgggcgacaaggtgaccaagcggaacaagcggaacaagctgaagctgatcctgcgggactgcctgcgtcagaagagcgtgggcgtgatcgaggagatccctgagaagggcatcgtgaagtatgccaagcctgtgggcgtgattgcgtctctggtgcccaccaccaacccctgcctgacccctgccggccaggtgatctatgccatcaaggcccgtgacgtcatcatctgcagcccccatccgcgcgcgaagaagaccaccaacaagtgcatcaacatcatccgtgagaccctggtgcgtgagggcgctcccgccgacatcatccagggcatcgaggagcccagcatcaccctgacccaggagctgatgaagcgctg

SEQ ID NO: 13720 - DNA, 274 bp, Unknown
  gut microbiota DNA sequence
cagctttgtggcggagcctgatcgtcaggatgctatcacccgtggcaccctttccaatgatgattttgacggtgagatggacgatgcctcctatcatatcgagagcattgaggagaaggaactgccaattgaccccatcaacgcttataaccacatggccatctacctgcgctggtgcatggagcacgacctgatgggtgaggacttcctgaaagaatacagcgaagtggccaaacaggtcaaagctgatcctgccagtgtggatctgcgggag

SEQ ID NO: 13721 - DNA, 391 bp, Unknown
  gut microbiota DNA sequence
ggacaagtcgcaggcggccaccgttaacgccgagaaattcatggggattgtccgcaagcaccttgcctttgaggaattgacacccaccctcttgcgggaaatgattgagaaaatcgtcgtgcatgagtgcagctatgacgagaacggcacccgcaggcaggacattgagatttattacagctttgtcggcaaaattgacttgcccgaagcctaacgcccgacctatccgacacaatggccaagtgccggataggaacggcaaaattttttacacttctattacttctttatcgcacatcagcaaaaagccagggcatgaaacagctcatggcgggcggcggcatcatcctgctgggcaccaccctgatccctctgctgagcggcctgttct

SEQ ID NO: 13722 - DNA, 3066 bp, Unknown
  gut microbiota DNA sequence
cagggcatcatctactccctggagttcaactacctgcagaccctgggctacaagaacttcgacctggtctataagaccgacaccgagaccatctatggccgtcccgccaccacctggggcaccggctcttacaatgtcaagaccgatgccggcgacaccagcaagaccgatactctgaccgaggacggcggcctgatcgcctccatggtccgcatgctggacaaggacgagatcatcaccgttcccaacacccccacctacacctataccaccggcaccgatgaggacgacgtgtacaaggatctgggcaagtccgtctgcgacgaggacgattatgagtggaccgtctatgtcaacggcgagaaggtctatgacgagggcaccgatgtcgctgacaccgtctatgacaacagcgtgggcaacgacgttcctgagcggggcgaagatgctgactatcagtacaccggcaagggcaccgtcaccgagatctatgtggacgacgctgacgccactgtcactgtggtcgccatcaactactacatgggccaggtctccaaggtgaagaccgacgacgacggcgagtacatcaacgtcaaggccctgtccaatctgagccaggacgacgccaaactggacgaccgcgacttctatgtcgagggctatgaggaggacgactacatcgtcttcaccatcgaccagaacgaggacgacgacttctacattgccgaggtcatcactcccgaggtcgcgaccggtgaggtcagccgcgtggagaacgaccgcgacagcgacgacacctatctgaagctggacgacggcaccaagtacccctactccggtgcaaaccacatcgtctacgatctggacagcaacaccgatgagcaccccgagctgggtgaggactacgacctgtacctggatcccaacggctacgttctgggcttcaagctggccggcgagtccgagaccaagtacctgtacgttcaggactccgacgaggagctgcgcgactgggtcgcccgtgttgacctggccgacggcaccagccccaaggtggagctgaaggacacctacaaggataccaacggcaacagcaaggatatcaagtgggataatgattccgagcacgttgttaagaacgccaccaatatcgacgagcgcgtctgggcctacaccgtcagcgagagcagcaatgtctactccctgaaggaggtcaacgacaagtacctgcccgccaaggaggctggtggcgcctttgttgctgatcccgatgccgagatcaagaacggcaaggcctatgtctcccagggcgacaacgagttcatcgttgacaagcagaccatcttcgtggacaccatgaacaacgtggcctacatcggctatgacgaggtgcccaacgtggagaaggcccagctggcttatgtcatggacggccgcgtggctgagatcgtcttcatcctggatggcgagatctatgacgaggacagcacctacttctacctgaccagcaccaagcgcgagtccctgaagtacgacggcgactactactgggagtacttcaacgcctatgtggacggccagaagcagtccgtgttcatcgaccaggatctgaacgcgctgaaagagggcaccctgtacaaggctgtgaagaccaccgatgagcagtacatcaccgagtaccgggaggccgcgctggaggacaacgtggtcaacgccaccggcgatgacgccttctggctgaccaccacccagtccaaggaagtcaagttcgacaccgacagcggcgatgaggggaccgtcttcgtctacgtggagatggagcccaagaagcccgctgagtttaaggctgctggttcctatgccgcttatacgggcggctggaagtactccgtctctgagggcggcatcagcgacatgatccttgaggatgagcccgaggagcaggacggcatcgactatctgacctacgtcaccgtggtggagaaggacgaggagtacgccgagctggtatatatcatctataagcccgtggtggaccccatcatctcttacaccgtgactgtcgatgttgagaacgccgacgtgaccatcgacggcgagccctacaccgggcctgtgaaggtcgttgccggcaccaagatcaccgtggccgccaccgccaagcccggctactcctttgctgcggacccgagcggcgagtacactattactggagaccggacgatcaacgcgaaggccaccgccaacggccgcaccatcactgtgaatggtaatgctactggcgacaaggacagcgctaagaccgatgaggaggttgtggtgacactgacccccaaggagggctacaccatcacttctgttgattgcaatgttaccgccaagatcgacaccaagaactggaccgtcaccattcccgccggtctggagaacgtggtgatcgacgtagagaccaaggccgatgagtacaccctgacctatagtgattctgctgtgtggaagatcactgttaccgataaagatggtaatcccgtcaataccggcaataaagtaaaggtcggtgagcgctacacctttaccgggaccgaggttaaggccagtgacgaacataacggggtccgtgagttccgcattgacggcaacgccgtatgtgacgccgagctcactgtggagggcaaggatcctgtcattaaatctgtttcggtgaccaactccgatgcggatttccagctagcccttaagttggcggctgatggaaagctctacagtgattccacttgtgagactcagcagaacagtacccctggtactaccactactctgtactactacgaagatctcggcaccaaggccgtgattaccggtgagtatgttgtggagtatgatgctgacggtgcgctgaccctcaccattggtcagaagcgctgattagagtgagattctgattcacgcaatttaacagccccccggaacatttgctccggggggctctctcacctctcctccagcttatccacccgggcagacagggcgttgatatcactgcgcagcttatccagtaccgcattg

SEQ ID NO: 13723 - DNA, 212 bp, Unknown
  gut microbiota DNA sequence
gacaagctgccctttacgctgtcggacgctatggggcgtatcctgatggatgagccgcttcgtcccggtgagggtatcctgcaccacccggagggtgtagacctgatgcctgcggacatccagttatccggtatggaagtatctctggtaaatgccatgagccgtgagactatcttgcggcaatatctggacacgctgaaggggcaatactc

SEQ ID NO: 13724 - DNA, 645 bp, Unknown
  gut microbiota DNA sequence
agaagccttggatcaccgcaatgtaaaagccatggctcttatcaaataattcatcagcctttgtctccgccccgactcgcagggtgtccagatatttttccgcgtagaaatcctccattccgtgctgtgcggcaagggccagcaccttttcctcctgcccctgctgtatccaggtaagcggagtgaaataccattcccgcatttcttccggtgaaatcgggtgaaaacttacatcatatcccataaaatccctcctcagtaatccagtaaaatgggcacccgctgttcctcggcaaaccgcatggcccgccagaacatggagaaggcaaactttgccagggattgggtgtcatactgagtgtgttccgggatgtccgccttgctatactgtccattcgggcccacggtcccgtctaccggatatccctccgtgtctgcccaatcaaggatggtatcctcatcggcctgccacgccagctggttcagcttctccagctccttccgcagtccgcccagggtggcgatcatcgcctgatcatcggtgggcagaggtgcctgaaagaagaaggcgtccgccagaggcagccaccaggtagccccacggaacagggaccacacccgctcctcgtctgccgcaaggcgggc

SEQ ID NO: 13725 - DNA, 28561 bp, Unknown
  gut microbiota DNA sequence
ggaccggaaggtccgcgcgctcagcttatcgaaaaacttcccccacgtgaagcctcgcagaggtccgtcgcctgcaggcgacggaatgaaatcaaaatccgtcatttccgaggacatgagcctcggaaatgacacttctcatggcgggtggggcgactatttcgaaagaaatcgagtcccgcacgccatgcagcctcttgtcgaaaaaggcacttgtgcctttttcgacagtctcagcgcgcggaccggaaggtccgcgcgctcctcttattttccaacgcagaaacgctggaagatccggtcggtgatgtcctcccgcacggaggcgccggtgagctcccccagggcggagagggcctcctccacgtcggtaagcagggcgtccggggtgacgccggcggacagtccagcctgggcgccctccagccgctccagcgcccgggaggccgcctcctcctggcgggcgttggtgagcagctccccataggcctcctccccggtctgccggggcagtgcggagcggatggcctgttccagctcctccaggccctgtcctgtcctggcgctcagctccaccacagggggcatggggtccagggacaggagggggaggggggcggagaggaggtcagacttgctccgcaccagcacggtgggggccagagacgtggcctgacacagaagctccccgtcctcctgtgtcacaggggaggagctgtcccaaagcaccaggatcagctccgccgactccatggcagcccggctgcgctccacgcccatctgctctacccggtccggggtgtcccgcaggccggcagtgtcgatcagccgcagcagggtgccccctacggtgacggtctcctccacggtgtcccgggtggtgccggggatctcagtgacaatggcccgttcgtagcccagcagggcgttgagcagggaggacttgcccgcgttggggcggcccacgatggcgcaccgcaggccgtggaggatctggctgccccggcggcaggtggccagaagggcccggagctgagcggcctgccgggacaggaccacctccagttcgctctcccggaaggggtcgatgtcctcgtccgggtagtccagcaccgcgtggaagtgggccatcacgtctaccagggcggagtagatgccgccgatccgccgggacagggccccggacagctgcccggcggcgtggcgggccccctcccggctggaggcttccagcagatcgcccaccgcctccgcctgcaccagatccagacggccgttaagaaaggcacggcgggtgaactcccccggtctggcctgtcgggccccgtgggagaagagggactccagccccagagagagcaccatgggggcgccgtggcagtggagctcagcggtgtcctcaccggtgtaggaggccgggccccgggtataggtggccagcaccttgtcgatgaccgccccctcccggtccagcaggtcgccgtagatcaggcggcgggggggatgggcctccagcggccggccgtccgctgcccggaaggcggcggacgcggcggagacggcctccggcccggacagacgcaggatgccgatagcccccggcccggcgggggtggccacggcggcaatggtgtcggtggttctctccatcagaacgatactccttcctggcggcgcgcttcgacaggaaacgcagcggttcctgcaaaaaatatttttgtgcaaactgggaggaaaaaatcccttgacaggcgttatgaaaaccgccgggctgcatacggacagcagagagtcaacataacaccctgtggaaaaccctgtggaaactgtggaaaacccgcccggcggtggaaaagaaggagggagaggcagtttccaggggtatgcatcgccctgtatatccgcatgtcaaaaaatccgggggcggagtgaggacagggacggagcggaaaaaagagcgaggaaaaaatgaaagaataccgccgtgtccgccatgcggcgaatacggcggtcctgactgtgaggggatgctcagacctgctgggagatgcggcggctgatggcccgggcggcctggacgccggaggcgcccgcctgggccaggccgcgggtgacgcccgccccgtcaccggcggcaaagaagccggggatggaggtctccagctcgccggacagctccagacgggaggagtagaacttcacctccgccccgtagagcagggtgtcgtgattggcggtgcccggggcgatcttgtccaggacgtagatcatctcaatgatgtcatccagctgccgcttgggcagggccagggacaggtccccggggacggcagcggtgagggtgggccgggtgaaggacttgcctaaccggtgttcattggtgcgcacgcccttcaccagatcgccgaagcgctggacgagcacgccgcctgccagcatgttggacagggaggcgatgtgcttgccgtagcggtagggctcgttaaagggctgggtgaagcggttggacaccagaagggcgaaattggtgttctcgctgcgcagcttggggtcggcgtaggagtggccgttgacggtgttgatgccctccacgttctccgccaccacgtggccgtagggattcatgcagaaggtgcgcacctgatccccgtaccctttggtgcggtagacaagcttggactcgtagactacgtcagtgatgtgctcaaagacctgggcgggcagctccacccgtacgccgatatccacttggttgttgatgaggtggatgccaaggcccttgcactcctcggcgaaccactcggcgccggagcggccgggggcggcgatgagccagcggcaggagagctcctcacccttgcccagggtcaggcggaaatcctcgccctcccgggcgatgtgggtgacgggggtgttgaaccggaactccagcttgtccttcagcccctcatagatgttctggaggatgcgcagattgttctctgtgcccaggtgcttgcaccgggcctggagcagatgcaggtcataggccagcgcccggcgctccagggccctggcctcgggggtggaggtggagaagcactcggtggtggcgccgtgggccacgttgatggagtccacatagtcgatcagctccatcacctcccgggcgtccatgaagtcggtgagccagccgccgaactgggtggtgaagttgaactttccgtcagagaaggccccggccccgccgaagccgcacatggtgtcgcacaccgggcagtggatgcactccttcaccttgcccgccacgatggggcagctgcggtggtagatatcccgcccctggtccagggcggtgatcttcaggtcgggatggaggcgtgccagctcataggcggcaaagatgcccgcctcgccgcagcccaggatgacgacgtcgtacatggggttcatgggagagctcctctcatagtgtagtagaaaacagatggcaggcccgcccaacaggacagacacatctatgatagcacagaaatgagaaaaagaaaagggaattggacaaaaacaggagggaaggagatcaattccgggacaggcggcccaccaccagttgggcgcacaggccggtgagggtgccggtaatgagcccggccagcaccagataagggagatagaccagcaccacccagctcttggcgatggcggcggcggccagcagctggcccaggttgtggcatacggcggacagggggctgctgacccagagctggccccggcccagcacccggcgcaggaggagcagggcgagatagctgagcaggccgccccccaggctgtacagcagggtcatcatctggccggaaaacaccgcgcccagaaagatccgggagaggaggatgagcagggtgtcccggggccccaggacgaacatggcgtagacggtgacgatgttggccagccccagcttgatgccggggatggggaccggagggggcagctgggcctcagccagaaagatggtcagggcgatggcggtgagaagggcggcccgggtgaggcggcgggcctgggaggggcgcttatcctgtggcggagtcaagaccatcccctcctccctcgatttgaatgaccagccggttgggcaggcagaccacggggacggtgccgtcggagatccatccctggtccacacagacctggtccgggcagtccgcggactccaccctgatccggcccggctgggcggtgatggtgttggtccgtccctggaactccactgtaaaggtgagaggggcggagagactgtccagatcgatctcccggatcaagacaccgtcctgatagatacgggccatgtgcccgcccccggaccagcggcccagcaggaggatggcgccgacggacagcagggcggcggcggccagcacgcctacccagaatctcgtgcgtttcatagctggatcaccgtcacctccaggtcctgatagtcctctgccagcgtgaaggaaccagccagaccggcagtgacccacagggaaccgtcctccagcaccagcaccatctcaaagtcctgatgggtccgccaaaaatcggccccccagtctgccccccggacgaacacggcggtggagagagcgtcgcagtacacccccagaggggagacgatggtgacgctcttcaggccggaccgggcgggagcggcggtctccgggtccatgatgtgccagtaagtctggccgtcctcctcaaagtagcgctcatagccgccggaggtgatgaccgcctggctgccggtgagctccaggacccccaggtagccggagctccccgcctccggggtctggatgccaatgcgccagggagagccgtccggcttgtcccctgcggtccgcacgttgccgcccagattgaagatggcgggttccccgccggccagctccgccagcagatcgctggcccagcccttggcgatggagcccagatccagctgcatcccctggggcaggcggacccggcagccctccgggtccagctccacctgggtgtagtcgatgcgggcggccagctccgccagctcctccggtccggggacacggtactcgccggtggtgaagccccaggcatgaacggcggagtaggcggtgatatccagagccccctgggtctcccggccataggagagggccagggagagcagctggaaggtctcctgagagaccgggacccaggccccttccccatggttgatggcggagatgtcgctgttctcgtcggtaacggagagcagatgctccagctggtagatcctctccgtagcctggtccagcacctgctggccgctgtcaccataggcggtgagctccatcacggtgttcatggcaaatatggtagaggaggtctccctggtctgggcgcagccggacagcagcagggacagcaccatgggcaggaacaagaatcggacagagtgcacagcgttacctccaaagatcgggatgttctgcatacacagtgattattattttaacatatggccggggctttgtcatgaaaaattgaaaaagatatggagagccatagatcggaggagcaggggccgcctggacggaaatgctgaggggtggacctgaaataccttttccgtggaggggaggtgccccgcgcatgcgcaggggatgagagggcgtcttttctctccggggcagggggcggagcgtgccgggaggctggacttttcaaggggcggggcccctttgtcgttgcttttttcctcgatttggtgtaaactagggtatcattttattgtcaggaggagaacatctatggatgacaaggtaaaagaactgctggaccgcatcagagacaccgcctccgcagccgccgacaccgcggcggacaccgcccgggtggccggacggaaggccggccagatggtagacgtggccaagctgaacgtccagctctttgacctgaacggagagttctcggacattctgaaaaagctgggacaggtgatgtacgacacccacaggggccagggcggagagagtgccgacgtggccggccttctggagcgggcggacgaggtctcggaaaagatcagagaggtgaaggcccgcatctccgatctgcgccagagccggacctgccctgcctgcggcgcctcctgcggcaaagaggacaaatactgccggggctgcggcgcccctctgtaaggagacggagatggacttcacattccaacagtatgaagagagcgcccaggccatccgcgcccggctgggcggcttcgcgcccaaagtggctatgatcctgggctccggcctgggttacctgggggaccaggtagagggggcggtgacggtcccctacggcgagatcccttatttcaaatcctccaccgccccggggcacaagggccggctggtcttcggcactctggagggccagcgggtggcggtgatgcagggccgcatgcaccactatgagggctactcctatgaggaggtctcctacgcggtccgggtgctccggctgctggggtgcgacaccctcatcgtcaccaacgccgccggctgcgtccatacgggctggcaggcgggggacctgatgctcattactgaccacatcaagctgttctcccagtcacccctgcggggggagaacctgccggaattcggagtgcgttttccagacgcctccaagctctatacgccccgcctgcaggagctggcccggcagaccgctcaggagcagggcctcaccctgcgggagggggtctacttctactgctacggcccgcagtacgagacccctgcggaggtgcgggccgcccgcatcctggggggtgacgcagtgggcatgtccaccgcgccggaggtcgtcgtggccggacactgcggcatggaggtgctggggatcaccctgctgtccaacatggccgccggcatcctggaccagcccctctccgagcgggaggtgctggacgccgccgaggcggcgaaggagaagttctcggggctgatccgggcctgtctgcggcggatgtgagccgcaccggcgcgcccctgttccgcagcttgaggagaagggagcgtctctatgctgacactttttaaccgcgcggagctgctggtcacctgtgacatgatccggctggcccgggtccgggaagctctggctgccgctgacatcgattatatctgccgagccaaggacctgtctggccgcggggggcatacctccagctttggcgtgggccccggggcccgggtggagtataaggtctatgtgaaacggacggacctggagcgggccaagactgttttgtaaggagcgagaggatgcccattttattttctgacgtgaccgttgtgcccatggacggggcgccgcaggtgctggaacacgcctatgtggcggtagaggggacgaagatcgcctccgtggggactgagccccccgaggggacctttgaccgggtggtggacggcgccgggaaggtgctcctccccggctttgtcaacgcccacacccacctgcccatgaccctgatgcggggctacggcgggggatgcgacctgcacacctggctcaaccagtatatctttcctgccgaggcgcgcctggacagccgggcggtggcggcaggggccgggctgggcctggcggagatgatcgcctccggcgtcacctgtgtagctgatatgtatatgcacaccgggaccatcgcggagcagatcctggaggcgggcatcagtgccaacctgtcctgcggcggggtgtacttcggcgcgccagaggatttctcccccgagacctgcggcgactgccggaaccaggccgccctgacagaggagtggcatggggcgggggcgggccagatcctggtggacgcctcggtccacggggagtacacctccaatccccctctgtggcggtggatggccgagtacgccgcagagcaccgactggggatgcacgtccacgtctctgagacccagtcggagcaccaggccagcctggagcggtggggcaagacccccatccaggccctggacgggtgcggggtgtgggactgcggccgctcactggcggcccactgcgtctacaccacggaggaggactgggctctcatggcggagaaggggatctcctgtgtccacaacccctggtccaacctgaagctgggctccggggtggcccctatcccggccatgatgcgggcgggagtcaacgtggccctgggcaccgatggcatgtcctcccacaacagtgccgatctcttctccgatatcaagctggccgccgtcctgcacaacggggtggagcgggaccccatggccgtgaatgcctgggccgccctggagatggccaccgtcaacggcgcccgggccctgggcagggataccggggtcatcgccccgggaaagacggcggacctgatcctggtggacctctccgcccccaatctcatcccctgtcacgacccggtggaggacctggtcttttccgcccacggctctaatgtggagatgaatatggcccggggacaggtcatatatgagaaggggagctttctcaccctggacctggagcgggtccgctgggaagtggagcactacgccctcccgctgatcttcgggtgaggacccagtctcacaaattgaggaggatacactatgacccgacaagaccaagcgccccgccgaatggcagcggccaaaccgaatacattttttggaggagccgccatcctggcaatggggatcttggtggtaaaggtcatcggcctgttctataagatcccgctggtcaacatcatcggcagcgagggaagcgccgatttcaacaacgcctacaacatctactcagtgctgctgaccatctccaccgccggcctgccggtggcggtgtccaagatggtgtcggaggccaacgccctggggcggcagaaccaggtgcacaaggtgttccgcctgtccctggcagccttcctgaccctgggtgtggtatccttcctgatcatgtattttggctcagagcagctggccggcatgatgcacgactcccttgcggcggcgggcatccgcgcgctggcgccggcggtgatctgcgtgggctgcctgtccgccttccggggctatgcccagggccacgggaatatgacgcccaccgcggtctcccagatcctagaagcgctgtgcaagctggtcatcggactggggcttgcctactggctggtgcgggcaggccagcccagccatgtggcggcggcgggggccattaccggcgtcacggtgggcaccatcctggccctggcctatatgatcttcaacttcgtctccacccgcatgcgggaggagaaggacactcaggacgctccggactccgcccggcgcatcctgtccaccctgatgaagatcgccatccccatcaccatcagctcctccatggtgggcatcgtcaccgtcatcgactccgccctggtccagggacagatccagaaggtgctcatctccgacccggacagctgggcgctgtaccagcaggtggtggacttcgcccccctggaggcggcacgggacgcctggcagcaggccgtgagctccggcgcggcggcggaggcggtctcccagctctacggggcggtggagctggcggcggaaaatatcagccgtagcctctatgggaattacagcggcgcactgaccatctataacctgcccctctccctgatggccgccatcaccgcctcggtcatcgccgcagtctccgcggccctggcccggcgggaccgccggggggcggccaggatcaccggctccgccctgcggatcaccgctctgctggctttccctatgggggtggggctcttcgtgctgggcacccccatcatccgactgatctttccggagctggacgcctctgtggcggggcccctgttgtctaccctgggcatcgcctccatcttcgtctgcctgatgctggtgtgcaactctgtcctccaggcccatggcttcatcaatctgccggtggtcatcatggcactggggggcgtagtgaagatcgtcaccaactacaacctggtagccgtgcccaccatcggcatctccggggcaccggtgggcaatgtgctctgcttcggactgtgcatggtactggacttggtggtcatcgcccgggtgatccacggccggccggactacctgcctctgctggccaagccggcagccgcggcgggcgtgatggggctgggggcctgggcggtgtacggcctgctgtccaagctgctcagctatgaggaggttacccaggcgggggagacgatccagaccctggggaagaccggcaacgggatcgcggtgatgggagccatcctgatcgcggtcatcatctatgcggttttggtggtggctctccgcgctatctcccgggaggacctctccctcatgcccaaaggggacaaaatcgcgaaaattttgaggctatgagctgatttctagtgaaaataccttgcagaggatgagaaactgtggtaaattttcaaagtatggaacgatacagcttccaggacctgaaccggatcatggcgctgctgcgccagccgggcggctgtccctgggatcgggagcagacccacgagagcatccggcggaacatgctggaggaggcctatgaggcggtggaagccatcgacgagaaggaccccggacacctcaaggaggagctgggggatgtgctgctccaggtggttttccacgccagaatggcggaggaggaggggctcttcaccctggacgatgtggtggacggcatctgcaaaaagctggtgttccgccaccctcatgtctttggcacagtggacgcccgggactccggccaggcgctgaacacctgggacgcccagaagcgggaggagaaggggcagcgcaccgctgccgacaccctggacagcgtggccagatccctgcctgccctgatgcgggcggagaagatccaggacaaggccagaaaggcgggctttgactgggcggagatggggccggcgctggacaaggcggaggaggagatgggtgagctgcgccaggccgtggaacagggggccaatgtggaggaggagctgggcgacctgctcttcgccgccgtcaaggtgggccgctttgcagggctggacagtgagcaggccctgcacggcacctgtgaaaagtttatccgccgcttccggcgggtggaggagctggccggaggacggccgctggacagcctgggactgcaccggctggaggagctgtggcagcaggccaagcaggatgaggcttaaaggctgaaaagctttaagtaatattattcaaaagactggcgcacaggcgccgaaacatgctttaggaggaaatcacaatgaataagaccgaactgatcaatgccgtggctgagaaggctgagctgtccaagaaggacgcggaggccgccgtgaccgccatgatcgacgccattaccggcgctctggtggaaggcgagaaggtccagctggtcggctttggcgcctttgaggtgaaggcccgtgccgagcgtgtcggccgcaacccccagaccaaggagaccatcaccatccccgcctccaagactcccgtgttcaaggctggtaaggccctgaaggacgccgtctccaagtaagcaggattatagaaaaagggggtgcctccggcacccccttttctccatggaggaatacgatgcgattggataaatggctgaaggtatcccgcctgatcaagcggaggaccgtggcaaatgaggcctgtgacaacgcccgggtcatggcaaacggacggccggtgaaggccagctatgacgtaaaggagggggatgtgctggagctgcggttcggagagagaacggtcaaggtggaggttctggtagtggcagagcacatgggcaagaccgaagcggccgctatgtaccgggagatcctttagagaaataagaaagcgcgctacccccaaaaacaggggcggcgcgcttttgtcattcagctgtgttcccggatgctggacatctcctgggcgatgttcaggacatggtcgccaatgcgttcgaagtcggtgagcagctcagagtaaaggatacaggcctcatcagaacaggtcccggccttcatccgctccagctgatccttgcggaacaggtcggtcatgtcatcgatgcgctgctccagagcagagacgtccgtcagccagagcaggtcgccagcctcccgctgatgcagggcgttcagcgcctccagacagatgtcccgcatctggcagatctcctcctgagcctgggcggagaactggatgtgccgttcctccagcagcttggagtagccgcagatgttgatggcgtggtcgccgatgcgctcgatattgccggtgatggtaaaatagctgctgacgatgctggacccctgctcgttggtctcataggtgatgagacgggaaatatacttggagatctccttattgaggaaatccaagtagctctccatcttctcggccttggtcagaagactgctgtcccgactgagcaccgcgtcaaagctggtctcgatgttgtcctgggccatatccagcatccgatccagctcctgctgcagctggccgatgtggatagcggaggcgcccaggttgccgtccttgctgctgacctggacgggggtcaggtattccaggtgcatctcgtcccggttctcctccggctgctcgggcaggatacgcaccgccaggctggccagttgattgcccagaggaagcagcagaagggtagtgacaatattgaaagtagtgtgcatgttggcaatctgggcagccggcgcatcaggggtaaaggaggccaccagatcggccaagggaaacaggatgcagaggatagtaaagagcaccgtgccgatgatgttgaacatcaggtggatgatagtagcacgtttggcgctgcggctggtgccgatggaggccaggaccgcagtgatacaggtaccgatattctggccaaagaggatgaacacagaactggaaaagctgatggcaccgctggtggccagagcctggaggatgcccactgaggccgaagaggactggatcagggcggtaaacagggcgcccacggcgatgcccagcagggggttggagaatctggtcatcaggtccacaaaggcctgggagtcacgcagaggcatcatggaggagctcatcatctccatgccgataaacagcacgccgagaccggccatgatctggccgatgtggtgggccctgggcatcttgacaaagaccaccatggccacgccgatgaaagcgaagagaggggcaagggcgcccacgtccagagcaatcagctgtccggtgatagtggtgccgatattggcgcccatgatgatccagaccgcctggttcagggtcatcatcccggaattgacgaagcccaccaccatgactgtggtggcggaggaggactggatcacggcggtgatgcccgcgcccaccaggacgcccagaaaacggttggcagtcagccgctccaggatcagcttcatcttgctgccggcagcggcctccaggccggagctcatcatctgcatgccgtacaggaacagcgcgagaccgcccaaaagactcagaaggcctgaaacagacatagggattcctccttcaatcaacacagcttccgccgagaggagcgaaacaaagggcatggaaaaagcataacccacatcataagatgatcggcgcgggctatgcttgaaaactgtaccaacagggttccacatcaaaaccatgttcaataccggaatattctgcaatgatattataagggggaaggcttcccagtgtcaataccattcttggacaaaatttgacagccggagcataggactgttttgcgagatgcgcacactggggtagaaaagcgaaatgtctaccaaaagtctaccaaaaaagggcggcggtggcctggagtttcagggccttgctgccccttctgttttcatgtgtctaccaaatgtctaccagggaaactttttaggcgtaatctcggggatttttcccttgatctccccctttttataaccaattcctcctgtgtcagaagtgttgtacaggcatagtgggccgaaatgttctggaaaaggcccggtttgtcagaaaacagcgacttttgtcaatataaaaaggaggaatatccaatgagaaacctgaagcgtgctctcagcctggctctggcttccgttatgctcctgggcatgatggtcgtgggctccagcgctaagggtatcgacgatttcacagacaaggccgagatcgtcaatcaggatgccgtggcggtcacctctgccatcggcatgttcgagggctacgaggacgggtccttcggccccgagaacgtagtcacccgcgccgagatggcggtcatcatctgcaccatgctgtacggtgccggtgtgaacgtcaaccagttcgcagagaccagcgtgttcaccgacgtccccgcctgggcggagggctatgtgaacctgtgctccagcctgggcatcgtggccggcgtgggcgacggcaagttcgaccccaacgccaccgtgaccaccgcgcaggccgtgctgatgctgtgccgcgccctgggctacttccagagcgccgctgacttcggcagtgactggatgctggccgccaccgctaagggcactcagctgggcctgtacggcgacctgaagctgaccgccaacgagggcctgacccgtgacaacgtggccgagctggtgttcaacgccctgaccaaggctgtgcccgtccagtacaacgagctgctgggtgtgtactacaacgagaaccagggaatcatctactccctggagttcaactacctgcagaccctgggctacaagaacttcgacctggtgtaccgcaccgacaccgagaccatctatggccgtcccgccaccacctggggcaccggctcttacaacgcccgcaccgatgccggcaccactcagaaggacgagtatctgactgagaacggcggcctgatcgccgacaaggtccggatgctggacaaggacgagatcatcaccgtccccaacacccccgactacatctacaccaacggcactgatgagtctgacgtgtatgctgatctgggtgctgccgtgtgcaatgacgcccgcggccagcaggctgacgaggagtacacctggactgccttcatcaacggtgaggagcaggatgatgagatcatccccgggaagaatgttgatgagaagtgggagtacaccgacaagggcgctgtcgtggagatttacatcgacgactacaccctggacgtgaccgtggtggagatcaactactacctgggcgaggtctccaacgtgaagaccgatgatgacgacgctgactacatcaccgtccgcgctctgtctgaggaacccagcctggacgacaacaccttctacaccaccgattttgctgaggacgactatgtggtcttcactgtggacttcaacgaggacgaggacttctacatctgcgagctgatggcccccgagaccgtcaccggccaggtcacccgcgtccagaatgaggacaacagcgagaatacctatgtgcgtctcagcggtgatgacggcaagtactactacaccgctctggatacccacatggtctatgatgtgagcgatccttcctggggcgacaagcaccccgagctgaacgtggagtacgttctgtatctgacccccgaaggctatgttctgggctttgagcccgctgaggagtccatcgatcagtacctgtatgtggacgactccgacgaggagctgaaagactgggtggcccgcgtgtacctgcccgacggcaccaccgccaaggtggacgtgaagagcaaggtccgcgacctgcctgagcttgaggccggcgacttctggcccgccaacttcaactccaatggcttcgatgccgatgacgagatccagtgggtcaaaaaggatgagaagaccgtcagcggcattgacaacctgatctggaaatactctgtgagcaattctgacgtgtacaccctgacctatgccgaggatcagtactactatgacggcgctgagattcacaacggcaaggcctacatcgacgccggcgacgaggacttcaagctcatcgtggaccgcaagaccatcttcgtggatgtgaacggcgaagtggcctataccggctatgacgaggtccccaatgtggagaacgccgagatcgcctatgtcctggacggcgacaacaacgagaaggcggatggcaagatcgccgaggtcgtcttcatcctggacggcgagatctatgacgacaacgccacctatttcgtcctggccgacacagaccgcgagtccggcgactatgacgatgacgactactactgggagtatgagaacgcctatgtggacggccagaagcagagcgtgttcgtgacctatgacgccgtgaacgatctgtacggcagccccagaactgtcctgaaggaaggcgtgctctataaggccacccagaccatcgaggacggccagtacatctccaagctggaggaggccgccgctaaggtgagcggcgagcccactgccgtcggcgacaatgccttctggatcgacgatgccaacgataaggagcacaagttcgacaccgacgaggagaccatctatgtcaccgtccgcaagctggtggacgtgaagggcaatgtggagtggaagatcgacgatggtgacatcgacgatctgaaggacctgaagtccgacaagaacaccacctactccgccaaggatgcctgggtcatgaagaccgttgatgacgagactgcccgtctggtgtacatcttctggactgagaccgagaagggcgacacccgcgatatcaccttcatcggttccgacttcactgtgaagtccgagtccgccaccacttctgtggacggcaaggtggccactgtcaacgacaagggcatggatgccaagttctccatcgtctatgatgcggcgcagtttgacctggtctccgtaaagctgaaagacggcaccgtgcttacagccaaagacggcgtctacaccatcaagaacgtcaccaaggacatggaggtcgaggtgaccaccaaggccatcgtgaaggctgacggcactgtgactctaaacggtgacggcaccatcactgtgacctacgagggcgagatgcccgctctggaggcggccattgcggccatcgagaagaagctggctgacgagggttacaagaacgtgaccatcagcaaggccggctccacctataccttcagcggccaggataagctgggctatgacagcaagttcacctgggatgtcgacactgatctggtcgaggtcatcacctacaccctgaacggaaaagagacgaccgctcccgcaggcgagacgatcacgtacacttctaactggatcgtggtgaacggcgagggtgttcagactgatgtcatccctgaggctggcgatgtgatcctgaccaaccagatcaagatcaccgaggacactgaggtgaccttcattgcctctggcgagaagtacactgtgaagggcaccgacgacggttccacctacgctaaggtcgacgcaaattatgttaagtatggtgacgagactatagctctgaccgctgacactgtcgtgactgacggctatgtgtctgtaacaatcgatgatgctgaagctgtttacaagacgactggtgatgccgatgttgacagcctgaagggtaccggcaccggctacgtaatcaacgatgtgtatgccgctggtgatacctggactgtggacgtcagcaagggcgacgtggttatcaagagcggctatgttaaggtcacctatgctgagggcagcaacgtgactggtcctgcctatgtggaagatgatgcaactgaggttgaaatctcttacactgtttctggcctgcaggctggtgatcctgtgactgtcaactttggtggaactaacgtcaccagtagccagcaggactcctttaccgctgttgcgactgagatgacccgcaacttcgacctgcagattgatgctgccggtaccgatgttgtggacattaccgcaaccatttgatggataggcgtatttcttgaaaatcaccccatctatttgaagagcacccccgggccgaagcccgggggtgctcttattacggctcaggcatccgcgtccagcagggccagcagggtgtagcgctccccggcggcgtttgcggcaagcactgggtcgtcattggccagttcccagctcacggtgctgccctcccatacagcccgggatttggtgtccacgttcccgtaccgcagatagatgtaggattccccctggatcgcacacaaaaaggtcacgatcccgcccatgatcagcaccgccgccggcctgtggggaaaggtgaagctgcggccgccgctccccgtccccgtataggtgagcatgtagagctggcagttgcgcgctctcagctcgtggagggccctgtcgatcctggcgttgtccgcattgaactcggtgcgcaatacctggtcccggccctcccattgattcagctcataatactgtgtctgtccgcttgccataaaaactccctcctgttctgactgggcccgtcatatccgggcccgttcaaaaccggagggaaacgctgttttgtgagatgttttgatacaaattatggaagcttggcagaactatgcccagcttacctccgcggatacagcacaccttgggcactttgcgggtcatgcgctgggcgtcccaccgccgccccatccacacccctgctgagatggcgggacgccctctcaaaacgcatggtcaaaagcaatagatgctatgtgatattggtatttgtcttttgtgcaggtttctcggataatacaagtacaagacaggccgttgggaggtgacactgccgctggaccctcccaggggaaaacgacgggaggtaacggcatgaaagtaatcgatccatttttagatggagaaggagtctggcagggggacagtcccggcacgatgcgcaagcgattccagtgctttggcatcaaaaactcggtggacttctgttccaatgtcacagtgtacgcacctggggaggggagcgtgttccacaaccacccctcctctgaggagctgagctatgtcatcagcggctccggtgtgatccaggacatggagcagaatgtgaaggcccatatcgatcagggaaaactgatcctgatagaccggggtgagatccaccggatcttcaatgacggaagggcgccgctgatcgtccttctggtctgtacggcgcacactcccatgccggagggctgacctgcacacaaggaaatgaggaggtataaaatgaaactgctgaaaaaaatcgacaagaatctggaacgctgggtcatgtttctcctgctggcgggtatgacgctggtgctgggtatccagatattctgccgcttcgtgctcaacaactcgctgacctggtcggaggagctggcccgcttcatgtttatctggagcaccttcctcagcatagggttctgtctgaaggaagggatctccctgaagatcgacactctgatctccctcttccccaaaaaggtacaggcggtcatcctgctgttgggagacgttgtgatgacagtctttttcctctatctgctccccagtgcctgggagttcgcctacgcttcagtggaaaacggccagaccagcgccgcctgcgggatacctatgtattttgtccagggctccctgatggtgggctttgcgctggccgcattccgggcggctcagggggtatggagcaacctgcgcaccctgcttcagaaaggagatgagtgagtatgtcagccgtggtcctttttgtcctgttttttgtcatcctgctcttcggcctgcccatctcggtcaccatgggcatcagctccatcctgccctgggtcgtggacaacaccttcgcggccaatctggtcatggtcctgcggcagatgatgagcggcgtcaacagcctgactctgctggccatccccatgtttatgctgtccggcaccattattgcccggggcggcatctccaaaaagctctttgacgtctttacttatttcgtgggcaatgtgattggcggcgtgccctgtgccgtcatcatcacctgcctgttctacggggctatctccggctccgcccctgccacagtggcggctgtgggcgccatgactatcccggtcatggtcaacctgggctattccaaagagttttccaccgctgtggtcacggtggccggcggcctgggctgcatcatcccccccagcatcccctttgtgctgtacagcacctcggcgggcacctccgtgggcgatatgttcattgccggcatcgtgccgggcctgctgctgggcggcctgctgatgatctatgcggtctactactccgcccgcagaggggaggaccgggtgcgcatcaaggcggtgatgggggagctgaggggacagggattcctccggctgttcctggacagcttctgggcgctgctcaccccggtcatcatcctggggagcatctacggcggcatcgccactcccactgaggcggcggtgatctcggtctactatgccctgttcgtcagcgtgttcatttataagaccatcaaggtctcggagatccccgctgtttttatggagtctctgaagacgatcgcccccatcctcttcgtgctctccgccgccgtctccttcggacgcgtgctggccctgatgaacgtgccgcagatggtgggtgcttggatcacatcctccttctccagcaagtggacgatcctgctggtggtcaacatcttcctgctcttcgtgggcatggtgatggacgccgccccggccatcctgatcctcacgcctatcctggcgccggtcatgaccgccatcggggtggatctggtccacttcggcatcatgatggtggtgaacctggcagttggctttgtcactcctcccgttgggatcaatctgtttgtcgccagctccatgaccaagatcccggtgatccggatcgcaaaggtctcgctgccctttaccatactgtttgccatcggcctggttctgatcgtgatcttcccacagatctcgctgtgcctgatccgctgacttctgtttcctcttctcttgcagaaagacgctgcccactctccccgggcagcgtctttctgcttttctatatatgcgggacatcgcgcccctgtgctgtgggaacggttcaggagggaagctcgcccacccggtccataatgtagtcccgaaaatttttgaccactggccgcagggtctcccccttgggccagcacatgaacatggggcggtggagctccgaattctccagcgtcagggggaccacatcgtagatgctcagctctgtcattctgggcatgagggccacgcccagaccagaggctacagcactggccatcaccttttccgtgtccacttcctggatgatgttgggggtgagctgaaaccggcggaagacgtcgtctatccagtaccgggtcccgcagttataggtataggagaccatgggctcccgaatcagatcctggagcttcacgctcccgcgcagagccaggggatggcggctggagaccacggcgacgatctcctcatcaaaaatgtgaaaatattccagttggtcgctgtccattcgggcgccgaaccccaggtcgagagtccggttggcaaaggcgtcaatgatctttgccgcctgcttttcactgaactcaaactggatggcccggttgtcctcattttcgtaaaagcccttgatcatattggggataaagcggttgctcacggtgtaagccagggcaatgcggatcttgcccatgttggggttgagcatgtttttcagctcctggttggccagctccagctccgcggtgatccggtccacatggatcaggaactgctttccgtattctgtgatatcaatattccgccccaccttgaagaagagagggacgcccagctcacgctccagatccccgatggaatggctcaggctggattgggcgaccaggagctgttctgcggctttggtatagtttttcagcctgctgatggcctgaaagtaatacagctgctgaagattcatgtcagcggtccctccccggaatttgggtcaaattttgtctaaaattattatagcacccctttttccacagcgtcaagacaggaaaaagtcccaaaaagaaccaaaaagaaaggtatgttcaaaaccgatctctggtatgtgataccggtattggaattctgaaaagggctctgataagattgagtcatcagaacaagcggccgcctcaggcggcgagtcaaatcaggaagggagaattcaaatgaacaccacaaagaaactgatcagcttgaccctcgcagcagcaatgtctctgtctctggcagcctgtggaggaggggggacctccgcgggttccaacccgcccccgtccggctccagcacaggctccggcgccgttcagagcgtggcggattacgacatccagcctgaactggacagctctgtggactacacccagggcgactcctactccttcatcattgccaccgacggcgctgaggaccgcgtagacggcctgttggtccattacatggcggatcagcttaacgccatcaccggcggccgcatccagctccagatgtatttcaacggctccatggggaccgacactgagctgtgcgaatctacacaggccggtgatgtggccttcttcctggggtccaccgcattcaccgccaatttcgtccctgagctgaatgccattgatctccctttcctctatcaggatgcccaacagttccgggataccatggacgatgagacggtcttccgcttctacgaggagaaataccaggataaaggctttgagctcatcggcttcttcgaccagggcatgcgtcagatgaccagcaacatcaaggtccagtcccctgacgacatgcagggacagaagatccgggtcatggagaaccaactgcacatctccatctggcaggcgctgggcgccaaccccacccctatggccttctctgaggtctatatggcgctgcagcagggcaccatcgatgcccaggagaacccctttgaggtcatctacgccaaccgcctgtatgagcagcaggactatgtgatcctgacaaaccatctgcccgcatcccacaacctgctgatcagccaggtcgtctacaacggcctgagcgatacagacaaggagctgatcatggctgtgggcaaggccgccattcagtattccagagagcagtgcgacgcccggctctctgagcgtatggacttggtggctcagaccggaaccgagatcgtggaactccccgccgacgttctggagcagctgcgggacaagtgctccggtgtctatgacgaggtccgcgccacctacggcgatgagctggtggacatgcagatcagcaccgctgagaaatacgcctgagcggaacgtctgagatagaaactgttcgtcctccggggagcgggcaccgcgggccccgtttcccggaggatgatatcttaggaggcaactgatgaaacacctttactccctggtccatttgacaaacatcagctgtccgcccccggagatgatccgggtggcggccagggcgggctatgatgcggtcagcctgcggaccatccccatggggctgccgggggagcgtccctatgacatcgcaaaggatccccatctgcttcgtgagacccggcgggccgctcaggagacaggcatcctgctgcacgatacagagaatgcccgcatcgcggctggagtggatgtgcaggactatgaaccggcgctggcggccgcagcagagctgggcatccggcacatcctgaccaacatctggaccccggaccgctcattttataccgatcagttctgccggctgtgtgagctggccgcccgatatgagcagacggtcagcgtggaattcgtcacatgggccagtgtcaccgatctccgtcaggtcaggcagctgctcctggactccggcaaagagaacgtgggcgtggtggtagactgcctgcacttttaccgctcccgggtccagctgcatgagctggaggagtgcccccagagctggttccattacgcgcacctgtgcgactgtgaggctccaattcccacagatgaggcggcactgatccacaccggccgggcggaacgcctgtatcccggggagggtgcaatccccattgcggagatcatttccaggatcccgcaggtggtgtgcggtgtggaagtgccccacctgacaagagtggaaaagataggctatgagacccatgccagacgggccctggaaggggcaaaggcatgtctgggggagcaacgataagactggagggatatgcaatggagcgatatgaacataaagttgtgctgatcactggcgcgggggatatcgccggcgccactgcccggcggctgctgtctgagggcggaaaagtggcgctgaccgatttttcccgggaggcgctggaccaggaggccaggatgctgaaagaggaaggctgggatgaggaccgggtgatgaccatcccgggcgacgtccgaagcttggaggactgccaggccgccgcagccgaagtaaaggaaaagtggggcaggatcgacgtcttggtagccacggcaggtattctccgtcactttcccatcgatgagctgacagaagcccagtggcaggatgtgatcgacattaacttgacaggggtctatcattcggtgaaagcggtggtccccgccatgaaggagcagaactacggccggatcgtactgatctcctccattgggggccgcacgggccgcccgggggtgggggtgaattacgctgccgcaaaggctgggatcaacggcatggccatgtgcctgggatatgagctgggcccctggaacattaccgtgaacagcgtagcgcctgggccgctgaaggggaaaatgttcctctctctctctcaggataaggtggataagctctctgcgggtgtccgcatcccgagactgggagagctggatgacatcgccggcgccatcgcatacctgggcagcgatgacgcatcctggaccactggtgaggtgctggatgtgaacggaggcctgcaatactgaccgatccagaaccgtgggcccaacgagaggtcactcctgcgggatacgcctgcagaacgcaaaaagatccccgtccattttcacaatggacggggatctttcggtgtgaaaagggctgggctcagccgttgctctgagcctggaccagggcaaccagaccgctgctgccgatacggtcggcccccagttccaggtaggtctgggcctcctccagggtgcggatgccgccggccgccttgatcctcacatcggggctgcagtgctcccggaacagcttcacatcctcataggtagcgccgccggtagagaagccagtggaggtcttgataaagtctgctccggacatggagacgatacggcacatggcctgcttctcctcacaggtcagcaggcaggcctccacgatgaccttcaggatacgtcccttacaggatgctttgaccgccttgatctcctccagcaccccctcccagtcgccgctcttcaccaggcccagatcagccaccatgtcgatctcgtccgctcccccgcggatggcgtcctcggtctcgaacaccttgacctcaggagtggagtagccgttggggaaacccaccacggtgcatatcttcagctgattgcccacataggcggcggcccgcttcacatagcggggcgggatgcagacggaggcagtgcggcaggtgaggccctcgtcacagaccgtcttgacctggtcccaggtggcggtgggggtcagaagtgtgtgatccacgtggcgaagcagttcgctgtaatccatattctatgatctccttcctgtatggggcgcagagatacccattttcggctgttttctctctattttaccctatggcgcggcgattgtccagccccggggccggtcattcagaaagaaggggccggaggatctcctccggcccttatttgcgcctgtacagtctatgaggcgccaactgaaaagattcctggccgctgacgccgttacagagccgccttcagtgcctctgcccggtcggtcttctcccaggacaggtccaggtcgtcccgcccaaagtgcccataggccgccagctggcggtagatggggcggcgcagccccagatcccggatgatggcagccggacgcaggtcaaagacttgttccactgcgtcggagagctgttcgtccggcaccgttccggtgccgaaggtatccacgcggacggagacggggcgggccacaccaatggcataagccagctggacctggcagcgccgggccagcccggcggccaccacgttcttcgccacccagcgggcggcataggcggccgaccggtccaccttagtggggtccttgccggagaaagcgccgcctccgtggggagcgctgccgccgtaggtgtccacgatgatcttccgcccggtgaggccggagtctccctgaggaccgccgatgacgaaccggccggtggggttgacgtagatcttggtctgatcgtccagcagctcggcagggatgatgggcttgatgaccagctggatcatatcctgccggatctggtccagggacgcctccggcccgtgctgggtggagaccaccaccgcgtccacccgcagggggcggttctctccgtcatactccaccgtgacttgggtcttgccatcagggcgcaggtagtccaccagtccctccttgcggacctgggtcagacggcgggccagccgctgggccagagagatgggcagcggcatcagctcgggggtctcgtcgcaggcgtagccgaacatcatgccctggtccccagccccgttgtccaggccgtcgtcctgggtgccctccttggcctccagacacttgtccacgcccatggcgatgtcgggggactgctcatcgatggaggtgaccaccgcgcatgtgtcacaatcaaagccgaacttggcccggtcatagccgatctccttcacaacctgtcgggcgatctttgggatgtccacataacaggaggtagtgatctcccccatcacgtggatcaggccggtggacgccgtggtctcacaggccacccgggcgtccgggtcctgggccaggatggcgtccagtaccgcatctgagatctggtcgcagatcttgtcaggatggccctcggtcactgattcagaggtaaacagtcgctttgccataatatttcgtcctttcttctgtcggggggatgaaaaacgctccgccgaggcggagcgtcagagtccatgcaccctcatctttcgatacactaccgccggatttggcaccttgcggaacgcaggttgccgggcttcatcgggccgttccctccaccactcttgataaggctattcagtttgtaaaaatcattctatcagattttgtagatttgtcaatggaaagatcaagatccgccgcagttttttacagtgtctttgccagctcggagatgatgtccacgcaccgctggatgccgatgattccgctgtccagagagaggtggtagttctgggacatgccccaatccccgtcggtatagtgcttgtagtagacgcggcgcctcttgtccttctcctccaggcgtttttccgggctcttctcgctggagccgtacaggcgcacgatacggtccgcccgggccgccatagaggcgtgaatgaatacgttgagacaatcctcccgttcccgcaggatataatcggcacaccggcccacgatgacgcagggctctttttccgcaaggctccgaatgaccctgcactgaatggcccaaagaaaatcattggcggacattccctccatggctccctgggacccccgggcagcaaaaccaaaagagagccagtttttggagggggcatactcgccagcctgttcaatgtacttctcatcaaagccggtctccaccgcgacctggcggaccagctccttgtcataataagaatatcccagcttctgtgccacctccttgccgatggtgcgcccgccgctgccaaactcacggctgatcgtaatgattcgtttgctcatactatcgtcctcctacaacaccggatcttgagactattggccacagaaaagatatgcactgaggcatacccttcagaaaaggtacactgtatttccgaaaactccgattcttttgtgtgccccctagggggcgaaaacctctacacacaaacaaaaaccgaaattggagatttttaatgattatactatgccaatgcaggtttttcaagtgtacagggaatacaccgttgcaaagacagatgtaaaaaagcaaaatgtctaccaaaagtctaccaaaaaagggcggcgggggcctggagtttcagggccttgccgttccttc

SEQ ID NO: 13726 - DNA, 28902 bp, Unknown
  gut microbiota DNA sequence
acctacaacgtcaagaccgaggccggcagcaccagcaagaccgataatctgaccgagaacggcggcctgatcgcctccaaggtccgcatgctggacaaggacgagatcattactgttcccaacgcccccacctacacctatacttccggccaggacatcgacgaggtctacaaggacctgggcaagtctgtgtgcaccctgcgcgacaatgccaaggacgagggctacacctggactgcttatgtcaacggcaaggaagataaggacgtggatgacaacatccccacctccaaggacgactccacctggaagtacaccggcaagggcaccgtcaccgagatctacatcgacgacgccgacgccactgtgaccgtggtcgagatcaattactatctgggccaggtctccaaggtgaagagcgattccaagggcgagtatgtcaccgtgaaggccatctccaccgagcccaagctggacgacaacgacttctatgctgagggctatgaggaggacgactacgttgtcttcaccgtggactacaacgaggacgaggacttctacatctgcgagctgatggctcccgagaccgtcaacggcgaggtcacccgcgtggaaaaggataaggacgccgagaccggcaagggcgagaccggcgagacctatctgaagctggccgatggtgccaagtacagctactccggcgacggccacatcgtctatgatctggacgacgacaacgtgaaagcccaccccgctctgaacgagcagtacaccctgtatctggatcccaacggctatgtgctgggcttcgtgcaggagaccggcagcacccagtacctgtacgtgaaggactccgacgaggagctgcgtgactgggtcgccaaggtcgttctggctgacgccacctctgtcaaggccgacctggacgatgagtacaaggacggcaaggacaaggtcaagatcgactgggtagataaggaccaggacaagaaggataagaccaacatcgacgagaaggtctgggcctacaccgtgggtgaggacaagatctacaccctgaaggctgtggattccaagaccatgaccaacgccgagatcaacaacggcaaggcctatatctccgacggcaagaacgacttcatcgtggacaagaagaccgtgtttgtggacgtggagggcgagaccgcctataccggctacaatgaggtgcccgatgtggacaatgccaccctggcctatgtgctgagcaccaagaacggcaatgtggctgagatcgtcttcatcgtggacggcgatgtttatgacagcgccagcacctacttcatgctcagcaagaccacccgcgagtccctgaagtacgacggcgactactactgggagtacaccaacgcctatgtcaacggcgtgaagcagtccgtgtacgtggaccaggatctgggcgccctggaggtcggccatctgtacaaggccaccaagaccgtggatgagaagtacatcaccggcattgaggatgtggagctgaaggacaacaccgtcaacgcccgcggcgacggcgctttctggctgaccaccgtggaggatgccaaggtgaagtatgacgtggacgacgacactgtttttgtctatgtggatgtggagcccaagaacggtgagaatctgtccaagggctacgactacaccattaccgacggcgatgtaaaggacatgtatgtgggcaccgaagaggagacctacgacggcgtgaagttcgactacatgacctatgtcaccgtcgtgaaggacagcaacgaccacaacaccgcggatctcgtctacattatccacaagcccgtggtggagatggtgaaggtcaccctcgcgctgaccaacgccaccgtgaccgtcaacggcgtggagtacactgagaacggcagcatcagcgttaagaagggcactgagctcaactggaccgctaaggccaaggagggctacaacctgactacccctgcttccggcaaggtgactgccaattctgataccaccatcaccgctaccgctagcgctgacaccctcagcgtcaaggtcgagggtcatgctgctgccaaccccacaagcattactgcgaaccaggccgctgacatcaccgtgactgctgagaagggttacaccatcaccgatgtgacttgcgctcaggctgccaagatcaagagcaacggcgacggcacctggactgtcagcgttcccgctggcaccgaggatattgccatcaaagtggacactgaggctgtgagctataccctgaactttgccgcttccggtgtttgggattttgaagtcaaggacgccaagggccagaccgtgaatgatggcgacgaggtgatcgtcggtgagacctacaccttcaaggccaccgagaagactgctagcgatactcacaatggcgcccgcgagttccgtgtcgatggagctgctgtctgtgatgccaagctgactgccgagggcaaaaatgccgtcgtgaagtctgtcaaggtcactgcttccgaggctgatttcaagctggcccagaagctggctgttgtcgatggcaagctgtacaccgaggaagcctgccagaatgagcagtcggctgcccccaaccaggagaccactctgtactacattgagagcgctgccgtcaaggctgtgctcgagggcgagtacactgtggtggctgacgacgacggcgtgctgacgcttgatatcggtcagaagcgctgattagagtgagattctgattcacgcaatttaacagccccccggagcatttgctccggggggctctctcacttcccctccagcttatccacccgggcagacagggcgttgatatcactgcgcagcttatccagtaccgcattgagaacgctgggactgacgatcagatcccgcatggctttcagcgccccgtcgatcttttgattatccgcgttaaactccgtccggagaacctggtccgcagcctcccattgattcagtccataatactgcgtctgtccccttgccataaaaaatccctcctgtcctgactgggcccgccatatcctgacccgctcaaaaccggagggaaagagctttttgtgagacgtttcaatacaaattatggaaatcaagcgggactatgcccatttctgtcccgcctccacaggacccatgggcatttttgaggggcgcatcgtgcgcgcccccgctttttctggattttcttcttactctcggatataatggaaatacgatcccggccgtgggccccacggccgctgtggaggtgtttttatgtgtgaggaagctgtctatgacgttgtggccctgggcgagctgctcattgattttacccccgtgtccaccgatggggcgggctgtcccacgctcaaggccaaccccgggggcgcgccgggcaatcttctggccgccctgagcagatatggccggcgcaccgcctttctgggaaaggtgggagaggatgccttcggccgcctccttctggagtccctgcgccgggctggagtccagacccggggcatccgcctcacctcctccgccttcaccactctggcctttgtcaccctggatgccgcgggggaccgctccttcagctttgcacgcaagccgggggcggacacccagctccggtgggaggaggtggaccgctccctcatccagcgctgccgtctcttccacttcggctccctcagcctcactgacgagcccgcccgatccgccacccgggccgcggtggcctacgcccgggagctgggccggaccgtcacctttgatcccaacctgcgtctccccctctggccctcccctgcggaggcccgggcccagatcctgtggagcctgtgtcaggcggatgtggtcaagctcagcgacgatgaggtggactttctctggggctgctccccccaggagggggcccgccgcctgctggaggagtgcggcgtctccctggccatggtcaccctgggtccccggggctgctacctccagaaccggagggggagctgtgccctgaccgccccccaggtctcccctgtggataccaccggcgcgggcgacatcttcggcgggagcgccctccaccgcctgctggacttccgcgtccccccggaggagctggaccggggcggcctggaggagatcgcccgcttttccgtcaccgccgccagcctctccactcagcaccccggcggcatccccagcatcccggagctggcccaggtggtggcccggatgggagagcccgcccccctctccctatgaatccccctcttgttccctctccccttccgtgttataatcagtcattccgtcttgaaggaggtggccctttgcccgtcaaagagaaaaagaccagccgcgcagagttcgcctataacaccctgaagcgccgtatcctggacaatcagctcccccccggcgccatgctcagcgaggtggccctggcccagaagctgaacatgagccgcacccccatccgggaggccctgaagatgctgatgcgggacgacctggtggagatccgggacggcgtgggcaccttcgtcaaatctgccacccagaaggacatcgaggatgcctacgcggtgcgccaggccctggaggttctggccgcccggaccgccattggcgctttctcctcagaggagctggacgccctggaggcccgcttccgctccctccaggtacggctggaacagggagagactgtccgcgtggaggagtttgccgacgcggactgggccctccacgaccagatcctgcaaaagagcggcaaccgctatgcccagaaggccaccaacgacctgcgggccgtgctgcgccggtatcagtacctgtcggtccgcctgctctcccgggtggaggagagccttacggagcacctggccatcctggactgcatccgccgccgggatctggcgcggctgacagagctgctggagaaccacattcaatattgatttggagatcccccgacactgccgggggatctcttattgtatgcatcttttaattttcttttttaatttagactttttctattgactaagatgtatacatctgttatactcagagcacaacgattcagaaggaggccacccacatgactgtccatacggaaaatgaagctctgttccagcgcgccagccgctgtctggccggcggtgtcctgtccaatttcaagaaggccaaaggcgtcgctccggtctatgtcaaaagcgccgagggctgccgcatgaccgactatgacggcaatgtgtactacgacttctccctctccgccgggcccgccattctgggccacagcaacgaggggctgcgccgggccctcagggagcagctggaccaggcctacacgaaccgggactgtctggcggccatcgaagccgcggaaaagatccagcaggtggtcccctgcgccgagctggtccgcttcgccgtctccggcgtggacgcggtcttcaacgccatccgggtggcccgggcttatacaggacgccccctgtatgtaaagttcaaggggcagtacaacgggggcatggacttcgttctgggcggccgcaccgaccgcggcgatcttcaggcccgggacggcgtggacccggacgacttctactccgccatgtgctacaccgagggccgcgccccccacgccctggatgactgcctcctggcagaatacaacgatctggaggggctggccgccctgttccagcagcagggggatcagatcgcctgcgtcatcatggagcccgtgaccctgaatatgaccggctgcatgcctgagcccggctttctggagggactgcgggagctgtgtacccggtatggcgtgctgatggtctttgacgagaccctcaccggcttccgcctggcgctgggaggcgcccaggagtacttcggcgtcacccccgacctgtgcacctttgccaaggccatcggcggcggcttccctgtggccgccttcgccggccggcgggaggtcatgcaggtcatcgaggacaaccgcgtcctggccgtgggcacctacaatggccatcccctggccgccgcggctgtgctggagactatccggcagctggaggccaacgacggagaggcgttccgcctgatccgccggtacacccagatggccaaggatggcatggaggctctggccagaaagcacggcgtggacatgatcgtccaggggatgccgggggcgctctttcctgtgttcaccaagaaggagaagatcatcaaccaccgggacgccctggccaacgccagcttccccaagcacagccgctttatggccctgctgaaggaccgcggcatcctgcacaacagccgcctctgcttctcccccgcccacacagaggaggacatccagtacctcctctccgccgtggatgaggccctggccgtcatggcccaggaggcgtgaaccgccgtgattcattaaaacaggtcctgcgctcctctgagcgcaggacctgttttttctgatgatgggaccgggtctcacgcctggggtgtaccctccccctcctgccggtcctgggctctctcctgccgcagcactgcggtcaaaaaccagactgccagagcggcggtcagcactccggccgccggcgccgtcagccacacgccgtccagccccagcgcggctggcagcaccgccagacaggccagcggaaagaccagcgtcttgctgaaggccaggatcagggagcgtcccggccggttcaatgcggtgaagaaggagctcagacaggtccctgcccagcccagcagataagacagggagaacagcctcatggcccgcaagctcatctccagcagggcggggtcatccccctggataaagagagggatgacatactgtccccccagctgcatccacagcaaagccgccagcgacaccgccgcgcctgtcaaaagcaccctcttttccagggccagcatcctgtcccggcgccgggcgccgtagttgtagctgatggcgggctgaatggaatctgccatgccaaacagcagagagcccacgatgctgtccacatacatcacgatagagaaagccgccaccgccatagacccggacagcctcagcagtacgctgttgagaatgaccatcatcacagatcccgcaatactggaaaagaactccgagctgccattggccaaaatattccccagctgacgggcagagatggtcccccgaacaaaacgcagagggagacggcccatcacaaagggcaggaagcccagcactgtacccagggcaatgctcagacaggaggccgccgctgccgcggccaccccccagcggaaaactaccaaaaatagaaaatccagcacgatgttcaacagtgctgtaaccacattgagtatcatgctgtaccgcacccggccgcagatgcgcagatagttgtccactgcaaagaataccataatgactggcgcgaatacggcatatacctgcatatactccgcccccatggcggtgacctccgcctccgcccccatcagggacaccatcggcccggccaggaaaaagccgcccagcccgatgacgcaggacagcgccacaatcagcccggtgcagaagctgaagatccggttggccgccctctcatttttttccccaaggcggatagagatctgaacggaggaccccaccgccaccaggtccaccagtgcgaaactcatcatgatcagcggcatcaccagattgaccgccgccagagcgttggggcccacatagcgccccacaaagatgccgtccgccactgtgtacagggagagcatcgccatgcttatcatgctgggcaaggcgcaccggaaaaacagccgagtgggcggaaggctctcaaataatttttcatgctgtgtcattttaaaaatcctttatatattccgaagtaaacgtattcaaaatggaacagaacaccgcgatctgttccggtgtgaagctcctttccaccagccggatcgcccgctcaaacgggccctcataggctcggagcgactgtgtcatctgcggggatacgtccaactggatcaccctccggtcggtctcgctgcgggtcttggtcaccatccccagccgctccagctcgttgaccttgatggtcaccgccgactttgtgatgtgcagggtattggccagggtgctcaccgtacactccccctgggcccgctggtaggagatcacatccagatacatgatgctattataagacagctctccgccgccggtgcggctgatctgcctcagatcactgaccgttacatcgtagtaataccggttcagactatcccgcaggtccatccgttcccctcatttcattaagcgaatttatataaatttgcttaactaatatagcagaagatcctttctctgtcaaccccgtccgcacgattttctccccgcggcagccctcatttggatagaggcgccgccctcagatgcgggtctccatcctcaaaggatcttccacaccagggcccgccccagcagcacccccgccaggcacagacccacgctggccaggatgtacccgcccccggcggcccacctcccctgctccagcagctccaccgtctccagtgaaaaagtggaaaaggtggtaaaaccaccgcaaagtccggtcttcaaaaacagaactgcacttttggacatgggcagctgtcccgccgcctgggccacggcgccgatgaccaccgcccccagaaaattggtgagcagggtcatcaccggaaaggaccatggggcggcaatcaggctgagcagatacctccccacggcgcccaggccgccccccagggccacgaacaaacagttggaccacatggctcagggctcctcccgttcaaagatcaggtccacttccttggtgccgccctccccggaaaacatggtgggcagatatcccacgtaacgccaacccttggccgcgtactcgtctatgatctcccggtgctcacaggcgctgttgtccatccagaagccgcccccggtgcgataggtcacatattcatatcggtacatgtccatccttcctttctcaaagatgctttcccgttccggtacccggaggcggggccggagccagtttctccccccggcgtctgctttcagtatagcacaaaaatggggcgggccaaaggcccgccccattaaaatgacgcagatctttttcgatctgtcccacagtcccgttcagcacatcttggccccagcggggatcttgtcgtcgatcatcagcaggttgagctgctcctcgcccttctcggtgtggacggcggagatcagcataccgttggactccagtcccatcatcttccgggggggcaggttgacgatggcgaccagggtcttgcccaccagttcctcgggcttgtaccacatcgcgatgccggagaggatctgccggtcggtgccggtgccgtcgtccagggtgaagcgcagcagcttgttggacttcttcactgtttcgcaggccttgactttaacggcccggaaatcgctcttgcaaaaggtgtcaaaatccaccttctctgtgagctgaggctccacctccaaatcgggcagagctgccttcttggcggccgccgcagcctcctccagctcggaaagggccttttctgcgtcgatgcgggggaacaggttctcgccccgggagacagtgacagtgtgagacagggccccatagccggcggcgctctcccaggtagagcaggtctcgcaggcgccgatctgccggagcacctcggcagcagactgggggataaagggggtgagcaggatagcggagacccgcagcacctccagcaggttgtacatcacccgggccagccgggcgccgttggcctccatgtccttggccagggtccagggggtgttctcgtcgatatacttgttggcccggccgatcaccttgaagatctccgccagggcgttctggaaggcgtagtgctccatctgctcttcatacctggtgcgcagggaggagatcagctccaccagctccccatccttctcctcgtccgccgcctgctcctcaggcagggtgccgccgaaatacttgcccaccatggacacggtgcgtgagaggagattgcccaggtcgttggccaggtccgtgttgatggtctggatcagcagctcgttggagaagttgccgtcagagccgaaggggaaggtgcgcatcaggaagaagcgcagggcatccactccgaacttctccgccaggatatagggatctaccacgttgcccttggacttggacatctttcctccgtccagcagcagccagccgtggccgaacaccttcttgggcaggggcatctccatgctcatcagcatggcgggccagatgatggagtggaaccggacgatctccttgcccacaaagtggacgtccgcgggccagaacttctcatagtcgtcataccggtcgttgaggaagcccagggcggtggtgtagttgaacagggcgtccacccatacatagaccacgtggcccgggtcaaagtccaccggcacgccccaggtgaaggaggtgcggctgacgcacaggtcctccaggccgggcttgatgaagttgttcaccatctcattcacccggctgcggggctccaaaaagtcggtgtcctccagcagatgctgtacccggtcggcgtacttggacaggcggaagaagtaggcctcctcctccgcgtccaccacatcccggccgcagtcagggcacttgccgtccaccagctggctctcggtccagaaggactcgcagggcttgcagtatttccctacatacttgcccttgtagatgtcccccttctcatacatcttcttaaatatcttctggatggcggacacgtggtagccatcggtggtgcggatgaaccggtcgttgctgatgttcatcagcttccacagatccagcacgccccgctccccctccacgatgcggtccacatactccttgggggtgacgccggcctccttggccttgtcctcgatcttctggccgtgctcgtcggtgcccgtcaggaacatgacctcacagccggtgagacgcttataccgggccatagcgtcggtggccacggtgcagtaggtgtggccgatgtgcagcttgtcgctgggatagtagataggggtggtgatataaaatctcttgcgttccatattcagtcgtcctcccgatgatgattctcgaccccggctcctcccggggcattgtccccttctgcccgttccaatgccccgctgggcattcgatcctccagcaggcactccggccaagccgggccgaaacaggtgcgcagcagcgcccagctctgggccagcaggaccagcaccgcagcagcggtcagcgcggtaaagaagagggactgtccgttggccagcgcctccaggttcagaacgatccccatcagggaaaaaaacaggcacagcctgggcctggggtggcggaaagcgaaggaggcggcgaagtacagcgccagcaccgcacacaccaccgccaggatcatatctgcgaaccgcagcaccaccgggtcccgggagtactcctgatagatccccaccagccagggcagggcggcgtagccgggcagggtggtcaggccgggataacaggcgggcaggcctccccggtaatggccccgccccaggatcatcagcgctgcagcggaggggatgcacaatacggcagccagcagctccatcacgggcagtccctggcccagtccgtcccgccacagctgaaacgcccggaaaaagcccagggtgcccagcgccgcggcggccagcaggagcaggctccccgccgtcaccagggtcatatacagggagctgggacagcggaaggctgcgggatagtcctccggcttccctcccccctggatcaggaccaggaacagcagcgccagcagggccagcacaccgatcagcaccggcgtggccgggacggagcggaacagttcggtctctgggtccagcgcggcggccagctgccagcggcgcagggcgaggcaggcgccgccccccgccagggccagcacgggcaaagcgatatcttttctcatgacaacactcctaaaactgggagaatgcgcttttattatcataccttacccgcagagaaaatgcaacacagagggaaaaaatccgccgtttttttcccagtcctttcaaggtggtcatcttaaaaagcggtacaggcccccgaaacgattttataaaaccgcatctcccatgtgcctgccgtttcttccctgtcccctcacaagacgcaaaacgacgggccccactggggcccgccgtcgcagtctgtggtcgtctggccgtttactccgccagagcggcggtgatgatggccatggagtagacctcctgggcgttgcagccgcggctgaggtcgttgatgggggcattcaggcccagcaggatggggccataggcctcaaagccgcccagacgctgggcgatcttgtagccgatgttgcccgcgttgatgtcagggaagatgaaggtgttggcgtagccggccacgggggagccggggaacttcagctggcccacggtgggggacacggcggcgtcaaactgcatctcgccgtccacggggatatcgggcatgagtgccttggccttctcgcaggcgttgcgcatcttgtccacatcttcccccttgccggagcccttggtggagtagctcaggaaagccaccttgggggcgatgccgaagatcttggcacacttggcggtctccacggcgatctccaccagctcgtcctcctcgggcttgatgttgatggcgcagtcacccatggccagcacatcgttgtcgccggtggcggaggcgcggaccaggataaagcaggaggagacgatcttgttgcccggcttggtcttgaccagctgcagggcggggcggacggtgtcggcggtggagtaggtggcgccgcccagcagggcgtcggccacgcccatcttcaccagcatggtgccaaagtagttgcccttcttcagggcggcccggcactcatcggcggtcatcttgcccttgcgcagctccaccatcttctccaccatggcgtccatgccgtcatagttctccgggtcaatgatgatggcgccgcggatattgaagccggccttctcggcggcggcctggacctcctcctcgttgcccaccagcacgggggtcaggaaggtcccggacagcaaccgggcggatgcctccaggatgcgggggtcggtgccctcggtaaagacgatcttgcggggatgagccttcagtttgtcgatcagattctgaaacatgtgcatgggtgatccctccaacttttcgattcgtggccgtaaggccgcttttctgtcccttatggtagcattttcagccagaaatttcaaggcttatccgctgcagaagcgcataaaattcctgtgggacctcttttttcagttttccccgctccttccgggaataacagccctgttttggcggccgttgtccacccatgtcaaatttccgcgaaaattttcatttttctctttacgtggcgtaatgcttccgttatactatactgtatgtattgcagatcgagatgagatccagaaacggcggcctgcgggccgcccctcgaggtgagaaatttgaacgcagaattttcccgcaccctctccctgctgcggcaggagcggggggtcagccagcgcaccgcagcgggtgccctgggcatctcccaggccctgctgtcccactatgagaacggcatccgggagcccggcctggccttcgtggtccgggcctgtgactattatggggtctccgccgactttctcctgggccgcaccctcacccgggacggcaccaccattgccccggaggagctctatgacctgagcgatgagaaggacaactccatgaggggcagcgtactggccctgctgtccaaaaagctgctggtgaactcggtgggcatgctcttcgacctgctgggcaagaccggcagccgggaggccatccgcgccgcctccaactacctgtccaccgctgtctataaggtgttccgccgcctgtatcaggccaacccgtccaacaacccggactttttctccgtcccggcccggcagttcgccgccggcctgcccgaggctgacatggcgtgcagcgaagtggagctgtgcgaggccctggccggccagggcaaggacaagagccgcatgcccgagctgagccacgacatcctggcccgggactacccggtgctctaccagtccatgttccagctggtccacaccaccggcgagcgcatcaacaagacctttgccggccgtcaggacggcaagtgatcccaaccatatgaaggagagaatcgatcatgcctgaaaactgcacccatgactgctctacctgcggcgagagctgcagcgagcgggacctgcgcgtccctgccaacgccctgtccagcatcaagaaggtgatcgccgtggtcagcggcaaggggggcgtgggcaagagcaccgtcacctcctccctggccgtagccatggcccgccggggccggaaggtggccgtgctggacgccgacatcaccggcccctccatccccatggctttcggagtccaccagcgggccaccggcaccgacgcgggcatcgaccccgccgtcaccccctccggcatcaagctcatgtccctgaacctgctcaccgccaacgagaccgaccccgtggtctggcgtggcccggtcatcgccaacgtggtcaagcagttctggtccgacgtggtgtggggcgaggtggactatatgttcgtggacatgccccctggaacgggggacgtgcccctcaccgtgttccagtccctgccggtggacggcatcatcgtggtcacctccccccaggatctggtgtccatgatcgtctccaaggcggtgcacatggcggagatgatgtccatcccggtgctgggcctcattgaaaattacagctggtatcagtgccccgactgcggtgcccgtcacgccatcttcggggagagccgcctggaggaggtggcccgggagctgggcctgcccatcctggcccgcctgcccattgaccccgccctggccgccgcctgcgacgccggaaaggtggagggggcggagcgcaattacctggaggaagtggccgcccagctggaccgctgacccctgtcctgcacgcccacagggggcggcagcctgaccgctgccgccccctgtttctgttccctccggggccgcccgggggtgacatttcccccgcctgtgttacactggacagagggagagggggcgagtccatgctggtctacctggcgatgatccccacagaggagggccgcaacaagttcgccctcctctactgggaatatcgggacctgatgttctatctggccctgcgcatcctgggcagtcagcaggacgcggaggacgcggtgcaggaggccctgctccgcatcacggaaatcatcgaaaaaattcatgacccggtctgtccggaaacgaaggccctggtcggtatgatagtagagggcaaggcactggatctgtaccgccgccggcggcggcagggggcggagcccctggaggactgggccccggcgcaggccggccgccccccggaggaggcgtcctccctccgggagctgacggcccaggccatggcccggctccccgcccgtcagcggacggtgctgctgctgaaatatgaccggggactggacaaccgggagatcgcccgggtgctggacatgaccgtgtccgccgtggagcgcaccgtgtcccgggccaaggcccggctgcgggaggctcttgagggattgggggtggaggtatgactgatcaggagctggaccggctgctcagccaggccgcgcccatggcccgggacctgtggctctcctccctgcccggggacggggagctgccccaggcccggccctcccccgcctttcagcgccggatggaccgcctgatccgccggatggggcgctccccccggcgggtccgtgccctggcccaggtgcggcgggcggcggcggtggcgctggtctttctggcggtgggcttctccggcctgatggtcacctcccaggccttccgggcccaggtgctggaggtgctggtccaggtctatgaggagatcaccaacttccgtttctccgccgagggcgaaacagatcggacagccggagattttgttcttacctacctcccgcaggggatggaggagactgtacggcagtccagcagaatcaggcactatatttgtttcgaggacaacgctggaaatatgttggaagtaacccacatcgtagtgggcgccaatgcatccagtattctgggagtagacactgaggacgcagaggttgagtacttcaaaatccataactcagaagccatggcaatttcaaaaaatctggatcatactattttttggaccgaagacaactgctactatttgttgtccgggaccattcctatggaagagctgaaacaggtcgcattgggtctggaacccatttcttaaaaatttttcaaaaaaattttgatttccttgtccgaaatcgcctcctttcgtcggtatattagtaggaccgatgaagggaggtgatttttatgcgcaagaaacccatgcgctggctggcggcggggatggccctgtgcctgaccctggtgaccacccccgccgcctctgccgcccagccgccccaggacacgcccgtttttgaagaaatcgttccttattccctctatatcaaaaaccaaggatgtgacctgatgatctccgacaggaccgcatttatcgaaggctgggtgagtggacagaccgggcgttccaccgaatgtgaggtgcgggtggagctccagcaaaaatccggctccttcgcctggatactggtggactcctggaccgaccgccaggacgggacccgggcatctgtctctgagacggtgtctgtgacccccggcgagacctaccgggtcaaggcggtggtcactgtctgggccggcagccagtccgaaaccgcaactatctactccgaaactgcaacagcatagctctatatccctatttttgtagatggaggtgaaaacagatactaacaactatgtgtttggctgaaataaatttttgctgtattttgattaggcagagaagtaaactgaaaaatcgcaaacaataagtatggaaaaggagtatgtggcacaatgcgcaaaaagttaatgaaaactatatgcacttttttggcctgtatcttactgttaaattcaacagtactggctgtacctgtcgaaaacacaagtgcacaatcaacattttcctccacattgacacgtgaacccatttctaaaattacagatggagaaattcaaagttctgatatagaaatagtaaaaagagatgttgaaggaactcaattattggtcaactgtaaaggtgtgcaatggtatttgacttatgatattgagagccgaatcgccgaaatcaaaaatctgtcaacaaatgaatcatatgatttctttgtcgataattactactatgacgatgctaccaataaaattgttgacgaagtttattatatcggaaatacatcagatatatctaaaaatttctatgcagatagtttcaacttagataccagtgattatgtcagaattgacctgtttgaatcagattctgctatccaaccaatgacggtcattactggctggcgaatcgctcaggaactcttagaagctttaatggcaattggattggcaacaattattgctggcacaacttatgttattgccaccgaagcattggaatatttggaccaagaaaactatgattattggagagctaggagaagcagtggaagtgtctggatcggtcccggaatttcttttgctacagctgtaattttgcttacagatgcaggagatgtttgggccaaaacacctggtctagcacaaactgcttgcatcaatgcatctccaaatggggtggcacttggcccctatattcaccacaaaggttgcgtaggctattactaccattatcatccaactgtatttgtaattggcacaggagaatataaacaaagttcgaggcactgctggtattatgactaacacaaaagcaaaatatttctgggcagagcctgacggcggggccgacctgcggctgtccctgccgctggactgcttctgggaggcccctggatacgacagcgggatcacggtccgtctctcccaagaggggacgtcggtccggcgtctgaccacggtccgcttcccggagttcgaggccagattccgccgcgcgtttttgcccgcggtctccgacgagcagttctgcggccactgcgtcacggaggaactgtggcacgccttcagctgccgcctgtgcccattcctggagggggaggcggcggagcaggcctttgaccggcgcagccaccccagcgtcctgggtctgtaccatctccgtttcagcgaattttatcgcttcgattttaggccctccgccccgccccatcaggggattgccgacatctataaattctatcagatcgacggcttccagcccttccaggccgcctttttccggggctcaggggacttctactttgtggaccccgattttgaatgggcctacatcgtcacccatgagcctgagctgggcccctattttgtcacaaaggccacttagcaaaacaggcgtccgccctgagaagggcctgtttcttctgtacgcaggatctgtctgggggatattgggtccaaaggagctgcaacgcattttatcatgagctatctgatatcatggaatatcaaatttataaagtaactgaaggcgtgacatcctctatgatcccggcagatacgggccgggttttggacatcttatcaaaattagaggcctccttccagggtccttatactggggtctatctggatcaatagctttgtcgaccgctcctggatatctgtgcccacagtctcccattggaatgaacggatctgaaaccagaggccccagcccgtgtgcagtacggactggagcctctggtcatctctattacaggaaaggatcagctgtctgccaggaatacgccgcttattttctcagcacgtcctgggcgatgaggatgaagcgctcagcgaagtgggacagataccggtcccggcggtagcccaccaccagccggctcagggtggaggggtcggccagggggaacaggtccacatcctccggggcgggcttgacccccggcagttggatggtccgcaggaacagctggggacagatgacgatgcccatcccctcccgggccatagccagggtggtgaccgtgttctccgtctccaggatgatcttgggcttgaagtagcaccggctcaggtactggtccacaatgccccgcacccggttgccccgcttgagcaggatgaagggcatctgccggaaggcggtgatatccgccccctgggcgtactgggcccgcatctcctccgcccggggaccgaacacctggtcggtgaagaccttgggcaccaccatgatgagccggtcctctgtcagggggacggtctccaccccctccagcatgatggggtggaaggcgatgaccagatccacccggccgtgggccagctcgtcctccagctcggaggagttgccttcgaacatggagaactccaccatggggaattccctgcggaactggggcaggatctcaggcagcaccgccaagccgcaggtgtaggagatccccacccgcagcacccccatatagtgccggttgatatcccccaccttgttgaggtactggctgtgcagatccaggatctgggtggccgtgtccaccagcaggtctccggcataggtcagcgccagcttgggggagcgggtgaacagcttcacattcagctcccgctccatgttgctgatgtggttgctcaacgactgctgggagatatacagccgctcggcagcccgggtgatgttcagctcctccgccaccatgaggaaatacttcagatgtaaaaaattcacgtgtctccctccaaaagccgctccttccgcccttcggttccgggcgcccctctgttccattctcttcctgcaagtattctatcacagttgaacgactgtggcaaccctcaggaaaaatgtgatgtccctgtttagtctgtcatgctataatcatgataactggaagattttctgcctattttaccaatgccgggcggaaacgggcatcttccgacctgagtcgccaaagagccccaatatgaagaagaagaaaggaagatttcccatgaaatgtctgatcattgatgccgtccacagtgccatcgccgaggagctgggcaagtatatgcaggtggacacccacatgctccccacccaggaggagctggtcaagctcatcccggactacgatgtgctcatcatgcgcgtggaccccaagatcaccaaggagatcattgacgccgccgccaacctgaaggtcatcggcgtgtgctccgtgggcctgaaccacgtggacatggacgcctgcaaggcaaagggcgtgcaggtcttcaacgctcccggcctgaacgccaacgccgtggccgagctgaccttctccaagatgctggatctgtcccgccacaccatccccgccaactacgacgtgaaggtgaacaagacctgggacaagtataaattcgtgggccgcgagctgcggggcaagaccctgggcatcctgggcttcggccgcatcggccagcgcgtgggcgaactgggccgtgccttcaagatgaacatcgtggcctatgacccctacctgcccgcccacgtgttcgaggagcagcaggccaccagcatgggcatcgacgagctgctgaaggtctccgacttcgtcaccatccacatgcccctcacccccgagaccaaggatctgttcaacgccaagtctctggccgagatgaaggatgacgccgtggtcctcaacatggcccggggcggcatcgtcaatgagcaggacatgtacgaggccctgaaggccggcaagatcggcggctatgcctccgacgttatggagaacgagctggccggcggcggcctgaccgagggtgccggctttgactcccccctgttcgagtgcgagaacttcctggtctccccccacctgggcgcccagagcaccgacgcctcccgcgacatcggtgcccacatcatcgccaaggtgaaggaagccctgaatctgggctgagctccagctggcaaactgtaagtaaaaaacgtcccggcatcctgattggatgccgggacgtttttatccctgatgtccggcgcagccctggccgccagccccgtgggaatggccgcaggagtggccctccccctctccgtggccgccgcactgatgggctccgtccccctcgtggtggtggctgcacactgtatccgggtcataggccaatcggcctgccagcaggtcggccaccgcctggtccgccgcccccgatacgccgggatagagctggatctccgcctgggccagggctgttctggccccgccgccgatgccgccgcagatcagcgtctggacgccccgctcacgcaggaatccagccagcgccccgtggccgctgccggcggtgtccaccacctggctggcagtcaccgctccgtcttccacctcatagatcttgaatcgctccgtgtgcccaaaatgctgaaagacctgtccattctcatatgtcactgctattttcatgttctgcccctcctgtttcatcctgttctgttccactccagaccgtcccgggcagcggccctcctcccggcaggtcaggcggccgttttcgcaccggccccctcccccgccccggtggcggcagcgccggccgcagcagtgctccgcctgaccgcacaggtcgtaagtgcccccctggactgccaggggcctgccctccgccagcatgcgggccagcttctcccgggcagagtcgtagatggcctgcaccgtggtccgggccacattcatctgggcagcacactcctcctgagtcagccccagcaggtcgatgagccgcaccgcctcatattcgtccactgtcacctcgatcactgggccgcctggccctccttcaggccggaacgcccccacaggaggcagcccgcatacccttctccgttttaccggccgcgccatgggaccgccccctctctttcctctttagtatagctccatttttgtcatatgtcaataatattttgactgaagcttttgtaccgcggcatgtttggggcagaggggcacgtgtcatgactgggcaagtaagacggtctatgcattccaggccaggcgctgcaactcggcgagccggtcctacagtccgccccccgcagggcccagcgggtccgccgctctctcttacaagggcagtctccagggcgatccgctcttactttttccaaaaaactcctctaagacccgcgctgggacaaaaagaaaaagggccaaaggcccttttcctgagactgtcgaaaaagcggctttgccactttttttgagaaagcagcagcctgccgcgcgcgggattggtccgccgcaagcggacaaaccccacacttgtagcctgagaagtgttttccccgacgcacatgccgccggcgaaaacagatcacaactggattcgcgcctgcgggcgcgaactctgcgaggctttttcctctatcgttatttctgcttttgcttggacttaaagcactcaaaagcctctaggatgctctgctccggggcgggggtcagcaggctgaccatcacgatggccacgcaggcgcacagaaaagcgggcagcagctcatagatggccagcgcgccgcccataggagccaccagatacttccacacgaagaccatcacgccgccggtggccatccctgccagtgccccccacttgttggaccgcttccaaaacagggcaaagagcaccaccggcccgaaggcggcgccgaagcccgcccaggcgaatgagaccacccggaagacagagctgtccgggtctcgggccaggaatgctgcgatcagggagatgaccaccatggtgctccgggccaccagcacgctcttctttccgctgatcttcaggtggaagaactctaccgccaggttctgggagacagaggaggaggcggccagcagctgggagtctgcagtggacatggtggcggccaggatacccgccaagatcacgccggccagcagagcggctggaacaccgtagcagctgatcaggttggcgatctgtacgatgattgtctccgcgtcggacagctgctccatggcccccgcttttgtcatgccgttgcctaccacaccgataaacaccgccacgcccatggagatgactacccaggtagtggccacccgccgggagagggccagctttttctcctcttcaatcgccatgaagcgcagcaggatgtggggcatgccgaagtagcccaggccccaggccagcagggagcagatggtgagcaggctgtacggggcagagcccccggtggccgggtcgtggatgttgaccagggacaggtagcccgccagagagcgggcgttgtccatcaccgcctccatgccgccagcctgcgccacgccgaagcccagcaccaccaccagggccaccgtcatgataatggactggaccaggtcggtaaagctggccgccaggaacccgcccatgaccgtgtagatgacgatgacagcggcgctgatgagcatggcggaaacatagttgatgccgaacagggaggcgaacagctttccgcaggcggagaagccggaggccagatagggcacgaaaaagatcatgatgaccacggcggcgatggcggagagcaggtttcgctcatccccccagcgcttggagaagaactggggcaccgtgatggcgtcgatctggtgggagtagcggcggatgcgccgcgccacgatgagccagttcagataggtgcccacagccagtccgatggcggtccagctggcctccgccaggccggagaggtaggccacgccgggcagccccatcagcagccaggaggacatgtcgctggcctccgcactcatggcggtgacgaaggggcccagcttccgcccccccagatagaagtcgtctacggagttgttgcgtttggagaaccagacgcctacgcccagcatggcgatcagatagaccgcgatggccaggcagatgcagatctgcgaaatggtcatagtatctctcctcatattctgttaccctccggctcccccacacacaaagcaggagcaggacggccgccggcagcgcacggcgtttttttattatagcatggagatcttaagaacaaaatacagaacacagtatagaataaattctatactgtgttctctctatttcccatttttctcttttatactgcgggatttcagccgtacactttctaaaatcatcctttagatattttgtacaaaattcttttggcttgtccgaaatcctcccaaaaacatgggcatcatgatcctgccgtactggagcagggagtagtcccccccggacaggcaccagtcgtagatgagggcccgctcgcacagggcgtagacccgcaccatctcatttaccgtcacatctcccctcagctctccccgctgctgcccctgaaggacgatctgccgcagcagcttgtaatatgtgcggttgtggtccagcagatgcttgtccccccgggtgaccagctgggaggagtacagccgggccagcaggtccagggagatggagttttcgatcatggcaaacagctcccggttcagctccatcagcacctcgaaccggtccttttccgggtccatgcgggccatcagctcctcatacttctcatcgaacaggaatgagacagaggagagcagggcgtccttgccctcgaaatagtggtaaaaggagccccgggaggtgccggatgcctcgatgatctcctccaccgttgtatcgtcatagccctgctggtaaaacagctgccatgccgcctggatgatgcgccccttggtattgcgggaatttttctttgccatcgcggctctcccctttccggcccctggccccctccgccccggaagcggcagaccctgggcctttgatctattatctccgattcccgcccatccgtcaactgccgccccgcctccccttttaacagtttacatccggggcgggctatgataaaataacttttatctcaacagagggaggggcgccccgtgccctatcatttcttccccatgatcgcccggatgcgctacatcagccgctggggcctgatgcgcaacaccgaccctgagaacgtccaggagcactcccacatggtggcggtgctggctcatgccctggccgtcattgagaacgagcgcttcagcgggcagaccgacccgggcgtggtggcggtggcggccctgtatcacgacgccagtgagatccttaccggcgatatgcccacccccatcaagtacgacaacccggacatccagaccgcctacaaggcggtagaggccgtagcggagcagaagctgctgtccatgctgccccccgacctacgccccgcctatgacgaggccatcaccatcccggacccccatgtgcgggacctggtaaaggcggcggacaagctctccgcctacctcaagtgcctggaggagctgaaggcggggaacaccgagttccgcaaggccaaggagcagacctacgccgcgctccttcagaacccgctgcccgccctgcgctgctttatggaggagttcctccccggctttgagctcactctggacgagctgagctgaggagcagcgcctgcctccggccccgccgcgcagcggctttctcctcccccgtctctccgcattcctcaaaatttactgtggaaaggaagtcttctatgaaggccatcgtcactgtcatcggccgggacaaggtgggcatcactgccgccgtctgcgccctgctggcccagcacagcatcaacatcctggacatcagccagaccgtgctccaggaatacttcaccatggtcatgctggtggatctctccgcctgcaccgcctccatcggcgagatgtccgacctgctggagcaggcgggcagggaacaggggctgtccatccgcatccagcgggaggacatcttcaacgccatgcaccgaatctgagggcggaggaccgccgcggaccggccgcccagcgcgatccccgcggggccacaccgccttttacaggaggaaactatgctcaatcaacacgagatcatgcagaccatccagatgatcgaccagcagcatctggacgtgcgcaccatcaccatgggcatctccctgctgtcctgcgcccgcagcgaccccaggcaggcctgtgacgccatctacgacaagatcacccgctgcgccgaaaatctggtggccaccggcgaggccatcgagaaggaattcggcatccccatcgtcaacaagcgcatctccgtcacccccatcgccctggtggccgctgcggcggagacagacaactacgccccctttgccgccgccctggaccgggcggccaaagctaccggcgtcaacttcatcggcggtttctccgccctggtccagaagggcatgaccgacgcagaccggaagctcattgcctccatcccagaagctctttccaccaccgacctggtgtgctcttccgtcaacgtgggctccaccaaggcgggcatcgacatggatgcggtggccctcatgggccgcaccatcaaggagctggcggagcgcaccgcggaccggggcggcttcggctgcgccaagctggtggtgttctgcaacgctgtggaggacaaccccttcatggccggcgccttccacggcgtgggcgagccggagcgggtcatcaacgtgggcgtctccggccccggcgtggtgtaccacgcccttcagagcgtgaagggccagcccttcgatgtggtggccgagaccatcaaaaagaccgccttccgcatcacccgcatgggccagctggtggcccaggaagccagccgccgcctggacacccccttcggcatcgtggacctttccctggcccccacccccgctgtgggggacagcgtggcccgcatcctggaggagatggggctggaggtgtgcggcacccacggcaccaccgccgccctggctctgctcaacgacgcggtgaagaaggggggcgtgatggcctcctcctcggtgggcggcctgtccggcgccttcatccccgtcagcgaggacgagggcatgatcgccgctgccagctccggggccctcaccctggacaagctggaggccatgacctgcgtgtgctcggtgggtctggacatgatcgccgtccccggggacaccaccgccgagaccatctccgccatcatcgctgacgaggcggccatcggcatggtcaactccaagaccaccgccgtccgcctcatccccgcccccggcaaacaggtgggggacacggtggagttcggcggcctgctgggctccgccccggtacagccggtccatcccttctccgccaaggccttcgtggaccggggcggcagaattccggcgccgatgcagagcctgaaaaactaaataaaaagaatcagtggttaaaaaattatggtgagttgtccagatgacaattcaccataattttatgtaaatcgcaagttgcttactaaactcctttgaaaatcaatcgatcacacatgacagcattaagataactcccccaaaaaagagcaggaaaaggagaaaagagaccagcatacagccaagataccctctcctttttctactttcctcgggagtctgctcaacaaaataagtacgtatcatcaaaatggcacttattacaaatgcaggtattgtgaagaaagggatacagtaaaatgagaagtaaactcccccccaaaaaatagggcagaaaaaaagaaaggagaccagcatgtaaccaagataccgtctccttttcttactttgctcgggagcctgctcagcaaaaaaagtacgtatcatcaagatggcacttaccgcgaatacaggtattgtgacgaaagggatacaataacttaggagggtaaataattccataataaatttcataggactcaccctgcacccggcggaacagatgtgcagttatagtttctgtatttttaaaatattcagcggcctgcccttgctgggatagaccgctgaatattccattgaagcgaatccgttaagataaaccttctgaaaatttgtatgactatgtgtttgccatactggttttgtgcgaccgttccgttctcttacatcccggcagcagttctatctctttgacaagccaaatttcaggatcagaataaatcccaaaattgcccagaagtccaaaatatcaaaaaagatatccatgataaaactgacccgataggcgcgccagagtgtggatatgatgactgcggtgtggatcagcacggcgatcaggagtttttgctgggaggacttcgtgcgtgcttcacctggacgcagatagacgtacagaacgatcaggatattcagggccagataaacgccccagtcccagatatggctgtcggaaactattgcgccaaactggcagatgataaaaaagagcagaaaaagatttttgaaattgttttttgagaacatctgtcctgccatactaaaaaccccccttcgtatcgatctatctattataccggcggagggagttgaaatggaagaaaaaatccgaaaatttttgtgaaacgtttttttggctcattggatcgcttcagctgcctgcttca

SEQ ID NO: 13727 - DNA, 20456 bp, Unknown
  gut microbiota DNA sequence
gtatcggcacctagaattatgcggtattgccttagcgaaaaaatcttgacaaaaggcgcgctgcgtgatatcctattacaagataaaagcgtaccggaactatgtccggcgcgataaatttttgagagttagagaggtttctatcatggagcgtattaagactattgctactcgtgacctgaccaagagcgttaagaccggtggctgcggcgagtgccagacttcctgccagtccgcctgcaagacctcctgcggcgtggctaaccagcagtgcgagaacagcaacaagtaatttttgcaaaccttatgccgcctttgccgggcggcatttttttgtgtaatctggaatggagtgtaaaatggtacatcagtatcaattgaacggttataacatcgtgctggacacctgcagcggctcggtgcacgttgtggacgaggtggcctacgatgtcatcgccatgtacccggagcataccgcagacgagatcgttgccgccatgctggcaaaatacggcagccgcccggacgtgaccgaggaggatctgcgccagtgcatcgacgacgtgaccagcctgaaggaaaacggcaagctgtggagcccggatgtctataaggacatggcttttgacttcaagaaccgcaacaccgtggtaaaggctctgtgcctgcacgttgcccatagctgcaacctgagctgctcttactgctttgcctcgcagggacgctaccacggcgaccgcgccctgatgagctttgaagtgggcaagcgcgccatggacttcctcatcgagaacagcggcacacgccgcaatctggaagtggacttctttggcggtgagccgctgatgaactttgatatggtcaaaaagctggtggcctactgccgcgagcaggaaaagatccataacaagaacttccgctttaccatgaccaccaacggtgtgctcattgatgacgatgttatcgacttctgcaacaaggagtgccacaacgtggtgctgagtctggatggccgcaaggaggtcaacgaccgcttccgcgtggactgcgcaggcaatggcagctacgaccgcatcgtgcccaagttccaggagttcgtcaagaagcgcggcgacaagaactactatatgcgcggcacctatacccactttaacaccgactttaccaacgatatcttccacatggcagacctcggctttaccgagctgagcatggaaccggtggtctgcgaccccagcgaccctagcgccctgactgaggccgacctgcccatcctgaaggagcagtacgagatccttgccaaggagatgatcaagcgcgaccgcgagggcagaggctttaccttctaccactacatgatcgacctgaccggcggcccctgcatctataagcgcatctccggctgcggctccggcaccgagtacatggccgttaccccctggggcgatctgtacccctgccaccagttcgtgggcgaccccaagtacctgctgggcgatatctggaagggcgttaccaacaccgctgtgcgggatgagttcaagcactgcaacgcctacgcccgcaaggagtgtcaggactgctgggcaaagctgtattgctccggcggctgcgctgccaactcctaccatgccaccggcagcattaccggcgtgtacgagtacggctgcgagctgttcaaaaagcgcatggagtgcgctatcatgatcaaggtagccgagaatcaggaactggcagccaagggcatcgaggtgcctattgagctgggctctacctgcaacgcctgcgccgatggcgaagcctgcgaatgagcatgaccacccccatcgtggattttgtgcgcagctatgcaaagtccggtaccgcccggctgcatatgcccggccacaaggggcagagccttttaggctttgagccgctggatatcaccgagatctgcggtgcggacgagctttacgcgccggagggcattattgccgagagtgaagccaacgccacccggctgtttggcacggcgcacagctattacagcactgagggctcatctcagtgcatccgtgccatgctgtttctggcgttgcaaggcgcaccgcaaaacggtaagcgcccggtgctgctggccgcccgcaacgcccacaaggcgctgctgtatgcggcggcgctgctggattttgacatccgctggctttggccgtctgcgcaggcagagggtgcactgtgcagctgccccgtcacagccgaagcgctgacaggggctttgcacgcgctggcacagcaggggataagcccctttggcgtatacgtcaccagcccggattatctgggcggggtgcaggatatcccggcgctggccgctgtctgccgggcgcagggcgtgcctttgctggtggataacgcccacggcgcctacctgcgctttctgccgcagaactgccaccccatcgcgcagggcgcggccatgtgttgcgactctgcccataagactctgccggtggtcaccggcggtgcgtatctgcatctggggcacaacgcccctgtgcaggacgaagcggctgtgcggggggcgctggcgctgttcggctccaccagcccctcttacctcattttgcaatcgctggatgcctgcaacgcaatgctggcaggggactatccccggcggctggtgcagtgctgcgcggcgctggaaggtctgcgccgcagcctgaacaaggccgcagcggcgcggcagtgcccggtgccgctggcagttgccggggcacagcaggagccgatgaagctcacgctggatgccgctgcccttggctgcaccggcacagcgctggcagatgctttgcgccgcgcacagatggagtgcgagtacgccgacccccgttatgtggtgctgatgttcaccccggaaaacccgccgcaggactacacgcgcctgcaagctgcgctggaacagcttctggctgccgtgcccgccgtactgccccgccccgagaaccgggcaggggagtttgccgccttgcagcagcaggcggtgcagcgctgcaccatccggcaggcggtgctgggcgcacaggtgcgcatcccggtgcacaaggcactgggacgggtgtgcgctatgcccacggtgtcctgcccgcccgccatccctgtggtggtcagcggcgaggagatcaccccggcggccatcgccctgatgcagcgctacggcattgaggaactctcggtgctgcgataaagattttataagaagagaacccggaaggtctgtggaccttccgggttctctatatttattcttaaatatccgtccggggtgttgcacacatctcccagaagtgcagctcgtgctccgagcaggcgcggaagattgcgcggcagcgggcggcacgctccggcgaaaggccggtgcaggccacctcggcgcgttctgcccatgcacggcaggcggcatcatagccgggaccggcgtagtccagcaccagcgcgccgtagtaggtgtcctttacggcgggggagcgctgcaaaagcttctggaatagccacccgtagctcagcatacagggcaggcaggccatcaggcactcggcctcgccctcgccggtgcgcgcagcgtcgatcatgcagtccagataggcgcggctttccgggcgcaggggcagggactggatatcggcttcccgcagaccgtactgctccagataccgcagccgggtcaggtcctcgttctcctgcacgaaggacagcagggaatagtaagtgcgcatggcagccatggtggtggccttggtcatgccccaagcaaaaattttggcgtactcccgcagatacaggctgtcctctacgaggtagcttttaaagcagtcctcgctcagggtgccgttctccatcttttgcaaaaactcggcctgcaggcactgctcccacacgggcaggtcggcctgcaccagcgccgagacaaagggcaggtcagtcacggacaaaatctcccttcaggttgaaggtatgatccatgggcccggagccgtgccctaagtccagcatggcagacagacagccggaaatgtaggccttggcgcgctccacggcggtgtcaaggtcgtagcccttggccagattggaggcaatggcgctggacagggtgcagccggtgccgtgggtgttggggtttgcaatgcgcttgcccttgaaccacttgccggtgcaattgcgccacagcaggtcgtcagcatcgttgatctggtggccgcctttgcacagcacggcacagccgtagcgctcgctgatggtgcgggcagcggcttccatgtcggcagcgttggcaatgctcatgccggacaagatctcagcctccgggatgttgggggtaagcacctcggccagcggcagcagcttttcggtcagcgcctgcacggcatcgtcctgcagcagctttgcaccggaggtggccaccatcacggggtccaccacaatgtgctttgcgccgtagaagtgcagccgctcggcaatagtgtcgatgagcggggcagaggataccatgccgatcttcaccgcatccgggtaaatgtcggtgaacacggcatcgagctgctgtgccagaaactgcggcgtggtgtcaaaaatggcggtcacgccggtggtgttctgtgcggtcagggcggtaatggcgctcatggcaaacacgccgttggcggtcatggttttgatatcggcctgaattccggcgccgccgctggaatcactgccggcaatggtcaatgcagttttcatagtaaaatgctcctttgcagcaaaaatgcggatatgcccgcaaagacatatccgcagataaaagcgctatctccctacgttggcatgatccaaatcaggtcacaggtcagggcaatacagcccactctcagcccgctttgcgcggactccctttttatactagaaagcataccacaatcggggaaaagatgcaagaaaaacaggctgcgcaaacgcaccgcttattcgcccagtgcggtgcggatgttgtccagcacctttttgctcagcagcacaaaagcctgcttggtgcggcctgcggacacattggcgcagcgcacgttttcccgggcaaagaagtcctcggccacggggcctgcggcggcgcgggtgtcgcagaagaaatgggtgccgggcagatcgagccacttttccagcgcagcggaatcgaagccggggccgatggaggtgttgaacagcaccttgcctgcgcccagctgggcaaactcattttcgcccagcagcagtacgttcttgttcaggcaggtgaacaccacctcgctctcagccagcagctgagccagcggcttaaaggtcataccggcagcctcggcgtccggctttgcgctgcgggcaaagtagctgatctctgcgcccataaattgcagcgcatcggcgatcatccggccggaaacgcccagccccacgatgcccaccttcaggccggtgatctccaccggctcgtcccgcagcatgggcatcccaaaaccgtgcagcaggccggtcagctcgtgcagaacgtactccacaacgccgcggtcaccgtaatcccggatgcccagcacctggatgccccgggtgcgtgcgtaggcaatatccacgttggcgctctcctcagagtacaggctgcagcacatgccgatatagcggatgttggggcactgcgcaatgacctccttgcccatgcgggaggtgtagctcagcagcacggcgtcggcgtccccgatgcggcgcaccatctcgtcgtcgctggcaggcacgtcacggtacagcaccacctctttggcgtagcggtgcagctcctcctcggcagagggaatcaggctgaccggctcaatggcaacaagcttttcaaacatgacggactcctccttatattagtagaagcagacgggcgaggccagattgcgcagcagggagacggcgctccagcccgcaatggcgctggtggaagagcagatatctaccacagccttcacgccctcgatctcggcagtgatgcagtggtcgtcgcccacccagccgggcacggagtgcatggtcacaccggtgctctcggggccggtggtggccagagaggtagctaccgccacgttcacccggcgggggaaggtagcaatggcctgctttgcattgccggtgaacacggtggtcttttcggtgtcggtcagcagatgctctgcccacaccggggtgttgcggaagccctttgcaccggtatgggtctcgatgccggcggtctccggcagaccctgcgcctgtgccatcagggtgacagtctgcagcacgtcgaagccgccgatagcaccgctggccaggtgcaccttggcaccgccctccacggcagctgccttgacctgtgcgtagaaatccaaatctgcaaaggcaccgatggacagaatgaccagattcacgccccgattcagcaccgggatggccatagcgcgcaccgactccaccgaggccgcctctacgatgtactccggctcaagtgccagcagcgcgtccatatcctcgcagacggcgcagccgacgttggcggcggtcttttcagccgaggcgcgggtgcggctggtcacgcccaccagctcgtagtccggcagcagacccttcttccacgcgtcagccacgatgttgcccagaaatccgcagcccacaatacccaattttgttttcataccgtatcctaaactccttttttctgcctgtggcagcatattcatagccagtataccataccgggtacaaaaagggaaataatgtttgcggcagcccggcggggcaggacataaaaagttaacaaaataaattacaaaaaaattacaaaaccctattgcaaaatggtttcaaaagagttacaatatggttacagcaagggcaaagccctaaggctgtgtgtgaaatctttttcttcttgttttttgggatactgggcgcgggtcctcctcctccggctgttctccttcacagctatgacccatgcgccgcacaggcagtgtcccgcttcgtgtgcaaaagggctcgtccggtgtttcggacgagcttttttgcattccgtaagcctgatttggcttgcaaaagtgatacttcaaaaatcaaagtatgaccaatgcccgaaaacgcttggcaatttgtctgtttttccgcaaaggacaattataaagtttggcgcggcaggggtttgtattcttgcgggctttgtggtaaagtatatacaatcaatttataagcagcaaacatgaatgattttgatgctgatttgtatcggatgcgttaaggtgtatctgaaaacaaagaaaatgacgaatatttcgcaagcacaagcaggatttaaggcaaatagccgcaggaatcctttgtggatttcaaggctgtttaacgcaaaatccagctgtgcttgtagaaatagactaaattttcgacttttcagatacaccctaagagaaaaggagtttgattatggcttatttctacgaagaaccctcccgcacctttggcgagtacctgctggtccccggctattcctctgcggagaatgtgcccacggcggtcagcctgaagaccccgctggtcaagtaccgcaagggacaggaggagtgcccgctgcagatgaatatccccatgatcagcgccatcatgcagtcggtctccggcgataagctggccattgcactggctcgtcagggcggcgtttcctttatctatggctctcagagcatcgagaacgaggctgccatggtgcgccgcgtcaagagcttcaaggccggttatgtggtgtccgattccaatctggctcccactgccaccctgcatgatgtgctggagctgaaggcacgcaccggccactccaccatcgccatcactgccgacggcactcctaacggcaagctgctgggcatcgtggcttcccgcgattaccgcgtcaaccacaccccggacgatgcctgcgttaccacctttatgacccccgttgaaaagctggtcaccgctccggccaacacctccctgcacgactgcaacaacatcatctgggacaacaagatcaacaccctgccgctggtggatgccgagggcaatctggtgtatatggtattccgcaaggactacgattcccacaaggcaaacgtcaacgagctgctggataagaacaagagctacgttgtaggcgccggcatcaacacccgcgactacgcccagcgcgtgcccgcactggtagaggccggtgtggatgtgctgtgcatcgactcctctgagggctactccgagtggcagagccgcactatcggctggatccgcgagcactacggcgataccgtcaaggtgggtgccggcaacgtggtggacgccgagggcttccgcttcctcgctgaggctggcgcagacttcgtgaagatcggcatcggcggcggctccatctgcatcacccgcgagaccaagggcatcggccgtggtcaggctaccgctgtcatcgaggttgccaaggctcgtgacgagtactacaaggagaccggcatctatgtgcccatctgctccgacggcggcatcgtccacgactaccacatcaccctcgcgctggctatgggcgcagacttcgtgatgctgggccgctactttgcccgctttgacgagagccccacgaacaaggtgcgcatcaacggccagtatatgaaggagtactggggcgaaggctccaaccgtgcccgcaactggcagcgctatgacctgggcggctccaccaagctgagctttgaggagggcgtggacagctatgtgccttacgccggtcctctggcagacggcgtgcagaccaccctgtacaaggtgaagagcaccatgtgcaactgcggcgctctgtccatccccgagctgcagcagaaggccaagctgaccgttgtttcttccacctccatcgtggagggcggcagccacgacgttgtgctgaagaacgccacccccagcatcatgaacggctaagcctgttctgaaaagaatctattgatttaagcgcagagaccgctgcacagcgtttgtgcagcggtctttttgcgcgaaaatacttgcaccggcaggggaatcgtgctatcatgatagaaacgctctgtcatgacagggcggaggatccccctgccgggcaagcggcaggcggcgcgcagtagggaagagctgacgccgggtataaatagagaggaaaacattcatgaacgagatcaaggttgagccttatatccccgatgaggactacgataaccccgcgatggtggtggatttttatgaattcaccatggcaaactgcctgttcctgcatggctttaagaataccacgctggtgtttgatatgttcttccgcaaaaacccggataatcagggctattccatcagcgcaggccagcgcaaactgacccgctttttgctggactatcacttcaatgagcaggatatccactggctgcgcaccaagggcatgagcgaggagttctgcgagtatctgcgcacctacaagtggaagggtgatatgtacgccctgcccgagggcacggtctgctacccccatgtgcagatggtgcgcatcgagtgcgatctggtgggcgcgatcctgatcgagacctacctgctgcagaccatgaacttccatagcctgatcgccaccaaggccacccgcgttaccggtctgaacacccacaccccccgcaacgtcatggagttcggcacccgccgcgcacagggcgagagcgccggtaacgatggcgcttacgccgcagtgctgggtggctgcatcggtacggccaactgtctggcagagatgaagttcggtgcagaggtcaaggccgtgggcaccgtggcacacagctttatcgagtttttccccaccgagttcgatgccttcaaggcctttgccgatacctacccggattcggtcagtctgctgctggatacctataacattatggagagcggtctgcccaacctgatcaagctggacgattatctcattgagaaataccccaacgatcccaaccgccgcgtcaagagcgcccgcatcgattccggcgaccttgcccgcggctccaagcggctgcgcaaggcactggatgccgccggtaagccctacatcaagctggtagcctccaacggtctggatgagaagaaaatcgccaacatggaactatacgagcacgcacacttcgactcctacggcgtgggcgaaaacctcatcacttctgcctccgaccccgtgttcggcggcgtatacaagttggtggcagtgaagaagccggacggcagctacacccccaagatgaagtgctcggactccgccagcaaggccatcatcccgggcaaaaagatgccttggcgtctgtacgacgaaaacggtcaggcacagtgcgacctgattgccatggacggcgaggtcatcgaggccggtaagccggtcactatggtcaatctggactcggacgccatcgaacgcaccatcacctttatccccaccgctgtgcgcccgctgttggtgccgcatattctgggcggcgagctggccattgaactgccctctattgcagaaaagaaggcctatattgcaaagcagctcaccgaggagacttgggagagcgagttgcgtctggaatgccctcacaagcactacgtcaacatgacccccgcagtggccgagtgccgctcccggatgtacgccgagctgcacggaggcaaggtgtaagcagcaccgaataagcggtttttcttgacaaaacagggaaactattgtatcataaaagccgctgatttaataaaaatgttaataccaccagattgcgaatagcagtgtggttgtaataatttttcctcacacctgttattcccggctctctctcaagccagagggcagcaggactttgtaagccggggttgcgccgctgtggtgaaattggcagacacgagggacttaaaatccctttctggagacagagtacgggttcgacccccgtcggcggcatgcagaagctcagaattgttcgttgattcgaatgattctgggttttttctttttgttccattttctggaagcgctagaggggcgagagggatttttcgcgaaaaaaggaggagtctctctcgtgcgtaaccgtgatttaagacccgctgccaaggcaaaccctaccatccaacaggcctttgaaaggttccaaaagtacaaccggctcaagaacctctcccaaggctcactcgacttctacgccgcaaagggcagaagcttctttcggtttttggggaatacagagcagcccatcactaccatcacagaggaaacggtggaggactatattttttatatgaaggaccagcagctccatgatacgaccatcaatacgaacctccgcatggtgcgtgcgtttttgtactggtgcatggaaaaaggctatctggaaaagtatccgatcagactggtgcgtgccgatgatccgatcaaagaaccctataccaccgacgagctgcagaagctgctgaaggaaccggactgcaagacctgctcctttgctgaataccgcaattgggtcattgtcaacttcctgcttgggaccggctgccgtgcgtccacgctgctcaacctgcagatcggagatttggacctttccgccgggacagtgtttttccgccacatgaaggcgcgtaatcaacagatcgtgccgctctccaaggcactggtcaggatcatggaggactatctggagcaccgcagcggcgaccatacagccccgttgtttgtctcggagtatggcaaccagatgacgttgaattcgctcgggaatgcgatttggaattataatcatagcagaggcgtggataagacctctatgcacctgttccggcacacctacgcgaagctgtatatccaagctggcggcgacccgttccgtctgcaaaagctgctgggacacgcagaccttaccatgacccggcggtatgtggcactgtatgcggacgacctgagagccaactatgacgccctgaaccccctagagcagctgacccgcaaaaatcgccacggagataagatcaagatggggaagggggagggaaagtaaaaatgggtcaatgtcccttgagcaaaacgaaatgatatggtatagtgaaatcaaaaaaggagacgcggatcaatatgagtgatgaagagaagcgctggccattcgatggtttctacctgaagctggctgaggcacaacgggagtatgagcaggagcagcacattgaccctgcctcgttgacggaagaagaacgacagcaaaaactgcaggagattctggattggattactgcctctcgcaaaaagaaaaaggaggccgacgaacagcttgatctcattgtgccggaggaagaaccggaaaccgccggggcaactccacagcctgcaaaacagtacattacagatcttgttggtgaggattacaagaactggcatggaatcgtggtgcttgatgcgggcacgaactccggcaagacctattttattctgaagacattgctgccgtgggcatatgaacgtcgtaagcgtatcctgattctgtgcaatcgcgaagctctgcgcaaccagatcgagcgcgatgtgaaccgtttggggagtatagaggtatcctacgaggactatgatcccgcgcttggaggaattgtcaacaaacccgccatagataacaagtatgagcacaccatctgtgttgaaacataccagtggctggaaaccttcctgcaaaggaatgaagatgccgccaaaacttatctgagatcgtttgattatatcgtgtcagacgagtatcactacatggtaacagatgccagcttcaacgatcatgtggatgcaagctatgaggcgattaaagagctgtggacaacgaagacctgcatctttatgagcgcaaccgcccgccccttctttgattattgggagctgcggaaaatgatcccggagggacagcactatcgtctgccgatggattatcggtttgtgtcaagcgtgaagttcttctaccgtgacgatgacgaattggatatcatccgccgggtacagccgggagaaaagatccttgtttttgcgaacaccatcgccaagctgcgaaaactgcgggacactctgaaagcagaaggcatagaggatgtggcgtgcctgtgctccaaataccgtcaggaagcggaggagtttgacaaactggatgatgtgcttgtgggcaatgttctgcagcatcaggtcacactgaccacaacgaccctctataatggtgtggatatgaaagaccgtgcgctgaaatatattgtcagtgaactgtggaacccgctcgttaatgcacagatccttggccgcaaacgtcccttggatgagggggatacctgcgcggtgtatttgctgcattaccccaaagaacgtctggaaggggaacttaaaaaaatcgagaagtatcagctggaaccggtcgaggcatatcggaaatggtttgatgataggaaggcatggaagacatacctgcatcagcctgaaacagtggaaatactgaaaaaaagccatacagtcgttctggatccacgggaaggtgaatactgctggcggaaacgtgcgaccttgcaggctcgtgtagaacgtgttttcctgctgcaaatgctcgaacaggggtatcagacagagctgctgaaaaaaaatcgatgaaagcctgcttgcaaaagtagagcgccttgacccgccgctgctgcttgagtatctggatgcccatctgaatgaggaacgctactatcaagactggcagaagatcttctttgagctggggcacatctacaacaaggcagatggacacgccgagaaatcgttgccaagctatacctgcgcacgtcaatggttgcagcaatatggatacgatctacagaaaaagcgcgcaacaagtggagaactgcgaaataagaacgtttggtgggtcacaaagcagtaaaatgcgcacgaaattcactatactatataacaaagtgaaaaatatgcgcacgggcgccgctctttattcgactttctttatttgattttttgcgtggttgtgttagccgagtgctttttgaacggccgaagcatgaggacgggacagaaacgctcggttaacatgatcacgccaacggaaatcttgactaagcgaacctgtgagctttttcaagattggagttgatctaaatggtatgagcgccagcgaataccttcctctttgtcaatccttcaccaataggacgcatatcagaaatgggcgacgatttgatcagagtgaaatatctcaaataattgagaaaaacatctgctgcggtgtgattctgtctgactttgataccattaaaaagtatacctcgaacggaatatatcgtgttaccgtataatacaagggcgtctacactgtggacaccgtttcgtggctgaattttaagctgccaaaagggagtcgcattccacgaccaccctgaaacatgactcaaggaggcggtttcaatttgaaatccccttgaagacttatcaagactgtctttgttgcgctcgtgacagacggcagatctccattacactcttcatattaagaacaatcgtatcatacatttttccgtcagtagccctcaatttgagggtgactgatttgtcgataaactgttctatttccatcaactagtgacagtttgacactagttgaaagcgggtcaagacgctcgacgtttcgttcgcagcatgagggggattacaaactccctgccctgtactgtctggtacgctcccatcgccacttgtggcaatggtcaaaaaagtccaccgtgcgcagaagtgtgctatgaccgggtgtccacaaatctacaaccctttgattctaaaggtagcaaaacgcgacctttgaacctatcgctcacaattgagcaatagacaaggatatcctgaaacgggactacccttggcagtcgaaaattcggctactaacctttcccctgcaagtggagaaagagcgtattctaaaatttcagaaatcgctattggtggcgcaaaaatgttctaccaatcccttctcaaaaatgtgcgccgtggttcaattctggactttcgccacaagtggagatgtgtttgacagaccttatgactggaatcaaagtccgctcataattccgtcgcatttcacgacacaaatagggtatgctcaaaagtggtgaaaataataatcgagccgcaaatccgccgggatagctgctgtctgatattaaacgccgctctttaagtttacttcttgaccgaataccacaaaaaagagccttgctactcgtgtctgagcggcagagctctgttgctgcatgatgtgctataggaaatggtggttggtgtcagcgttcaatgatctcagtggtaattctggtttgaccttcaccaagaagtttgccatatgcgcggtctgagatccgcttgaaatcctctgctttttctcttgatgcaaagtagtcttgtcctagcacggaatctccgttctcatgatcgataatttgcaccaagattttattttcagccataagcttacctcctgctgctgatagaagtggtgacgatgggcgcgatgtctattaccgcagctttctcatatatgcttgggacgttcttttctgactctcatagaaggtaacgccggtaacatcgtccacgaccagatcatcataagggatgccctttttgttcaggtggtcaatgaaccagcgcttttttagatagcaccacggggttctgctgaggtcgccgtaactcgatgcaggccgctcacatgcgttgtaggttttgccgcagatgctccaccattctttacgcactcgctcccgcatttgcaggacctcagaggtgccatgaaggccatgctcctcgccatactgataatctgccttcttgatttttgcgttctgtcccgcgctgactgcaccagctgcaccaagacccaacatgcctaaaaataacgaaaaagcgcctgccataatagtttcctcctgtattttgaagtgtgtttgcttttgctgtacctgaagtctaccaaacggtgcgtccgataagatggacttacaagtgtgcggttaaaaatatggagcgttgtggctgccatcgcgcaagtttatagatgaccgcactatagcaggcaaaaagtctccggtaaggcgtccggtggcggggacacctcactcggtcagccctaacagataatcggtcgacacctgatagaattgggcgagctggatcagatgggggatctcggggcatttgtcgtgctcccatgcgtagactgcccggcgggtcacacccatagttcgggcaaggtcggtctgggtatagccgtgcgtcaggcgcagatgctgcaaacgttctgatataatggtcatagctgctctcctttaaataatgggcgccctctcacagcccggtggatctctgtctttacgggtgcatttttaaacaacgtcaagggtaatggtgccgctctctttggtgatgacctcatactcggtagtttggatgtcccgcagtatcagcttttcgatgctcaggatgctggcaagggggatggaaagcatggtgtgtccggccatgaaatgcagctctgacttgttccggtgtgtatgcagctggatgtcttggaacgcgatgtctgccccggaaaaaacggcgcacccactggctttgcactcggatgtctcggcaagaaaggtgtcaatagcgattttataagtatccatgaggagcctcctgtaattttatatatagcactactctcactcgtgccctcgctctctgtcctgctgtgattagtcagccttcacaaacaactccatgcagtctgcacagatgacccgcacttccttggtgctccggatgatggtaccgcacttaggacatacccaccgccgggtgctgctctttgctttgggaggcttgggcgctccggtctgactgctgccgggtgccttgctccctgctccggtgcctgccatatccgaccatgccagccgctcgcccatctggatgtcctgccagccctgaaagatgataaagtccagcagctcctcggacgggcttgtgatggtccagccgtacttttcatggtggtcgacggtcaaaccgtgtgcctcggcctgctccttaaagcgccggttgtggtagatcccgttgttgctggtgtccttgatgccggtctccatgcagtgttcgtgcaccatctcgtgcagtagggtggatgcggtctcctcgatgggacggtcaagggtagccgacgaaatattgatctcatacttgttctcgccgcctgcctgccagaccttggagcaggtgatatgaccgtatgcggacggggtctttttcaggctgatgatgggctcgggcagcttgcctgcaaagtagtgcttgttgagctcgcggaacatcttttccagctgaccggcagcgcgggaggttttgacagtctgtttcatgatttttcgaacctttctcttgataaaaaaggccgggacaggtataatattggtgtagcccgccccggcgggtgtgttgggctctgtacagcgcaaactttggtcggagagtgctgtatggggctcttttcaggtgatactcaggcgggtgccggtgaccgttttgctgtactggtcgtacaggtcgggagctacggccttgatggctttgctgtcgagtcgggtgctggagaaatcggacaggcggactttgtggcagcctacttccagatagttggtggagcgctcagccagtgcctcgcggatctggatcttcagctgttcctgctcagcctgtgcggcctcgatcagttgggcggcctccttgtactgctcgacaagggtcagtaaaacgttgatactcatgtgtgtacctctcttcaaattgttggtgaatggtcggatgtgagaaccggtgttcccgatggcatgagtatacacatgattgcacaattatgcaagatggaatgttgcacaaagaaaaaacgatgattttatgcactatgcataattgagcaatcatgcataataaacaatacatataagagtggagagactacaatgggtggaagaaccagtgcggcaagccacaacaaatacaatgcaaaagcctacgaccggataaaccttgttgtccgtaaaggtcagaaggagcagattcaggagtatgctaaagagaaggggatgagcctgaatgcctatatcaacgccttgattcaggcagacatgggcgaacacctaaccccgggggtagttaaaaatctggaaggggacgctgactcggtagaatgagatagttgttccatctccccagacctgattaaaatctagcagcagaaggcctctgtctttcacagaaatgtgatcggcgggggcctttttagcgtaaaaaatagcctgacccagagcaggtggtagctgcagtgacgggatgcaagttatacctatatataataggggcagcagggaagagagtaaaaattatgtagtactgtgcgatatacctcgtcaggactcctgactgatgtgacggcatgaactggtttttccgcgcgagggggcgttctatttaacggttgtcattacatcggagcggctatcacacctgactgcactctccagcgccttggacaactatatgaccacacattttgtccatcgatgatttcatctggagctttcatgcgaaactgggcaatgtgcaaaaaagttctggctgaatcgcatttttttctaaaacatggatggatacatttcctcggatttctattgattcccagatataaccatgatagaataataagagaattcagacggccacgtagaagaactggtatcctctgttttgtgatggaaggatacgccttgattgcggtaaggaggtgaatccagtgggcttatgtctgtttgcgaacaatcatgtgatagatcatgagaaaacccgaatgatagatcaaaataaaaagcccactgctgtttcccttgctggcgtgatgcgcaaaggtgaaaatgaagtgggcttgttgaggttctacaaaaatgtgaaatattacatacttggatcaatacacatgcggcgcttgagctgtagcatgacgtcctggttttcattacggccacattgcatttgaaatgaccttgggcgaagctgtcgtccgagggcttttgtctgtccagagatcagtgataacaatctgtcaattttgggagaagaggaacggttatctaaaaggaaggtgcttgccggaacggtgtgagttaaagagattactttatagaagtttgcgttttaaatgtccaagcaacatccgcaaactgcatatcgcaaatatgccgtgttgatagggcactatttctgaaaattgcgataaaacgaatgacgataagaagtgcatagacaaggatttatgtgaggagaaaaaatggctacgaatactgttggaatcgataaggaagttgaagttaaccgcaaggaaaatctgcgcgaccatcgcctgtactggatcggacgtcggatgcaggacgtgatcttgtcatcgctggcactggtggtgctgtcgccggtcatgctggctacggctattgcaattgtggtggacgacccgtctgcgggtcctgttttcagtcaggagcgtatcggccgcaacggtaagccctttaagttctataagttccgctccatgtgccccaatgcagaggcaaaactggacgacctgctagaccagaacgaaatggatggtcccgtgttcaagatcaaggacgacccccgcattacccgtgtgggcaagtttatccgcaagaccagcctcgatgagctgccccagctgtggaatatcctgaagggtgatatgagcatcgttggcccccgcccggcgcttccccgcgaggtggagcagtacggcgactacgaaaaacagcgtctgtatgtgacccccggcttgagctgctactggcagatcgccccgcaccgcaatgacctctcctttgaggagtggatggatctggacgtgaaatacgtcaaagagcgcagcttctgggtggattggaagattatttttaagaccttcaaggtgtgcttgctggggcgtgggaagtaaaaaatagtacatggaaggaaaacggttggagagacgagatggagagagaccttagaattgcggtatttggacagaagcgattgtcgagagagggcggcgtagaaatcgttgtaaaggagctgtgcacgcggatggcacagcaaggctgtcaggtgacctgttataaccggtcgggacatcatgtaagcggcgcagagtatgacgatattgataacacgaactacgagggaatccggcagaagtccgttccaacgatagagaaaaaaggggctagagatataatagagcaaatcaaactatatgaatcgtatgcgg

SEQ ID NO: 13728 - DNA, 47834 bp, Unknown
  gut microbiota DNA sequence
ttaccgagaaaataatgactgagttttcggatttgaatctatgcccaattaacaaccgtcagggaattgtaattgatggtgaaggttcaaaggttatttgcaaagactaatttgaaaattcgcgtttgtggagcgaagcggaacaatgaaagccccagtggggctttcaagcgacagaacggtcttgcgtagcaagatggaggggctttgccccgacaagttccagtttgctgcactcattatttctctttctcgtaaaaacgggataccggagcgtctgcagacgttccggtatcccgtttttatccataattcttctcttttatctacggctgcgcgcagggcggcgatggagggcgcagtaatagccgaaggcggtaccgcacaaaccgcccacgatgtgcataaagtttgccacgttatcgtgcacaaagatgatatcgtacacctgctgaccgaagtacagcgccgccaccagcagcatggtgaccgggatgccgccggagaagcccgccagcgaggagagcatgataagcatgaacacgatgccggacgcccccagcagccccgtgtggggaaataggatgcattgcagcacgccggtgaccagcgcggtaaacaaaatacccttgagcagcgggatgctgccgtatttctcctccatgggcgggcccactaccaacagcagcagcatattgttgagaaaatgctcccagtttgcatggcccagcacatggccgaacagccggatgtagcccagtgggtcccgccacgaggagcggtacacacagaacaggttcatggtgctccagccgttcgtccagccgtctgccagcagcaccagcatggacagcagaaaaaaggtaaggatcaccggcgagttatactggagttccagtttcagcttgatctttttcgtaagcagtcattcccttcacagtattatcggcgttaccctctggtttgcacccagtatgcacccatgctttggccgggctggttcgttacttcatcgttgaggtacgccacaaggccgcaggccgcaggctgccagctgagcgcggcttccaccgtggggtactccacctcggcgtaccagaatgctgtgggcaggccctcgtccacatggttcacctccagcaccgcgccgtccggcaggcggtagctccggcgcacctttttgatcaggggtttaccgatgatcttttcctccagctgcacaaacaggtctttgtcgatgctgcgctcgatctcctcccgtgccaagccccctgcggacttgaagcagaggatatagtcggtgctgccgccggtcagtgcttcctcccggatgcgcaccgtgggctgcacgctgatatagccctgccgcatggtaaattcttcctcaaggggcagcccctccggccagccggtcaccatccatttgcgttcgatctccatagcgttttcttccttccgcaaaattttgtatttattctaccatatttttatgttatgataaagagcagaacaagcatcattttgcgcattcttagttgaaggagcattttatgaaaagcgaacgcacttatcctgtatataaagtcaacaagcacgccgaagggcttttggtgggcgggcacccctgggtgtacaagaacgatattctggaagcccccggcaccacgccggaaaacggctcgctggtggatgtggtcagccccaagggtgcctatctcggcaccggctttctctcgctgaaaagcaagatccgggtgcggctcatttcccgcaacgccaacgatacctttgatactgccttctggcgccgccgggtggagtacgcatgggcctaccgcaaaacggtgctggagcctgccgacctttccgcctgccgcttcatttttggcgaggcagaccagttccccggcctgacggtggaccggttcaacaatgttctggtcacccagaccctgagcgtgggcatggaaaggctgaagccggtgctcttcccgcttttggctgaagtgctgcgggcagacggacagaccattgacggcatctatgagcgcaacgatgaagccctgcgtgccaaggaggggctggaacaaaacaaaggctggtttgccctgcccggcgagagccacccggaaaccacccagaccgagatctgtgaaaacggcgtgtactaccatgtagactttgaaaacgggcaaaagaccggctttttccttgaccagaagtataaccgccgggctgtggcacgccttgccgccgggcacaccgtgctggactgctttacccataccggcagctttgcgttgaacgctgccaagggcggggctgcccgggtgactgctgccgacatcagcgccgaggccattgccatggcaaagcgcaacgccgaacgcaacggcctcgacaacatggatttcctctgcgaggacacctttgccctgctgccccggctggaaaaggagggcagcccctacgacttcatcattctggatcctcctgcctttaccaaggcgcgccgcacggtggagaatgccatgcgcggctacaaggagatcaactaccgcgccatgaagctgctgccccggggcgggtatctggctactgccagctgctcccactttgccaccgaggagttgttcatcaagatgctgcgcgccgccgccaaggacgctcaccggcagctgcggcagatcgaggtaaagcagcaggcaccggatcaccccattctgtggggcgtgccggagacaaactacctcaagtttttcctgtttcaggtcatctgatgcttttacaatgagaacaattgccgcgcgctgcgcacctttcagccggagaaagccgtcctgaagggggctttttcgatgcaaaagtcataccaatcgcggttattccaaaaatccgagatcgtgtttgtgcagaatcgtcagttttgtcaattgccttttttgcccgcaaggactataattttagccatagacagcaacggcgctgtgggtcacctcctgactcgcagcgccgtttttgttaagatgtaagcaagctttgggtttttgcattgcggcagacccaaggcgaaagaaaaaagtaagatcaagtaaggagtaggatttatggcagcaaatgttatggagatctacggcagcaaggtctttaatgagcacgttatgaaggagcgcctgcccagcgctacctacaagagcctgaagaacaccctgcacaagggtgctccgctggatatcgaggtggcaaacgtcgttgccagcgtgatgaagcgctgggctatggagctgggtgccacccattacacccactggttccagcccctgaccggcatcaccagcgagaagcacgatggcttcgtcagccctgtgggcgacggcaccgccatcatggagttctccggcaaggagctggtacgcggcgagcccgatgcatcctcctttccttccggtggtctgcgcgccacctgtgaggcacgcggctacaccgcatgggaccccaccagctacgcctttgtgaaggatgacgtgctgtgcatccccaccgcattcgtcagctacaccggcgaggctctggataaaaagactcccctgctgcgttccatgaacgcactgtccggtcaggccgtccgcatcctgaagctgttcggcaaggatgtggactacgtttccaccaccgtcggccccgagcaggagtacttccttgtcaagaaggaggactacgaggcacgtcaggatctgattctcaccggccgcaccctgttcggcgctccctctgccaagggtcaggagctggaggagcactacttcggtgtcatccgtcccgaggtttctgcgttcatgaaggagctggacgaggagctgtggaagctgggcgtgcccgccaagaccaagcacaacgaggtggctccctgccagcacgagcttgctcccatcttcgataccaccaacgtagccatcgaccacaacctgctgaccatggaaatgatgcgcaagatcgcacccaagtatggtctggtctgcctgcagcacgagaagccctttgaaggcgtgaacggcagcggcaagcacaacaactggtccatgagcaccacccacgagaacctgctggaccccggcgacacccccatggagaacctgcagttcctgatcttcctggccgctgttatcaaggctgtggatgagtacgctgacctgctgcgcacctctgtggctaccccgggcaacgatcaccgtctgggcgccaacgaggcacctccggccatcatctccatcttcgtgggcgaggagctggaagctgtcatcgatgcgatcgcatccgattctccctatgccggccccgtcaagatgaagatggatctgggcgtggacgttctgcccaagttcagcaaggacaccaccgaccgcaaccgtacctctcccttcgctttcaccggcaacaagttcgagttccgtatgcccggctctgccgagaacctgagcgactgcaacaccatcctgaacaccgctgtcgccaaggagctgaagggctacgccgacgaactggaaggtgctgaggactttaccagtgcagccatcgctctgatcaagcgcaccatccgcgaccatcgccgcgtcatcttcaacggcaacggctataccgccgagtgggaggccgaggcagccaagcgcggtctgcccaacaagaagaatacccccgctgctctgcccgcactggtcgagcccaagaacatccagctgatggaggagttcggcgtgctgaccaaggtggagatggaaagccgctacgaggtcgagatggagcactactccaagattatcaacattgaggctctgaccatgctggagatggcccgcaagcagctgctgcccgccatcaacgcctacatgagcgaggttgccaataccgccgcctccaagctggctgtcagcgagcacatcagcgtgcgcagcgagaccaagactttggaaaagctttcttctgacgccgatgccatgagcgatgccatcgacaccctgcaggatgccgtgaatgccgccaaggcactgcccaccgagagcgagaaggccgttgccttccacgataacgttctcccggtgatggatgccctgcgtgccgctgccgacgatgccgagactatctgcggcgaggattactggcctctgcccagctacagcaagatgctttactacgtctgataatctcctgacagcgtaaaaaaataagcatccgccggctgccggatcaattagccattctccttttcctatttcttacaccagcccaaagacctgctccctttttgagggcaggcctttgggcgttttatttgaaatgcagtttttgtaagggggttatttatgagctattccacccaacaggatattctggatttcgtggaggacaacaacgtcaaatttgtgcgctttgccttctgtgatatttttggcacccagaagaacattgccgtgctggccagcaatctgtccaaggcgctggaagagggcgtgtgctttgacggcagttccattgcgggctttatgcacgttgaggaaagcgaccttgtgctgcggccggatttttccaccgtgaccatcctgccgtggcgtcccaccgaggggcgggtgatgcagttcttctgcgatgtggaaaagccggacggcgcatcctttggcggcaactgccggggctttttgcgggatgtgaaccgcaagttcaaaaagctggggcttacctgcaacgtgggcaccgagtgcgagttttatctttttgaaaaggacgaccgcggccgtcccacctgcattcccatcgactttggcggatattttgacgttgcgccgctggatgcgggcgagaacctgcgccgggacatctgcctgaccatggagcagatgggcatggcaccccagcacagccaccacgagagcggcaacggccagaacgagatcgactgccgctacgcagggccgctgaaaaccgccgacaacgtaatgacctttaagcagatcgtccgtgctattgccatgcgcaacggcctgcacgccagctttctgcccaagcccctgccccagcaggccggcagcgggctgcacatcaacctctcgctttacatggacggcaaaaacctgtttgagggcgatattgccccggacagcgtagcaggcagctttatggcaggtgtgttggcacacagccgggagttgaccgtgttcaccaatcccctgcccaacagctaccagcgctttggctgtgacgaagcgccccgctatgtgagctggagccgccagaaccgcagccagctggtgcgcatccccatggtcaagggcgacagctgccgcatggagctgcgcagcccggaccccgcctgcaacccgtatctggccattggcctgatccttgctgccggactggacggcattgaaaagcgcatggtgctgcccccgccggtgaaccgcaacctgttcgatgccgccgaagccaagggactggggcttgagaccctgcccgccacccttgaggaggcggtgcaggtggccgaggagagcgagtttttgcgcaaggtgctgccggaggggctttctaaacgctatttctcggaggagctcaagcgctgcgctgcactgcggagtgcgcctgaccgggccgagcacgagcgcgtctactattttaacgccatctgatccctgccagcgcaggagaaaggagtgcggaaaatgggacgcgcactgatcgtaagcgccggtgccaactccaacgagtatattgccgcgcggctgtccgagataggttacagccgcccggtgatcattcccagcggagccgaggcacggcgcagaatgtcggaatctgattttgagttgatcgtggtcaacgctcccctgcccgatgagtttgggcacgaattgtgcatcaccgctgtggagcagaccgatgccggtgtggtctttctggtaaaggccgcacaggctgagcaattgcttgcccccctgaacgagcagggggtgctgctgctgagcaaacccttcaccaccccgttgtttttgcaggccatgcacatggcggctgccggcaaccaccgcctgcagcgactgcggcaggaaaacgcccgcctgcaggacaagatcgggcagctgcggctggtcagccgggcaaagtgctgtctggtagagcacgcccacatgaccgaggccgaagcgcaccgctaccttgaaaaacaggctatggacacccgccgcgaccgcgccgaggtggcgcaggaggtgctggaagagtacgctgacagaagcgaatgagacacagggcttcgccccgcacccgcagggaaaggggtgcgccgggagcgagccttttatagaaaagttttattttacgaaagaggaaggtatatttttatggcaaaatttatttttgtgaccggcggcgtggtctccggtctgggcaagggcattaccgctgcatctctgggccggcttttgaagtgccgcggcctgaaggtggccagccagaagctggacccctatgtgaacgtggacccgggcaccatgagcccgctgcagcacggcgaggtgttcgtgaccgatgacggcaccgagaccgatctggatctgggacactacgagcgcttcattgacgaaaatctgaacaagtactccaacctgaccaccggcaaggtgtactggaacgtgctgaacaaggagcgtcagggcgcttatctgggacagacggtgcagatcatcccccacatcaccaacgagatcaagagctacatctataacctggcctcctccaccgaagccgatgtggtcattaccgagatcggcggcaccaccggcgatatcgagagccagcccttcctggaggccatccgtcaggtaggtctggagcagggacgggagaactgctgcttcatccatgtggtgctggtgccctacatctccggctcggacgaatacaaatccaagcctgcacagcactcggtcaaggagctgcagggcatgggcgtaagccccgatatcatcatcctgcgcgcagacggcagcgtgggcagcgacatccgccgcaagatcagcaccttctgcaatgtcaagccggagtgtgtcatcgagaaccttaccatgcccagcctgtaccagtgcccgctgatgctgcacaccaacggtctggacgatgtggtggtgaagcagctgcacctggatgttccccccgctgacctgaccgagtggaagcaggtggtctcccgcattgccacccgcagcaagacctgcaccattgcactggtgggcaagtatgtcaagctgcacgacgcttacctctcggtgatggaaagcctgtaccatgccgggtttgagaatgacagtcaggtggagatccgctgggtggaaagcgaggatctgaccgatcaggccgcctgcaaagaagcctttgcggatgtggacggcatcatcgtgcccggcggcttcggcgaccgcggcattgagggtatgatccaggcagcccagtacgcccgcgagaaccgtgtgccctgctttggcatctgccttggtatgcaaatcatggtcattgaatttgcccgcaatgtgctgggctacaaggacgctaattccagcgagttcaccccggacggtgcccacaacgtcatctccctgatgccggaccagcagggcaatatccccaagggcggcaccatgcgtctgggcaagtacccctgcacggtgaagcccggcaccaagatggccgagtgctacggcgagagcgagatctgggagcgccaccgccaccgctatgagttcaacaacgacttccggcaggagatgcaggacgccgggctggtcatttccggcaccagcccggacggccatctggtggagaccgtagaactgcccggccgcgacttccatctgggtgcacagttccacccggagttcaagagccgccccaaccgcgcacatcccctgttcaagggctttatcgccgctgcgctgtgctaccgcgctgccgcccagcgggatatgctgcatctgtaatagcataatataacggcaaggccgcagcacaaaataccgtgctgcggccttgctttatgtaagacgattttaaatgccttccgcgccgtcctgtctggcgtggtttgcctgcttattctcgtacatccgctggtcggcgatgcagcgcacctgctgcacatccacgctttcggcggggtacagggcgtagccgcagctggcacccacgcttacggtattgccgtcgatctcgtagggcacagcgaccatctcacagatcaggttcatcttgctggcgcaggcctccgactccatcgggccgagcagcagcagagcgaactcgtcgccgcccagacggaaggcgtagtcccggcttcggatgcagccctgcagccgctgggaaacgcccttcagcagcttatcgcccacatcatggccgtaggtatcgttgaccggcttgaagcgatccaagtccatataaaatagcgcaaaaggctggctgtgctgctccagcaccgtcagtacccggtcgaagtagcgcttgttcagcagaccggtcaggccatcggtgttggcaaggctttgcagcaggtgctgcttgcccatatcctgcacgatcatcatcacacgggtcaggcgattttccttccacgccatgggaacgaccgtcatcatgaaaaatgcgcttttatcacgggcggcatattccagcttgagggagtcgttgtccgttttgatgagcctgcgcaggttttccggggccagcatctgggggatcttggcgttttcgctatcggtcagaactacatacttgcgcgatatttgctccagcatctgctggtaagagccctccggttggtacagcggctctccgcgccgctcgtggtactggtagcggtcgcggtccagatcgcacactgcaaaacgctccacaacgcgtgccatgcccgcaaacatcatatcgcttttttcccggcggcgctccagctcccgacggcggttgcgctccgcgtcacgctggatctttaccacgcctgccatgatcagaagccccagcagtgcgatgactaaaatagtagcgttttgcaccctgcgcatcccggaatccaccaccccggtgggtacgatgccgatgatgctccaatccagaatgcccagcggctgatagatcaggtaatatttctgcccgttcatggtgaacagcacacagccctcgccgccctgcggcagggtctgcaccatggtgtcaaagtaaggctgatccacgctggcgttctgctgtaagtaatcaaacaggttggtcatctgctcggtgatctcggtctttgtctcggtggaaagcaccacatcaccgtttgaacgcacgatatagcaatcgctctgtccctcatagaccatgctgcccagcagcttttccagcacggcgttatcgtagctgaccgccagcgccgtataggtggtgtcacccagctgcaagggctgttccataggcagggcaaacatgatcttgcggatgccctgactggagatatagctggagatcaccggagcatttgcagtatacagctcctcaaaagttgccctcatatgctctgctgtgccctgccgcccggcggtggtccagaactcgcactgctcgttgaacaggtaaaaatccgtgtattgccaggtagccttttgggcgatatactcctgccactgcccctcctgctctcccagctccgcaagggtgcctaggtagctgtcccagtcggtcaggatgttccagttgcgctgcgcaaacatggtaaaggtcttggcagactgcccataggtggaaagcagatttgccgtgctttcctgatagatctgcttctgggtataggcgctgtaaataaggatgccaaccagcagcgccagcagcatccctgctatgagcagtatatttattcgtttcttcttcataaggtcaatttcccccgactgccccgcagccaaaccccttcacaatacgttcttccaaaggctttatgccaaagcgctgtgcacagttttttgcaaaaagtgtacaaccgctgcgtgtcagttcccgcataaaccgacactatccctaataacattataccattccgcaaaaaagcctgtcaacacatccccggggcgattcgtgtcgtttcaagggcgattcacgcagatttgctctgcttttgccgcttaaaaagacaaaaagacccgcagaccgcgcctgaactttcagggccgctgcgggtctttttgctggtgcagaagaagggacttgaaccctcactcactaggaactggtgcctaaaaccagcgtgtctgccattccaccacttctgcttatagaaaaaaggcaagtcaaaaaccgacttgccttctggtgcgagggaggggactcgaacccccaaggataaaccacacgcacctcaaacgtgcgcgtctgccagttccgccaccctcgcatacctgttatacagttctccggtttttgaggtagaaaaccgttggtgcggactgcttggatatagtaacatatttccggccattcgtcaagtggtttctttgtttctcataagtttttttatgcttcatatctataatagcagcgcagcgcgcgcgcaaaagcagccttgcgggcaattgcacaggtcatttgtacgcggaaagtgtgcctgcggcgctgcgcccagagcaaaggaggggtttgtatatgaagcaatttgtgcagcgcgccggcgggcgcatcgggctatggggcgggctgctggcggctgcgctggcagcgtttgcggcggggtggctggtgccggcacgcgcgccggtgggctgcaatctgaacgagctgaccgccgcgccggacttttcgcccttttcccctgccgcaccggcggtggctgcatccgatgccggtacgcccgctgccccttccctgccggaaaaatgggtctgcctgacctttgatgacggcccgagcaagaccaccccggaggtgctggcggcgctggatgccgccggagtgcacggcaccttttttgtggtggccaccggctacaatgagaaatatctgcccctgctcacacaggctgctgccgccgggcatcagatcgcgctgcactctgcctcccacgaatacagcgatatctaccgcagcagcgccgcctactggaaggacatcgccctgctgaaacagcgcattgcgccctatgtggacgctgagagcatccggtacctgcgctttcccggcggcagcaccaacaccgtaagccgccgctacggtggcaaggggctgatgccgcagctgaaaaccgaggtagagcagcgcggctggcagtgggtggactggaacgtctgcgccgaggacgccgtgggcgggcaccccagtgcggataccatctaccgcaatgtggtgcgggagaccggcgagcagacccattgcgtggtgctgatgcacgattctgccaccacccacaccaccgccgaggcgctgccggacatcatccggtggtatgcggacaacggctacacctttttgaccgtagccgaggcgctgccgctggggtagtgcaccttacagccatttttcaaagcagcgtcccagcagtaccccggcagaggccagcaccgccagccagagccagcctgcgccgccggtcaccacccaccccgccgccagaatggcggcaaaggtacataccggcggcacagcgaggcgcaaaaagcgcagcagcttctcccgccggagcggcagtcctgcgtccagctgctcgggatgcacagcatcgcagcagatctcgtcccggtacttgcccgggttgcggtaggccttatacgcgatgtcgtccagcaaaaactccgggtacattccctctttggtcagggtaaactgcatttccttttcctctgcataggcctgcaaagccaccgtaaactcctgcggggtgttgatgctgccctgcggaataaagaaaaagtgcttttgatgctgcacctgcgccagcgtgcagtaatcctgcagccagccggagaagaacccctgctgcggggcggggctttccatacgggtcagacaggcgtccacgtccagcgtgtccgtctgcggagcctgccgggcaaggtcggcgcagaactgcatggctgccgccagctgcgccgcctgctgctccagcacggtctgctgggcttgcagcgcctgttgcaggggctgttccccgcgcagtaccgccttgatggtaggcagcggcacatccagcatccgcagcatacggataagtttaagcgtgcggacgttcccggcggtgtaatcgcggtagtcattgccctgcctgcgtgccggtgtgagaagcccttctttttcataaaaacggatgttaggggcggacacaccgctttgttcagaagcctgtttgatgttcatttgcttcacctccgcccttacattacaccttaaagccggttgaaggtcaaggcttttgcgcaaaaaaccgagccgccgcacaaaaatgtgcaggcagctcggtttttcaatgcaaaatatccgtcagcgcgggggatcagtcagcagactggcagaacacagagaaggtgcggtaagccatgtacaggtcggtcttatggatgacctcgaagggagagtgcatggacagcacgggtacgcccatatccagcaccttgatgccgcggtttgccacatacttggcaatggtgccgccgccgcccagatccagacggcccatctcgccgatctgccatgccacgttgttggcatccagcatccgggtgatgtcgcccagcagctcggcgttggcgtcgctggcagagctcttgccgcggctgccggtgtacttgaagatggcaatgccgcggccggcgtaggtgccgttctgcttctcaaaggcgcttgcccaggaggggtcgtaggcagcggtcacgtccgcagacaggcacacgctgttacggaaggcgagaatgtcgtcctgaccggcagcacggcagagcagctgcataaagtggaacacatacatactctgcataccggtcacaccgtcggaaccgatctcttccttatcggtcagcacgcagatggtggtgtgcacgggatccttggtctcgatctcggccagcagtgcggggtaagcatccacgcggtcatcgtggccgtaggcaccaatcatggagcggtcaaagcccacgtcgcgtgccttgctggcgggcaccacctcaatctcggcgcgggtgaagtcgcgctcggtgatgccatacttctggttcagcaggatgagggtgttcagcttgacagcctccttgacgtcctcttcctccacggtgtcagagccgatgagcacgttcagctcctcgcccttgatgccctcgctgagcttgcgctcgttctgctcagcacccagatggggcagaaggtcggtgatgcagaacacgggatcgttctcgtcctcaccgatggcaaagttgacgctggagccgtcggcgcgggtaaacacgccgtggatggccagcgggatggtagcccactggtacttgcgtataccgccgtagtagtgggtgcggaagtagctcatgtggtcagactcgtacagggggttgggacgcaggtccagacgggggcagtcgatgtgggcgatgaccagacggaagccctcttcatagggcttctggccgatggtagccgccacaacagccttgttctcctgaatgaagtagaccttctcaccgggggcgtaggcctttttgggttcaaaagccttgtagccggcagccagcagcatctgctcgctgacaacggcagcctcgcgctcggtcttggcgctgtccataaatttcttgtagccctcggcaaaggcagcagccttttcctttacgtctgcctgcttgtcggcagcgtactcaggggtgtagagcagcttttcggcgtactcttttgcagtaagtttctcactcatgattttttgctccttaactttttatcattgacctgcgtacagacgctgataggtctggtagcaggcggtgatcttgttgacgtagtggtgcatctggttataagggaagccctgcagcgtttccccgtctgcggagtgctcctctatttgcagcagctgatccaccgtgccccagccgctgtggtaagccgctgctgccgtggatacatcccctttgtagcgcaccatgcaaaggtgcaggtagtagcacccaaagcggatggcggtatcggggtcgtacagatcggcaaaggtcagcggttcctccggggcgatcttgctgcgcatccagagaaaggtttcctcagtcatctgcatcaagccccgggcatccacgctggaggtggcctgcgggtcgaagccgctttcggtgtggataaaggcgtagaccagcagcggatccaactcatagtctgctgcccatttttccaccagctgctcgtacttgcgggggtacaaaagctgctctgcccggttgcacaaaggcggcaccacgcacaccgtaagcaccacagccaggcacaaaacgaccagccgccgcaccatccggcggcggcgctgctgtttgcggcgacgcagtttttcccgcgcggcgcggcgctcccggacggcgatggggtcgtaggctttttcataattttgttcgttcaaagcgctgccgtcacgcccccttctgcctgcagccgctcacacaggcgggcggctgcggcttgcagcgcctccaacccggcgtcgttgtgcagggtgtagtctgcctgtgcggtcagggtttgttccggggtctgagcgttcaagcggcgggcagccatctccggcgaaatgccgtcccgcgccacaatgcgcgccacgctggtttcaaagggtgcggtgaccacgcacaggcggtcgcactcagcctgtgccgccgtgcccacaatgactgcaccgtccagcacaaaaaggggcgcaccggcggcctgcgccgcctgctttgcggcgcggatgcgtgccacgatggcggggtgggtcagactgtccagcgcggccttgccctccggggtggcaaaggcgcggtcagccaacagacggcggtccagcgtgccgtccggctttaaaatatccccgccgaaccgcgccgcaagctgcggcagcagcggcgagccgggcagcaaaatttcccgactgagctggtcggcgtcggccagcggcacgccgtgggcggcaaatactgctgtgaccgtggacttgccgcaaccgctgcgccctgtgatgcccagagtgatcataggtcgatcacccggaaggcggcggcgcggatcaggcggttgtacactgccatggacaggccgtccttctgcggacagcgggcgtagactacgccgtcgccctgctcatccagcgcccgcagggagcggaagatgtgctttgcctgatcggcaccgtccccctcgcggccgtattccacgcagggcacatccagctttgcgctttcgccggtaaagcacaggcagctggggttctcgtctttatgggcgtccacataggccttgaactgcgcaaaggtgccgttgagcaaggtcacatcggccttgggggcgtagtgtttgtacttcatgcccgggctgcgcaccacagcaccctccggcagcttttccagaatggccttggacacctctacctcttcgccgagggcgcgttccaagtcctccagcgtgatgtggccgggacggaacagggtgggtttatcacccaccaccgacaccacggtgctctccacacccacatcgcactcgccgccgtccaaaatcaacggcaggcggccgtccatatcggtgaacacatcctgtgcgttggtggggctgggcttaccggaaaggttggcgctgggggcggcaaaggcgcagccgctctgctggatgaccgcccgcgctaccgggtggctgggcatccggatgcccacggtatccagtccggcgcagcactcatccgccacctccggcccgcgcggcatgatgatggtcagtgggccggggcagaaggctgccatcagcagctgggcacgctccggcacctcgctgacaagacccggcagcatctccggcccggtgacgtggacgatgagggggttatcctgcgggcgccccttggccacaaagatatcgcgcaccgccgcaccgttgcgggcatcggcggcaatgccgtagaccgtttctgttggcagggccacaagctgaccctgccgcagcagctgcgcggcctcggctacgcctgcttcatcggcaggcaaaactctggttttgatttccatacgaatcatcgttctttctatctgtaaagtatatttgcttggcagtcgtttggatggttttgcacccgcaaaaccgggttttacccgcccagcctttgcagcttttcggtctgctcatgggtggcaagagcatcgatcacctcatccagattgccgtccatgatcttttccagattatggacggtcaggccgatgcggtggtcggtgcagcgatcctgcgggaagttgtaggtgcggatcttctcgctgcggtcgccggtgcccacctgcccctgacgctgggcgttgatggcatcctgctgttccttctgtttttgcgcaagcagacggctgcgcaggatctccagcgctttatccttgttctggaactggctgcgctcgttctggcactccaccaccgtacctgtggggatatgggtcacgcggatggcactggaggtcttgttgatgtgctgaccgcccgcaccggaggagcggaaggtatcaatgcgcagatccttcatgtccagcgcaaagtccacctcctctgcctgcggcattaccgccacagtggcggtggaggtgtgaatgcggccttgggtctcggtctccggcacacgctgcacccggtgcaccccgctctcgtacttgaggcggttatatgcgcctgcaccgtccaccgagacaatggcttcctttacgccgccaagttcggtctcgttcaggttgagcagttccagcgtccaaccacggttctgggcgtacatggtgtacatgcgcagcaggctgtgggcaaacagggcggcttcctcgccgccggcaccgctgcggatctccatgatgacgtttttgccgtcgttcacgtccttgggcagcagcaaaattttgagattattttccagctttgccacatcttgacttttttcgctgatttcctgctgtatcatctgcttgaagtccgggtccagtgaaccgggctcctccagcagggctttggcctgcgccagatgatccagcgcggtctgccagtcccggtaagcctccaccaccggctcggtgtcgtggtactcccgcatcagcttgcggaacagcgccgggtcggcggcggtatcgggctggttcagccgtatggaaagttcctcaaagcggcggcagaccgcatccatccgggaagaaatatcttgcatccttgcagttctccttacaaattcgttccggttcgggtgcgttggctgcgctactgcacgctgccgggctttaccacctttttgatgttcttttcaattttggcgcggggcagcatgacctcgcgtccgcagccggtgcagcggattttaaaatccatgcccacccgcagcacctcgaagctggatgccccgcaggggtgctttttgcgggtgaggatggtatctcccacagcgatgtccatatttatccgacctctcccttcttttctgccgcgcaagcgcccggcagagccagtgtgtgccgccgcccgctgagcgggtgctgcgcatacagatatagtataatgcaaagccgcacaaaatgcaaatatctgcgcacactgctgcatatcgttgtagcatcgcacagagacccgaaaaccatatagaaagaggaatgaaacatgatgcaagcttatcgtaccgaaaacagttaccgttctgccgcccgtttgtcccctgccgagctgcgggctgccatggccagcggcgaaattttacaggccactgcccttgcctttgacacccggcggcagctgcggtttgagctgggcggcgtaaaggcggtgatgccctttgcccagtgcgcagacggtgccgagacaggtaccgtgcgggatattgcggtgctgacccgggtgggacgccccacctgttttgtcatcgaggggctggacacggacgaggacggcgcgccctgctaccggctttcccgcgccgaggcgcagcggctgtgcaaggcggagtatctggacaccctttcgcccggggatatcctgccctgcacggtgacccacatcgagccgttcggcgcgttctgtgatgtaggctgcggcatcagcgccctgcttcccatcgactgtatgtcggtaagccgcatctcctcccctgccgaccgggtcagcgtagggcagcagattttgtgtgccatcaagaaccgggacgcgcaggggcgctttgtgctgactatccgggagctgctgggcacatgggcagagaacgccgcccggttcaccgtaggcgaaacggtggtgggcatcgtgcgcagcgtggaggaatacggcacctttgtggagattgcgccgaaccttgccgggcttgcggagagctgctccggtcttgcgcccgggcaggcggtaagtgtctacatcaaaaacatcctgccggaaaagatgaagatcaagctggtcatcgtgaaccacgccctgagccagccccaccggtttgagctgcggtacttcatcaccgagggacatctggacaggtgggtgtactccacaccggaatgccccaagcgcattgagacagattttgccgttgcggcttgcaatccgggctgaaagcctttatactaatagaaagagtttttgtctgcccgctgcccgcccttttggcagcggcgcagacctttgataccatgtgaaagcgcaagggggatgtaaggaacgatgagtgccaatgatgcttttaccgccggtgtccgtcccggcggcctgaccagcagcaccgagatccggttgctgctgtgctatctggtgaaaaacgccggtcccattacccggcaggagattgagaacgccctgatggaggaagcccttgtcaactattttgagatcggctcctgtctggacgatatcacaaaacaggcgctggtcaccctgaccggcgacagctacaccattaccgacaaaggccgcaaggtagcgcaggagctggcctacgacctgccccgcagcgtgcgggagcgggcggtggctgccgtgctgcgctgccagacatgggcccgcaaggaggccaagtacagcgcccgcatcaccgaaaaggccgatggtcactgcaccgtgcgctgcaccgtaaaggggctggacagcgaactgttctgtctggaactgggtgcgcccgaccggctgagcgccgaactggtgaagaagcagttcatcctgaagggcaacgagatctatcagctgctgatcaacaagctgaccgaggaagaaaaataagacagaacgatccccgcccgctgtaagcagaacttacggcgggcggggattttttcagatacgcctagatcaggatacagatcagtccagtgcagccctcgttgatgacccgctccagcgtttcctgcaggcgggtgcgggcttcctgcgggatgtggagcagcttgttctgcaagccgtcgttcaccagctcgtgcagacttttgccgaaaatgttggactcccacagctgcaccgggtcgtccgcaaagtcggccagcaggctctgcaccaagtcctcgctctgcttctcggtgcccacgatggggctcagttccgtgtggatggtggccttcatcatctggatagagggcgcgcaggcttgcagccgcaccccgcagcgcccgtcctgatgcacgatctccggcggttccagatgcagctcgtcgatggagggcatcacaatgccgtagccggtggcttccacctgctccaaggcgctgcgcaccttctcgtaggcgcgttttgcccgggcaagctccatgatgcagggcatcagccccgcctcgtccccgatgtccagcccggtctgctcgctgagcacctgataaaagatctccggctttaactccaagctcacccgcacactgccggcggcaagatctgcgcccgccactgccgagcgctgcacggcatcgcattccagcgcaggggcgtccgttccggcgggcagatccttcatgcgggacacccgctctgccagctgcatggcagctgtgtacacctgtgcttgcaaccagtgcccgggctccagcatggtcacccagcggggcagagcaaaatccagctcctgcaccggaaattcatacagcacccgccgcaaaatctcccccagcatggcggcgtccaagtccacgcagcttaccggcagcacggtgcggcggtagtctcgcgccatgccctcggccagctgccgggtctccggcgcgtccgggtgggtgctgttgagcaggatgatataaggcttgcccagcgcttccaactcggtgacgacccgcctttcggcctctgcgtagcccgcccgggggatatcgctgactgagccgtcggtggtgaccaccaccccgatggtggagtgctcacagatcaccttgcgggtgccggtctctgcggcaaggtcaaagggcacttcctgctcaaaccacgggcttttgaccatgcggggctttgcgtcctcctcgtgccccatggcaccctccaccatgtagcccacgcagtcgatcagccgcacccggcacgccccgccgccctccagctgcaagggcacggcggtctccgggatgaatttcggctcggtggtcatgatggtgcgccccgctgccgactgcggcagctcgtcccgggcacgttcccgggcagcggcagagccggacatggcgggcagcaccagctgctccatgaaccgcttgataaaggtggatttgccgctgcgcaccggccccaccacaccgatgtagatatccccgccggtgcgtgcgccgatctcgcgacagatgctgttctgttcctgtttctccaaggtccttctccccttcctgttgcgctgcgcaccgcgcccgtaggggtgggtgtgctcgttgtatcgtatgaaaagggagcgcttattatgccgggacgatcttaaatgccctccgctttgctctgggcataatcagcggaaaaattattttatataattgcaattgaagaaaatctgcggattttcctcaattgccttttcacgggactcaaaaaagagctgccgtgcaaacacacagcagctctcagaaaggttttatgaaatcacggggtcaggcggttggggccgcggaacaggaactcggcgtccttgatgctcaggccgcacagcagcatggtcaggcggtcgatgcccagaccaaagccgccgtggggcgggcagccgtactggaagaactccagatagaacttgacatcatcggccagacccttctcctcggcctgcttcttcagcacctcgtagcgatgctcgcgctgggcaccggtggtgatctccacaccgcgccagatcaggtcgtagccctgcggcacgccgttctcatcgcgcatgtggtagaaagcgcgcttctcggcggagtaatcggtgatgaacaggaactcgtggccgtagtgcttcttgacccagtcgtagctcaggcgctcggcctcggtggtcagatcgcccttctcgctctcgtccacggtgtagccgaactcttcttccagagccttgtacaggtctgccagcttgaccaccgggaacggggtggtgggcacgatgacttccagtccgaacaactccttgatctggtcgccgtagctgtccttaacggcctgcagaccggcggtcagcagctcctcttccatcttcatcacgtctttgaaggaggtgatgtagctgaactccagatcgaagccggagaactcagtagcatgcttgttggtgtagctcttctcagcgcggaacacgggaccggtctcgaagatacgctcaaagccggcagccatagccatctgcttatagaactgggggctctgtgccagataagcgttgcggtcgaagtagtccaccttgaacacctcagagccgctctcgctggcagcagcgatcagcttgggggtgtggatctcgatgaagttgcgatccagcaggaacttgcgcatggcgttgacgaagcagctctgtgccttgaacatcaactggttctcgtcggtgcgcaggtcgatccagcggtagtcgatgcgctggtcgatgctggagcgctccacagccttctttttcttggtggctgcgatctccttgcggacgatgggcagtgcattggcggtgctctccacctcgatgctctcggggatcatctccacgccgcccatcttgacgtagtcgttctccatcaccttgccggtaacggtgatgacagagtccggggtgagctggtcgatggtatccaccagctcggggtggtcggccttctccaccgtgatctgcagcttgccggtaatatctttcagcacgataaatgccatatacttgctgttgcgcaggttctcgataaagccctgcaccttcaccgtgccgccgatggccttttgagcctcattgatataggtgcgttccataatacaggaatcctcctttaacgtcttgtgtactgttttattatacgcttttcaggggataaatcaagagatatgccaatttcagccgctctgtgctgtgctttctgtaaaaatggagacaccggagcgtcagccaaggctccggtgtctccatataatagatcatttttcatcgtgcagggtgccagtgccgccctctaccacgccgtcatgcttgagcacagcggtaatggtgccaaagaagcacttcacatccagcccaaagctgatgtgctccacataccagccgtccagctttgccttttcggcgatttccagctcgtcccggccatggatctgcgcccagccggtcaacccggggcgtacatcgtttgcaccgtacttatcccgttcggccagcaggtcgtactggttccaaagcgctgggcgcgggccgatgaccgccatatcccccacaaggatattccacagctggggcagctcgtccagactggtcttgcgcagaaagcgtcccatgcgggtgatatactgctccgggtcgtgcagcagatgggtgggcatatcgtggggggtatcaatgcgcatagtgcggaacttgaggatctggaaatgccgcttgccgatgcccacacgcttctgccggaaaaacaccggcccgggcgagtccagcttgatggcaatagtcaaaagcagcagcagccacgaaaggcacagaatgccgcaggccgacagcaaaatatccagcagccgtttgatccgattccgatacataaatccaacttcctccgttttctacgggtctaccgccttattatagcagtatgggcagcatttttcaattgcaggctgtacccggcgggtgatatttgccgcttttggagagaacagggcgcttcacctcttgttttttacctaatatcgcgctataataagcaattgctatgttcacgcaaggcttattataggaggtagacaactcatggctacgaccagccgttccgcagacctgaccagcgggcccatgctgcaaaagatcatcttgttttccgtgccgctggcggcatccagcattctgcaattgctgttcaacgccgccgatgttgtggtggtggggcgctttgcgggcagcacggcgctggccgccgtgggctccaacggcgcgttgatcaacctgctggtcaacctgttcgtcgggctttcgctgggtgccaatgtggtggcagcccggtgctttggcgcccgggacgaaaagggcgtgcaggatacggtgcacaccgccgtagcgctgggcttagtcagcggcgtgctgctggcggtggtgggcttttgcgccgcgcgcggtctgctggagctgatgagttgcccggaggacgtgatcagcctttccaccctgtatctgaagatttatttcatcggaatgcccatgaccatgctgtacaacttcagcagtgcgctgctgcgggccatgggcgacaccaagcgcccgctgtactgtctggccgctgccggcgtcatcaacgtggtgctgaatctggtctttgtcatcggcttttccatgagcgtggcgggcgtggcactggccaccatcatcagccagactgtgtccgcgctgctggtgaccgggatgctcgtccgggaggagggcgcactgcggctagacctgcggcggctggccttccacgccgggacgctgaagcagattttgctcatcggcctgcctgccgggctgcaaagcacggtgttcagcctttccaatgtggtcatccagtcttccatcaactccttcggctccatggtggtggcgggcaactctgcttcctccaatctggagggctttgtgtacaccgccatgaacgcctttgcacaggccgctgttacctttaccagccagaatatcggcgcgcgcaagtaccacaacctcgaccgggtgatccgcaactgtctgctgtgtgtcgtggtgaccggccttgtgctgggcggtggcgcagcactggcggggcaccagctgctgcgcttctactcctcggacactgcggtcatcgccaccggcgccgagcggctgcgcctgatttgcggcttctatctgctgtgcggcatcatggacgtgctggccagcagcctgcgcgggctgggctacagcgtgctgcccatggtggtaagccttgtgggtgtgtgcgtgctgcggctggtgtggatcgccactattttccagctgaaccgcaccccttttatgctgtacatcagctaccccatcagctgggcactgaccgcactggtgcatctggcctgcctgcttgtggtgcggcggcatctgcgccagaagcagcagcagacggtataaatcctttttgcataaaagcagcgccgggcagaccaaaaaagtctgtccggcgctgcttttactatatcacagggccacatccagtgccatcatcagcgcaaaccccagcacgatgctgatgacaccggccacttcatccggttccaccgcctcagggatcatctcctgtgcggtcacacacaccatacagcccgccgccgcgctcatgagccacggcagcgctgcgcctacccactcggccagcacaaaggccagcaccgcgcccaggggctccaccagtccggaggccgccccggcggcaaaggactgcccccgggtgcgcccgctctgggtcagcggcagactgaccgccgccccctccgggatattctgcaagccgatacccaggctcagtgccagcgcgccgcttacggcatctgcgtccccgtgcagcgccagcgccgcagccagccccaccaccatgccttccggcaggttatgcagggtgaccgccagcaccatacgcccgcaatgcccggggccgcccgccagcaactgcccggcggcatcctccagccgtaaaagccccacagcgcctaaaatgagccccagcgccgggggcacccatgccgccctgccctccgaccgggcaatggccggcagcagcaggctccacacgctggccgccagcatgatacccgccgccattccgcacaaaatgcgccgggttgccggccttgtctgcctgcgcagcaaaaacacccctgctgctcccagcgcggtacacgccgccgggaacagccagacacaaagtgtgaaaacgatccggttcaagccgcattccccctttgccctttgtatgcacaaacgggcaaaagagtgcaggctcagaaatcgtcctcagtgctgtcgcagctgtctgcatcgcagtctgcgtcatcggatgcaaagctatcggtgctgtccgtgctgaaattgcgctcgaatgcggtcatgtactgggcatagccctcgtcgccggtgccaaagtagccaaaatcaaagtctttcattgtagtaccctccataaatgttcttgtcgttcagccctccgggggatgtccgtccctcgttgtgtctctattatccacatttacagtacaataaaaaggattttatgagtatttttcaaatttttctgtttttgtacttcccgcccggcggtacaggctctatcccgcgctttatttttaccaaaaagtctttgacttttggcgaaactttatgacaactatgtagattctttacatggattataactttcgaccaaaatcctcttgatttttttcaaaaacggattagaatatagcatcgcagtgaggtgctaccgaaagcccgctgctaaacatttacaagaagactaaggagatcattgatatgaaactcaagaatatttgcatcgctgttgttgctctggctctggctgctggcatgaccgcctgcggtggtacttctgccgcttctgcttcctccacctctgaggctgcttccgcaagcaccaccgctgtttccgatgctgcttcttctgaggctgcttcttctgaggctgcttcctctgaggctgcatcttccgaggctgcttcctctgaggctgcttcttctgaggttgcttccaccactgccgcctaagtttaacgcgcacagcgtacataacaggatagcaaaaggccgttgcacattattttgtgcagcggcctttttgattgcgcagaaagatttaaatgccctccgcgtgtgctatgggcataaccagcggaatgatttttttcgggataccgggtcatctgcgaacgccccggtatcccatttttatgaaaaaagaccgccgcacaaagccatgtacagcagtccctcgcgtttgagaagtaagcttcccaatatcatttttcaaggattgcgcgaatctgagcaaggtcggcggcaaaggcgatattccgctgccgcgccggagtggaaagccccatggtgatcatctgctgcaaaagctggtgcagaggctggtagtagccgttcaggtcgtagaggatgcagggcgcgttcagctgtcccagagacagcttgctgatgacctcggtgatctcctccagcgtgccggtgccgccgggaaacgcgataaaagcatcccccagctcgatcattttggtcttgcgggcggagatatcctcggtgacgatcaactcggtcagtccctcgtgctgcagttctgcgtccagaaagcacttgggttctacgccggtcaccctgccgcctgcggccagcacactgtcggccaaaagccccatcaggccgcttttgctgccgccgtacaccagcgcgttgccgctttcgccgatccagcgccccagctgctgcacggcctgcggcagtgcagggtcggtgccaaggtttgcccccagatacacggtaatgttcattgcagtatcctttcttgccgggtcagatgctccacagcaccgcgcccagcaccgcagaaagtaagatcatcccaatgggggacggtgctttctgcgttttctttttataggcaaaatgcagaatgcccagcagggcaaacaccgccagtgcacgcacatccggggcaaagccgccggcaagggtggtaaagccccccagcgtggaaagccccatagtgcaggcggtagccaggatcatagccaccacgcaggggcgcaccccagccagaaaggcgttgaccccggcgtacttcatcaggctgtgcagcgccgccgcgatcagcaaaatgatgacaaaggagggcagcaccacccccaccgttgccacaaaggagcctgccagccccgcctgcgaagcgccgataaaggtggccatattcactgccagcgggccgggcgtagactctgacaccgcgataaagctgagaaattcgctctcggtcagccagcagtgccccagcaccgtttcccgtaccagcgagatcatgccgtagccgccgccaaaggacactgcaccgatgacaaggaaattccagaacagctccaacaagatcattttgtgccgcctttcttcccctgccctatcgcgtaggccagcaccccggctgcgccgcaaagcaaaatgcagcagatggaggaaaattttaccgccaacactgagcagcccaccatagccgccaacaccaccgccaccactgccgtgttgaagggggtgcgctgcaagtttttgagcatcttgaccccggcggacaggatcaggtagatgacacaggcctgaatgcccttgaaagcattggccaccaccgtcagctgcaaaaagcggtcgaagaagagcgaaataaggtagatgactgcaaaggacggcaggcacaccgccagagtggaagccgccgcaccggcaacaccggccagcttatagccgatgtaggtggcgctgttcaccgccacagggccgggagtggactcggcaatggcgaccatatccagaaactcttcccgggtgagccagcgctttttttctacaaattcgtgttccagcagcgctaccatggcatagccgccgccaaaggtaaaggcaccgatcttaaaaaaggtgccgaacaattctccggttttagacataggcatccctccatgtttttactgtttgactggctccagctccagatagcactcgaaagccgttttgtctgcgtgcttggcaataaagtaccagccatcatccgaaggcgtgtagaacacctccacctgctgccccatggggacttcgcggtgatagttgatggaagcgaacttcacaacatgatcgcgcatgatctcctgcggcagtgcatcgcagacgatatccagataaaaggcgttgttgatgtggtagtgcaggtcgcactgggagtagcgcgccgtaaccagaccggcgctggtcaggctgtcccggcgcttatgtagcaaaaggggcagttcctcttccaccgtctcgttccagtatccctccaccgtccagcccggctggcgcaggatatgtccattctcaaggctggacatgatccagcggctgtccaccatggctacttcctgcccggcttcgtccgtaagggtagtgacgcgcttgatagagccacggagagccttttctgagcgggagcaaagggtcaaagtctcgccacggcgaggcacacggttaaaccgcagcgcctgcttgcccaccagaaacgctacgccgtgatcctcaaaaaacttatcgtccatgccaaacttccgggcgtgcatggaagaaatctgctccacatagcgcagcagggcgctggccttgagcaggctgtggcagtctgcatcggcattttctaccacggcagtatcttcataataaaactgttccatagtcttttcctcctatcggaaaaaggccgccgcaccacatccgggacggcagccttggctgaacgatcaatactgattgcgggtctttctgcgcactttgcgccagatattgaagcaggccagcgccagcatggccagaagcagcagcaaaaacaggtagctgccgccgccctcatcgtagctcttcatctcgctccacttcagatccagctcgctgtttacctcatcgctcagggcggtgaacaccttctcgcgggcggcgtcctcctcagacggataggcgatctcgctggtcttcagatcctcgtccagcacctcccaaacatcgtgcatgggggtggtgtagccgatatactcgctgttggccttgccgatgtcggtctcgcacatgaagttgatgaacatctcagcggcttccttgtgctcgctggcagcaggcacagccatgcagtccaccgaaagcacactgccctcctccgggaacacccaagccagatccgggttatcatcgatcatggtaatggcatcgccggagtagtacacgccgatggccgcctcgccgccgatcatcttatcaaagatctcgtccatgacgtaggcctgcaccagcggcttctgtgccttgagctcctctaccacctcgtccacctcttccggggtggcggggttgatgctgtggccgctcttaaatgcagcgatagcgtaggcgtcgcggctgttgttgaacatcagaatgttgcccgcatactgttcatcccacaggtctgcccagcaagtgggggcttcgtctaccatggtagtgttgtagatgatgccggtggtgcacagcatatagggcacggtgtaagcgttctgcgggtcgtaatccgggttgcgatagcctgcatcgatcttttggaaattggggatattgtcgtagtcaaggggtgcaagcatcccctcgttgatcatctttgccaccatgtagtcggaggggatgatcacatcgtagttggctgcgccggacttgagcttggcgtacagggactcgttggagtcgaaggtggtgtagttcaccttgatgccggtcagcttttcaaaggcggcaaccacgtccacactgtcgtccgagccgttggagatgtactcgccccagttatagacattcagggtgacgttctgccccttgaagcgggtccagtcgtaagcatccgacaccgagacgtcctcagtcacctcgatggtaccggcggcaagcaccggcaatgcggcgcacagcgccacagccagcgtcagcagcaatgcagcaatgcgtttcatcatgcaccctcctttcgcagcgttttctgatcccggcggtagctgcggctctccatggcattggacaccagaatgacgctgaggatgaccacaaacatgatggtggacagcgcgtagatctccgggctgacctttttacgggtcatggagtagattgcaatgggcagggtctccacggtgccgcagttgaagtaggagatcatgaaatcgtcgatggaataggtcaggcagatgaggaaggcagaaaggatggcggggctgatctccggcagaatgaccttaaagaaagcctgccgggggtcgcagcccagatccagcgctgcttcgtacagcttgatatccagctgcttgagcttggggcttacgttaaagataacgtaaggcacgttgaacgcgatatgcgcaatgagcagcgtgggcaggcccatgatgttgtccggcagccatgcggactgtgtggcaaagcgctggtaggccacgaacagcagcatcagggagatgccggtgatgatctccgggttgaccaccgggatataggtgatgttggtcaccagcaggcggcttttgcggctcatggaggcaatgccaaggctggctgccgtgcccagcaccgtggcgatgatggcagacaggatggccacctcaacggacacccacagcgcgtggaggatggacgcattcgtgaacaggctgcggtaccatttaaaggtaaagcctgtaaacagcgaatagcccttgctctggttgaagctgaacacgatcatgtaggcaatgggcaggtacatgaagcagaagaacaggatgatgtagacccgctgcatcaggcgcagatgttttgttttcatcaggacacgccctccatttcatcctcgtcaaagctggatgtaaagctcatgcacagcagtacgatgatcatcagcacaaggctcatggccgagccgacgttcaggttatagctgttacccaagaactgcatctcgatcaggtcaccgatcagcagattagagccgccgcccagcatacggctgatgacaaaggtagacactgccggcacgaacaccatggtgatgccggtgctgatgcccggcacgctcatggggatgagcacccgcacaagggtcttggtggtgttggcaccaagatcctgcgcagcttccacaaggctctggtcgatcttggtcatgctggtgtacagcggcaggatcatgtagggcacatagttatacaccatgcccagcaccaccgcaccggaggtgttgagcatggtataggggccaaggccgataaagcccagcagggtgttcaccgggccattgacgctgagcagacccatccatgcgtaggtacgcagcaaaaagttcatccacatgggcagcatgaccagcataagcatgatgtgctgcttgttcacccgcaaccgggacagaaaatagcccaccggaaaggcgatgatcagacagataacggtagcgataagcgccagcagcagactgcgggcaaacaccgaaccgtagccgctgatggaggtaaggttattcagggtaaagttgccctcggcatcggtcatggcgtagtacaccacaatgaacaagggcacaacggtaaacagcaccatccatacaaagtacggataggccagctttttatcataaatcttcatggcacatcacccctcgctccgcgccatgatatggatctcgttggggccgatgcgcataccaatggtctcgccgggggtgcaggcgcgggtggagtggatcagccactcgcggccctcgcactcgacgtgcatctcaaagtgcacgcccttgaagatgacatcgttcaccacgcccacaagctggccctccacgggggataccacctcgatatcctccgggcgcaccaccacctgcacgctctgctcccgggcgaagccgcgatccacgcaggggaaatccacgccggagaaggacaccagaaagtccttgtgcatcacgccgtccacgatgttggaatcgccgataaagtccgccacaaaggcatttttcggctcgttgtagatatcctccggggtaccgatctgctgcaccttaccgccgttcatgaccacgacggtatcggacatggtaagcgcttcctcctgatcgtgggtaacgtagataaaggtaatgttcatctcgcgctgcaaccgcttgagctccagctgcatctccttgcgcagcttcaggtccagtgcacccagcggctcgtccagtagcaggatctccggctcattgaccagactgcgggcaatggccacgcgctgctgctgaccgccagacatctggctgatgctgcggcgctcgaagcccttcaagcccacgacctccagcatatcgcgcaccttgcggcggatagtgtcctcgtccagctttttgagccgcagaccaaaggccacgttctcgaacacgttcaggtgcgggaacagcgcgtatttctggaacacggtattcaccgggcgcttgtagggcggcacaccggtaatgtcctcccctttcagcagcaccttgccggcgttcggctccagaaagcctgcgatcaggcgcagggtggtagttttgccgcagccggaggaaccgagcagcgtcacgaactccttgtcatggatatccagattcagcccatccagaatgcgctgtccatcaaattccactacgatatcccgcagtgaaacgaccaccgagttgtccattttatatgttatcctccttgttctcagatacgaaaaaagacagggaacctgccccatcttttttgcgtataagggatgctccgccccgcacagaagcatgatcttgcgcggcggacttaccctgtcacggtttataataaacaatcacagtcggattgtcaatcactctgcagatgtttgccgcaactttataaaaagctgcaaaaaaatatacgctgcgccttggtttcggcacagcgtacaaaaggaatcactcctgcgttttcaggtcgttttccgtcagcagaagggcctgcacagtgctgatatccactgtgtataccgaggtatcgccttccacctgcagataccacccgtccgtaccgcaggcgtaggccagctgaacggtggagccgtcctcgctggtgactgcggcggtgaataccggtgcatcaaagccgcaggcagaaaggtcggcgtccgtggcttgggcggtaacgtaggtgcacagggcagacagcaggctttgcaccttgtcctgtgcaaggctggcggcggggtcagaggccagccgccacaccgtctcgtaggcagaggaagaggcgctgtcggcgctttcggtcggctcgctgacggcgttcagggtgacggaggtgccatctgccagcgtataggctacctgcgtaatggccgaagcagtgagtccggtggggcagaaactgccgaagagcccggccttatccagctggaaacaggcgaccttgttgccgctgacggtatagatggcatcgtccccggctttttgcacatagagatccccggtgaccgggttctctgccccgaaggtcagggtagtgctctgccctgccgccgtgaccgtaacggtgagctgcgggctgtccagcccgtagtcctcccctgcctgcggtgtcaggctgcgcttggcattcagcgccatcagggcggtgcgcatggtattgcaggtgctctcgtccagatgataggcggggtcctgtgtcaactgccagctgccgccggaatattgcagggtgtaggtctggccgttataggtatactcgatctgctccagatcctcggcggcaaagctggaaagtgggatactgccctcggcggcgacgctggccgcctgctcggccttggcgttgctgcggatcatcgcccacaatgccgcgcccagcagcactgccgctgccagcaataccagcaagacacgctgttttgttttcatggcggtctccttatctgcggcggcgcagcagcaccaccactgcccctgcaatgagcaccgccgccgggagcacgaacacaaaggtcagccccagtgctgcggcagcggagcctgccaccgtgatgggctcggcttccagcgccttggtgtccacaaggatatcctgccccaccagagaggcggcgcagccctgcaaaaaggtcaggttgccgggcatggactgataaagctgctcgttatccatgttgggacagccgatccagagaacctcggcaccggtatcctcgttccgtgcccagacagccagcgcaaaggggccatctgcgttcccgtcctcccgctccatggtggtaaggtcgttgatgtcggttttggcataggcagcggaggagctgttcagcagcggctcggcggtgacatcctcggtctcggtgaccgtgatgccctgcgccaccgacagcatgacatgggtattggtattcacgccgttcagcgcggtgctctcggtaggcgtgccgtagtccggcagcagcgaccatgcagagttatacagtgccttgctgctgtctccctccaccaccatgccctctgcgcgggcaaggccgaactgcgccagcacggcgtccagctgcggggtctgggcgtagacactgctggtcagcagcagcttgccgcccgccgccagataattttgcagctggctgatctcatccacaaggccgtcccctgcggaaaaatcggtggtgggtgcgttgatgatgagcaggtcgcagtcctccgggatggtgctcgtgagcagatccagcggctgtgcgtcgatattctgggcgtccagcgcatcggtcagggagtcggtcagggtctgctcgccgtggttggtggtatagtaggcgtggctctgctcggctgaggtaagcttataaatggcagaggtgatctgcttttcgccgccaaaagtcacgctggcagagccggtggtgtagtagtcggaataatcgtactcgtacaggtcggcggcatccagtacggtgctgttctccccgcaggtgacgatcagactgccggtggaaacattctctgcgccatactttgcggcaaaggttgggtacagggtggggtccttctgttcccagctcaggtgcccgctctcggcggcgtagtgatccagcaactttgtgataatggtatcctcgctgccggtttcacagaggtaatagatgtgcacatccttttccagcccctccaccagtgctttggtgctgtcgctcagggtgtacattttggcctcggagaggtcgaactcggtatattttgcagggatggcccgcaccagtaggttgagcagcaccgccagcaccagcactgccgccagcatagcggtggacagcagcccactgcggaacaccctgcccttttgggaggctgcgttcttgttccatttcatcgttatggcctcctctcagttccagcggcgcttttccagcccctgcgcggtgaaaaacaggaacaccactgccacggtcaggtagtagaccagtgtggggatggaaaagctgctgttgacaaattcttcaaagggggtaaacaggcacagtgcgctgagcactgcgctgaaagcctcggtcagccagctgctcttgagcagaaacagtgccgtaagcgccacgcagcaccccgcaaaggaaaggcagcccagcgtaaagcttttgctgcgcagccccgccaccacgctgagcacggcggcaatggcggtgaacagtgccagcgccaccgcgctgccagtggtgaacatggtgcgcaggctgggcatcatataagtcagcagcagcgccgccacaccggagacagcggcgatgatttggttttcggtcaggctggaaaggaacaccccgatggcaatggcggcgcagcccatgaggtaatagcacagcagcgcggaaaaattggccagcgtgctggtgccggtagcgcccagtgccttcagcacaaggatcatgcccgcatccacaaggcagggcagcgcaaaaatgacgcaaagcgcaaaatatttgcccagcacgatgccgcccaccgacaccgggcttgtgagcaacagctggtcggtgcggctgtggcgttcctccgcaaaggagcgcatggtgagcaccgggatgtagagcagcagcacaaaaatggtgcggtacagcgtgtagtagccaaaatccggcaggccatagcccagattcagcgccacaaaatagatagccgtagccgccagcataaaggcggtaagcaccgcaccgatcatgccgtgaaagcagctgcggagttctcgtttaaagatggccagcatctcaattctcctccccttctgccggggcttcctgctccggctttttttcggtcagcgcaaggaatacctcctcaaggctgcggttctcggtggcaagtgccagcacggtgcacccggcctcggtcagtgcccgggacacagcagcgcggcggtcggcggcgtcctcgctctcggcagtaaaggtgacctgaccgtctgcagcgctttccagttctaccttgcagatgcccggcacgctgcgcaccgtagccagtacggtttcggtctcgccctgcgcggtggcacgcaggcggctgcccgggttcagggtctcgcccagctcctccgggctgcctaccgccaccagacgtcctttagagaggatgagcacctgctggcataccgcctgcacctcgctgaggatgtggctggacaggatgaccgtgtgcgccttgcccagctcccggatgaggttgcggatatcgatgacctgcgcggggtccagccctacggtgggttcatccagaatgataagctgcgggctgcccagcagcgcctgcgcgatgcccacccgctgacgatagcccttggacaggctgcggatgacccggggcagcacttcttccagcccggtgcggtgggcagcggtcagcacctgctgtttgcgctgcgcgtgctttacccccttaagctctgccacaaaatccagatactcctgcacagtcatttccgggtagagcggcggctgctccggcagatagcctacacaggctttagcctgctgcgcctgctcaggcagacggaagccggctacctttacctcgccctcggtgggcgccagatagccggtaaggatattcataatggtggatttgcccgcgccgtttggccccagcaggccgtagatctggccgtccggcaccgtaaacgagagatcctgcacagcagggcggctgccgtaggacttgctcaggtgagaaacttcgatcacagcaaactctccttttatttcagaagctgttttgtggaaagcggcgtagaaccagcgctttccggtttggaactgctttagtttagatggaaaatgtgtttaaattaagacaatcctgtgtgggaaaacgaaatatttgccaccgcaaaacgcaaaaatgccgcctcccgaaggaagcggcatgagatagcctataattacttacggccgaaacgcttattgaagcgctcaacacgtccgccggtgtcaaccagcttctgcttgccagtgtagaaaggatggcacttggagcaaacttcgacgtggatctcgggcttggtggaacgagtcttgatgacattaccgcaagcgcaggtaatggtgcagtcaacgtagttcggatggataccctgtttcattcttttcacctcaattctggttctgacgtattggggccatatttaatgtatgtgcccatcacaaccttcaatatcggctaccccgtcgagcggccttggaaacgattgccttactattatagcacgaatcgaccagaatgcaagagggaaatttaagttttttacagcttttgcagcgtccagcctttttttgctgccagttgctccagctcccggtaagaaagcctcagctgcgcaatgttgaagcccggcagctccgcaaggcagccgccgtcctgtgcccggtgcagcagtttgcgcaccggcagttccggttcgccgtccagcgtatccagcccggccacatattctccgcaccggggcagtggctgctgccagtcgatagttttgcagacccttgcaagcgtaaggtggttgcaggtcaccgtctgccggaattccagtttcatgatgctctccccttttgcgccggagattcacagctgttcccggcgcgatactatgatataacattttgttttatatgtcaatataacatttcgttatgcctatactttaccttaaataaagcctttgaggtaaataccatgtatcaacgtatccgggatctgcgggaggatcgtgatctgctgcaaaaggatgttgcggcgtatctgaaatgcacacaggtctgctactccaattacgagaccggcaagcgggatatccccaccgaggtgctgatccagcttgccggtctctaccataccagtaccgattatattcttggccttacggacgatagcgccccgcccatcccccgcaaagcgtaaaactgcccccaaagtagctcgcatcaaatctcgctactttgggggcagtctgtttgatataaaaatatttcactatggccccgcatggaaaggttcttgtaaacgcgtccatacggcatcgtctatgcaagaatgatttctctcacctctccaaagcttccagaaagcagagcaaaaagaaagtccgacaatcattcgaatcaacgaacaattctgagattttcaatgtctccagcgggggcaaccccatactctgtcttcagaaaaggattttaagtccctcgtgtctgccagccttcggcaaattcgattttcgttcgttgtatcgtttgatttctcattgcgagagagatttttccttcgcgagcgagagggattcgcacttttttgataagatgatagtatcacatttttcgttccatgtcaatcatgtaaaattgtttcatcttgtcgtgcttgatcttcggagcgtccgggacccagggctgccgccctgcccagatgcgctcctcagggtgggggtgatgaggggttggatgatgggttgatgggtgtattgatggacggaattgagtgataggttattgctgatttttgaagagtacttttgaagtgattggggttgtttttgatgtgctgactgactttgatatctccttatctgtaccgctcggttactcagtccctgctctcccctgctacctcttttgctgaaatttcaccggaagtgattttgagggatgcagtgagaaacgagtacatttgttcgatacgaaacaatcgttctattagaaaaccgcatggatgggtttttgtgggcacacccatacggtttgagggtttgaaaagattactttagttcagtgtaagattcagaccgttctacttttttgttagtagccaaatactctatgaagtatatcaaccgattccatcaattggttagattcattatactctgaataattcgccctttccgcaactgtcttcatctcccggtatactcttctctgttcatttctcatatcttgtgcctgagcatatttcagtcttgaaaatagtaagccaaagtatgcctcctgaaattcgattttctttggatactgttcagaccattgctttgccttattaataattttatcaggaactcgcttatattccgccgacggtgaatatatggcttcactcgcaataataaacgccgcccgaatatgcatggattccggaaatttctgcaaatacttttttatcgtttcatattcatctggtgttatttttctatgtcccccactattatataaattagcaaggcagaacgctgcgacttctgccgcttcacatcgtccattttcttcatacacttgagccataaagcgttccagctcaaacagcttatcctccttttttcgttggacaagggtacgaaagtattcttctaccgcatccagtacatttttatatacatcctcatcgtagttgcactgcttcaaaatttctacgatagcattccattcctcttgaatctctgcgttaacgtttttatagagtcgcaagtgcatcagccgtccatagttttgacagcaaattaccgcaatccgtttgttatctgcaagtagctgggtcaattcaccgcactttttcaggaaagcaccatactcatcaactgcttccgcattatgaagaccaacgcaatacgcctctatagcatctaccgcctcatcacggattgttaccttttctgatatttcttttaaaaatcgaatatatttcagaccgctattgtaaagacgccttatatctccccgatcagtcaagacgattgctattcttcgccatagttccaactcatacctctggaaaatcggctcacgttctaaaagcacatcttctaccgcagcaatatcttttatagctgaaatcctcgacatcaagcctaaatagtattcagaatcattcaactcctcgtctggcggcgtgatcgctattttttggaacacatcactctccggccagtcatccagtgccagcgagatgaattttgcaaagcccatcacagaatttgatttgaccaattttgcaaatcgttcagcatctctcacattcacgacatagtcaacgatatactcattaatcacgtccggaaagcacggttccatgagccacgcatgatctgggagcatcttctctttctgggttctctggttctgaagctgtatcagtttctgtttttcctcttctgtggccacgccacctcttacacgcatattgaggtaaacctcttgcggatcagcgcttagtttaacatatggtgccaacaatgaaaacttctcgtcttgatcaaggctctttgaagaacctccactctccgctttttgcggctctttgtccatctgctgataaagcaactcgaatagcgttggttgtgccggatcatcctcttgttcgctgacagacacaaacaaatcctcaaagagattatctgctcccggtcttccactccttgcatcaaaaaaagagatcaacctattacaatcttccgccaaatagtttgtaccttgtacatccgtaatgttaaaaattcctacaatgcaagcaaccgaaagcacccgaagatacgaatccaccaaaatatcatcgcccaaaattagcttccagcgttttttctctttattcaaatattcacttagtaattcttccgtagaggtaaggtttgtgcgcccttctttactaagccacacttcaatgaacacgctaaggaatagcggacgcaagcaaggagcactcatcgaatttcgaaacttactttgtattatttttgccttatttgccttatcagccttgcattcatcaataaaggcacttgtaccaagaagcggtagataggcttccaaatagttttcaatatatgacgcctcgtctttttcatcgagtggtccaattgtcaaaacgggcttcgaataagtacccgcttcaaattccaacctggcctcattgggcattttccgttttaattcaatcagccaatcatattctgatgctctctgatgccgttccagcaatacaattctaagcttgtatggcgaatccgaaaacgcttcaataaatgccgcaattgtatctgcacattgctgttcttgccctaagacatagtcaaacgccacaacagtatctgcaaacggaacgaacagatgcgctttttccggttttttatacgcaaaaaagccaaaccagcttgaaggcatagttttcatccattccaaaatcaggcggctttttcctattccaccttcacctaaaatagtccgccacaagaatttttccttatcttgtaaaaaagaacttaggtcattcagttccacagttctacccacgaaggggttaaagctattagaaaagtgcattctaccaaaagcagatattgccgttctgcgctccaaataaggattcactgctatgactgattgcaatcctgctcttttctgaagccgagtcattgcaatctctgatagaaaaagtgggagatcctcataatcatccccataaaatactggaatagcattcatcggcaaattgggtatggtgtctccactcttcatcagataaaaataaggtatatcagaggttccaagtttctcatacgcaaatgacataaagccagacaggttcggatcttccatcgtgccaccacagccaacaattatgataggatttgttcctatcagattttgaataaactgtgccccactgttgcgcaaaatcgtttggtattgtatatagtccgcaataatattatcaataccatctcgttcatcatacattccatgaaggtgaatcactttattttccgctgtgctacgaataatcgaaagaatttccgccgggcattcataggaaacgcctttagcatttaatgtttcttctatctgcgtatcgtaatttgttgttgcaatcagatctcctgcacgccagactttgcaaagcgcctctttgaactccgtattgacaggatgcagtgcgccaattgtttgattcataaaagtctggtatgccccagagctcttaagcttgcccagcaaaaaagtagccgcatcgatcagttcctccgcagtccatgaaccaattttcagattcaactcattctgctctggtattgtcagatattttcttccctcagcaatccaattcgtccaactcaatctatgagagccgagcgacatagatgcacctgcaccacacaaatacacaattttttcagcggaatgaattgcattcagtaattgtggatattctgagatattccttgcaggcatttatttatctcctttttcattactcatttttatctcatagcgttcgatgcgttttcaacagcaagctccaaatattttaatttcatctttttcccatggaactattttcacacttcaaaaacactgaggaggcacggttctgttagcccgttatccttaaatattattctttaaatcaaaaaacgcctacaacagaaaagcagatttacagttgcaggcgtatatctttacttcagtttttccaaaatttcgtcagcactcatgccaccagccagcagcttcttaaccacagcctcggcttccgactttttcgcttcttctgcagccttagcatctgcctttaccttcttcgcttccagagatgccacttctttttcggccttcttcaaatcagacttcttcactttcaggtcagctttcaaagtttcaatgtttgcagtgatggatgcgatctctgcagtcaggaaaacgatagattcctgcttctctgcgatctggaatgcgtagtcggtatgggtagttttgtgacggtttttgctacctttcgttctgggcatttttgttacctccgaattgttcgaatgcaattctgtaacattattttttattcttctacaatagttgtatatgaataacgatttaacagctcgataattgcttctttttgctgatcatttgatttcggatttagaaccaccctggaaacaaatcccttaaaattgaatggaatttgtagccctgcttcttgactgtttttatatataattgaacgaatttcattttcttctttaaagtcatgcttttttattgcatgaaaaacacgtgcggaactcggcaggccaaatctagctcgttcatcatcatgtggaatgtaaaatggcacatccatatttcctatttgctcattttcatcaagataatgaactttatacattcttgcaccatttatccttgaaagcataaaaatttgtcttacagttgatactatacagactccgttatctgatgcatattcgttccacatttttgtattaccagttttatacggtgtccaacaagtcacatatggcacatatacatgggattttaattcattaagtctccgatagttttcttctgattgttgtgcccagccgtcaaaaaactctagcggaatttccccctcatattcatcatcaaaccttgaagcattgcaaaagaagagtgtctgtgtagaaagcatagattccagctttgagtaatttatatatcttccgatttctaagtttaaccggggcatatattcattattaattctgtctatgtcggttgcaaaataaatacccatagagaagcctcctactttctttatccatcctttgcattcttcgccacattctcatgtgttgcctgctgctcaccacgaagaggtgtgcaaagtttcgagcagcgtaggctgtattcatgtacagccgtcagatttcaccctaccattgtgttatcccaacacacgatggaggtaaaatcaaaatgaaaaataaatacaattggttcgacgataactggaatccggatgacaaactatccacccagttttggccatcttttgtttacaatctagtaccgggttcctgacccccagagctttctataatagggaaaatataggttctctcccgttgacgtacaatccttgtatagcatgaatagttccttccgacaccgcagaactgtgtgaaatctcaccttaacgataaacccacatgttgtcttctcctcaggcaacagagtcgacgctctggtttgttggtatttcgatgttcaatagctatccccactaccttgctgtctacgcttaacacaccgcattactgcgacacacccaagactcacttcaaatgctgtggttagccgcttatttgacaggattttcgcctatcgaattgcacgtccttcgctggacgcactgcccaaccccaatgttgctttctatttcccaataaaagtacgtaaagtccattttgtcttgtaatactgcgttcctctggtcacctcatcaatccggatgctaaacggttcatctaaagacattttctcttcataaggaatcaatgccttgtctaatctctcccttaaaagataataatcaaaagattctccccgattcagtcttttaggaaactgaggcgtatacatttgaagtatggactctcgatttagcataccaacaaatatatctccttgctttttgcttccaaaatgcagatatacatttgtaaccgttactggcttcatcccagtatttttcactgttataatatacgcatcgattttttcaatacccggaatttgactcagtataaaaccagtgctaacaccaaccgcaatttttactctctgtggaagccataaagcaacaagcgaaacaacaagagcaattgctccaaataccgatcccgtccaactacctatcgccccaataatagcccatcgaagcgattcagtattgtaatcttttacttgctctacttcctttaccaattgaagcatcttgaagattcctaatccaacagcaacaatcgctacaatagtacataatgtaattattagctttcttttatctatattcttcatgtatttcagcccattatattcttcttcacatctcagccgatccttagattgttgcctgctgctcactgtgtagaggttcgcgattatcagagcagcgagagccacggtctcccatgactccagtatatcacagatccgagaacaagtcagccttgtacacgctttttttctaacattttctctatcgtagtcgggctttttcttcggtcggccgcgcttcgcttttgcagtgtcagtaggtgcagtttctgcactttccgacatcgggcgcttcgggccgaagtcgttcattgggttttagcttttcaaaccgtcctttctgaagcttatgtttgcttcgctctctatttcaaagtttcaatcatgctttagccgagacactgtggttgagcggttacttatgtttttcatccaagagtatatttcagaaactgccaaagctccccctgcgcaaatcaaatacgacttaaaattattataatcatctttataaagtactaatgcgcagaaggccacaaagtacatatgtataaaatacattgtttcactcgtacttcttaagtgtttataaaagtttccttttaatctattttccttacattctaaaatgattactgcaaacataaagtagaacgttggaagatcaagcaacttcgagatgtcgctcccccccgaataaactgcagaaaacttttacagcacacactaagacaaatacaatagcattttgaatgcttacacgcaacttatcaaactgttctgcctcggctatctgcattccaatcgatacaaatactcattctttgaactgtatgccaactgataacat

SEQ ID NO: 13729 - DNA, 15513 bp, Unknown
  gut microbiota DNA sequence
gtgttcccgcttgcaggcagggcttaacccagacagacgcccatgcggcgtgccacgctcagcagctcgcagttttcgggcacattgcgggccttaccggcaatgtctgccagacggttctcagtcacccggcggttcaccatggccacggtcacgccgtagcgctccacctctaccagctgtgcggcatagctgccgaactgggtggccagcacacggtcgtaggcgctggggctgccgccgcgctgcatatgacccgggatgcacacgcgggtctccatgccggtctttttctgcacggcctgtgcaatgcggttggtggcagtggtgccaaggccggcctcggcgcgcttggccatccagtccttgcgcttcatgcgggcttcctcggtgttgatggcaccctcggccacggcaaggatagagaagttggaacccttcttggcgcggcgctccacggcctcgcacacgcggtcgatatcgtagggcagctccggcagcagaatgatgtccgcaccaccggcaatgccggagtacagggtaagccagcccgccttgttgcccatgatctcaatgcacatcacgcggctgtggctgccggcggtggtgtggatgcggtcgatgacgtccgtggcgatgtccacagcggtgtggaagccgaaagtcacatcggtgccgtagatatcgttgtcaatggtcttgggcaggccgatgatgttcagcccctcctgcgagagcaggttggcggtcttgtgggtgccgttgccgcccagacacagcaggcagtccagctttgcagccttgtaggtctttttcatggcggcgaccttatcaatgttgtcgtcctccaccacacgcatcagcttgaagggggtgcgcttggtgcccagaatggtgccgcctaaggtcaggatgccgcggaagtcgtcctcgttcatttcacggtagtcgccgttgatcaggccgctgtaaccgttggcgatgcccacgatctccacgttatctcccatgcgggcgtacagtgcttttgcaacgccgcggatggtggcgttcaggcccggacaatcgccgccggaagtcaggataccaacacgttttttcattcaaataccctctttcattatcattcaggcaaagccgaacggtccggcaaagggtgccgggctgaccggggtcctacctttttgtagtattagagtattccgaaaggggagtgctgtcaagagaaaacccaaaaatttacaagcctgtgtgcatcggaaaaccgctgcgaaaacttttgcagaaaaactgaaaaaatggttgacaagcagcccgccgacgtgtataatatcccttgtcagcaacgcacggcgcggctgacacaaccgaatattggggatttgcatagtggtagtgcggtagactctgactctacttgtgggagttcgattctctcatccccaaccagttaccgcagccgaataagctgcggtattttcggggcatagcgcagttggtagcgcgcctcgttcgggacgaggaggccgtgggttcaaatcccgctgctccgaccaaaaagaccagtgcacatttgtgtactggtctttttttgcttttgcgcgcgaacaggctgtaaaaacaagtggctcagaaacaccgacaggcgtttctgagccactgatatcatatcgtttccagcagtgcgggcagctgggcaaggtcgtcgatgacgtagggactgaccttttccagccgggcgcgggactgatgcccgccggtgtacagcacacaagttgcaccgatggccgcagccactgcggcatcgtggtcggtgtcgccgaccatcacacaggccgccgggtcgatgccggtgcggcgcagataatcggtgccaagctgtaccttgcttacgccgtaaatgtccgcaaggccgagcaactcggtaaaaaagccttgcagaccccgggcggatacctgctcgatcaggtaatcacggcgggaggcggaaagcacagcctgctgccagcccatgcgagccagcgtttgcagggtgtcaacggcgtgtgccgttacagcgcagccgggcacaccggcgttgtagtgctccataaagcgtgcggcaagttccgggtaggggtgccgcgcaaaatcgaacccggcacagcggtagtagtcctcgatgggaaagccgaacagctcccggtaggcagccagatcgtaccgctgggggtagccgtgggtctccagcatccagttcaggcagctgtgggtaaaatccacatcgtccatcagggtaccgttccagtcccagaagatcataccgtttggctgcatggaaacctccttgcgttattccgtcacaaacaccttgcgcagtgcggcgttgctctcgatcaactttaccagcacaacgcccagcacggtgcagctgatcagctcgccgatgccaaccgagatgccgttggtgatgcaggccagccagatgggggcgctggacgtggggtccgggaacatcacggcgatctcaataccgatgattaccgcgttgaacagcaccgggggcaggctggcggcaatggccagacccttgaagcgcacattgcgcagtttgtaggtgacaaggcaggccagcagggtagccagtgtgccaaagatcacatccacgatggtggagcccagcaggtttgcaaggaagcaacccagcacaacacccacgatgtactcggcaccgaacacgggcagcaggcacagagcctcggccacacgcacctgcacagcaccataggaaaggggctgcagtgccagacacagcaccacatagatggctgccactacaccgcagtgcaccagcttacggacggaagaattctgattcatgataatactccagcggtttgattttgaccgcacaggaaccgccagctcctgtgggttttgcccggcgccgctcgagtggcaccggggagcctaaaatcctaagttgctctttgaggatactgcacaaaaaagcacagcagtagggagtatatcacaaaatcggacggaatgcaacgggaatcggacgattgaaaatgcctgccgcgctgctctgggcagattcggcagaaagaaagcttttatgatagagccgaagctgctgcctgcaaaaatggaaaaagctgagcacctgactttctcggatgctcagccttgctgtacttgtttttgcggagttgcttttactgtttcttgcgttttgcgggctttttcttccgcacgctgtaaccaaaggtgcccagctttttgccaagggccagatactcgccgtggctgtacacgatgagatttgccttgtccaagcacagcttgcctttttcgtccagcaggctctcgtccacatcgcaggccaccacctcggccaaaaacaggtcgtggctgcccagcgggatgcgctgggtgatgcggcactccagattgaccgggctttcctccagcaccgggcagtcggtcagcacgctgccgggggcggcgtgcaggccgcaggcggcaaacttgtccacctcgcggccgctcttcacgccgcaccagtcaatggcgcgcaccagcttttcggtgggcagattgatggcgaactgcccgctctcgcatagcagctgatggctgtaccgctccgggcgcacgctgatggataccatgctgggctgggtgcagatggtgcctgtccagccgatggtgataaggttgggcttatccagcccgccgcaggataccagtaccggcggctccgggttcaaaagggtgctgcccttccaactttgcttgctcatccgtgatatttcctttcgtagggagcccatgtgcgctccgagatgatatagcgcgggcgggcctttgtttccatatagatcttgccgatatactcaccgatcacgcccagacacaccagctgcacaccgcccataaagcagacgatgcagacggtggaggcccagcctgccacgctgctgcccatggcagcgcacacgatggcccagatgaccccgataaagctgacaaggctcaccacgatgcccgctccggtgatgatgcggataggcttgttggaaaggctggtaatgccgtcaaaagccagcgccagcatcttgctcagggggtagtggctctcgccggccagacgctcgtggcgctcgtaggtgaccacatcgtgggcaaagcccaccagcggcaccatgccccgcaaaaagatgttgacctccttgtaatccgcaaagctttccagcacgcgggtgctgatcaggcggtagtctgcgtggttgaacacgatatccgcgcccagagcgttcatcacatgataaaagccctcggcggtgaaccgcttgaagaaggtgtcggtgtcccggcggctgcgcacaccgtacaccacctcggcaccgtccagatactttttcaccatctcgtccatggcgttgatatcgtcctgaccgtcgcagtcgatggagatggtgatatcgcagctgtcgctgtgcagcgcctccatcagtcccgccagcacggcgttctggtggccgcggttgcggctctgggaaatgccgatatagtgctcgtcctgtgcggcaaagccttggatcagttcccacgttttgtcgcgggagccatcgttgacaaagagcacccggcttttatcgctgaccagcccctgtgcggtcagactgtggatcttttccagaaacatgggtgctgtaatgggcagcacctgctcctcgttgtagcaggggatcacgatccagagtacgggtttggacattgttttatcgctccttattgataaaagtagtcagagggtcactgcaccatctgctgcaaggcatccggctccagcagcttgaagctgctgcggtaggtgtcgatgagcccttccttctgcatggtgctcaactcccgggaaagggcgctgcggtcgcagttgaggtaatccgccagctggatgcgggagaaggggatgctgaaggtcaggctgtgggcgcgggcggcctcgctgagcagataggccgctaccttggcgcgcaggcttttcatcaccagcaggtcgatgcggcgggagagggaaaaatatttatcgctgatggtgcgcacaaggttctgcaccacccgctggtgggcggggctgccgtccgagagcagcagccgctcgtagggcagcagcagcacctcacagggggcggcagccagcacggtgaccgggctggacaagctggagcctcccagcacgtccccgaacaccccgcccggctctacctgggcgatgggaatgcgcaccccgcccggtgccgggcggtaggcctccagctcgccggacagcacgatgcccacccggcggctgggctcccccgccagcacaagggcttcgcccttgccgtagctgcgcacactgccccccaaccgggacagcagtgtgctgagctccacagcggaaagccctgcgaacagcgtggtggtttgtaacagcggcagataattattcatcgcaactccgcagagaaaatagtgttctccgcagcctcctgcaattacgttgcgcacgcaacggtatttttacccctattatagtaaactggaacgcgcaaagcaaatgattttgcaaaatttttcaaaaaaagaccggtttccgcttcccgtaccggggcgtgccgggtgtgaaaaggagtatttcatgaaaaagatcctgtccttactgctggcgttcagccttgcactgagccttgcagcctgcggcggcagcgcgagctctgccgcttccagcgcagcggtgtccgaagctgcttcctcagcggctgcttccgaggaagaagaggccgcagcgccgctgtctgctaccgagccgctgcgtatcgcggggctgaagggccccaccaccatggggcttgtcaacctgctgtcgatggagcaggccggtactgccgccatggactacgatctgcagctttacggtgctgcggatgagatcgtgccgctgctcatcaagggtgagctggacatggctgccatcccggctaatctggcggcgaccctgtatcagaaaaccagcggcggcattcaggccgtggcagtgaataccttgggcgttttgtatgtggtggagcagggcgacaccgtccacagcatggccgacctcaagggacgcaccatcctgtccaccggcaagggcactaccccggagtatgtgctgcgttatctgcttaccgccaacggccttgacccggacaaggatgtggatattcagtattatagcgaggctaccgaggtgaccgcccagatggcaaccacgcaggatgccattgcggtgctgccccagccctatgtgaccgctgccggactgaaggacgacaccctgcgggtagcccttgacctgaccgccgagtgggacaaggtggcagacacccagctgatcaccggtgtgaccgtggtgcgcaaggcctacgccgaggagcacccggacgtggtagccgcctttctggcagactacgcccagagcgtgaacgccgccaacaccgatctggacggcaccgccgccctgtgcgaggagcagggggtggtggcaaaagccgccattgccaaaaaggcactgcccaactgcaacatcgtctgcctgaccggcgaggaactgaaggcagacgtctccggctacctgcaggtgctctacgatgccgatcctgccgccgtgggcggtacgctgcccggcgaggatttctactgggcagcccagtaacagcctgaaaaaagcattccatctcccgccgctctgccgtggtacgcagcgcggcggtttttgtttcccggttgcaattccgctgcaaaagttctacaatagagacacattatagaatatggagggaaaacctatggcttgcactaccattctggtcggcaaggcagcatcgtacgatggctctaccatgatcgcccgcaacgatgactccggctccggccatttcaccgctaaaaaatttaccgtgatccacccggaggatctgcccaagacctaccgcagcgtcctctcccatgtggagatccccctgccggaaggcgcattgcggtttaccgccatgcccaacgccgtggagggcaagggtatctgggcagcttccggtgtcaacgccgctaacgtaggcatgaccgccaccgagaccatcacctccaacccccgcgtgctgggggcagacccgctggtggagtatcagcccgccaagggcgaaaagcccgaggtgcccggcggcatcggcgaggaagatatcgtctatctggtgctgccctacatccactctgcccgtgagggcgtgctgcgtctgggcagcctgctggaacagtacggtacttacgaaatgaacggcatcgcttttcaggatgtaaacgagatctggtggctggagaccatcggcggtcaccactggatcgcccgccgcgtgccggacgatgtgtatgtggtcatgcccaaccagctgggcatcgacacctttgatctggaagatgccttcggcgcacaggaaaactacctctgctctgccgacctgcgggagttcattgccaagaatcacctcgacctttctttggacggcgcgctgaacccccgggacgcctttggcagccacgatgacgccgaccacgtttacaacaccccccgcgcatggtatatgctgcgctacctcaacccccgcacatgggtgtgggagggtgccgacgccgactacacccccatgtccgatgacctgccgtggtgcatggtgccggagcgcaaggtgaccccggaggacatcaagtatatgctgtccagccactatcagggcaccccctacgacccctacctgagctacggcgacaagtccgcaaagggcgcgtaccgttccatcggcatcaaccgcaacgactttatggcgcttttgcagatgcgtcccgaccagccggaggaatcccgcgctgtggagtgggtggcctatgcctccaacgccttcaacaccatggtgcccttctacgccaacgtggagcgtaccccggagtatctggccaacaccaccggcactgtgtccaccgataacttctactggaccagccgtctgattgccgccatggcagacgcctcctataataaatccctcttccacctcgagcgctacgaggaggccgtgctctccgctgcccgcgcactggtgaacgggtacgatgcaaagcttgccgccgagccggacgccgcaagccgcgccgccctgcgggaggaagccaacaccgccattgccgccatgctgcaggagaaggccgccgacacgctggataaagttctgtttgaactgagcagccagatgaagaacgcctactcccgctcggatgcctgatgtaaaccagccggagcaccaaaaccggtcacgaccggtcacagaaacgcagaaaagaccaccgcatacacaagtgcggtggtctttttgcgtgcaaaaagctcttgtatccaaggtattggaaactctgcacaaaaatgatgaaaattctttgtgagcaaaaatgactgaaactgattgattttgacaagatttttgctataataaagatgcgaacaaccaaaacacgccaataccgcgcagaaacggtcaggcgtgagaaggaaagaaggaaaaacaccatgctggcggaggaacgttttgcactgatcttagaacagctgaacgagaaacgcaccgtgacggtgcagcagctgtgcgaggcactgcacaccagcgaatccaccatccggcgcgatttgaccgagctggaccggcagggaaggctgaccaaggtgcacgggggagctaccctgccggacagccgctttctggcagacgagcccaccatggaagccaaggagacactggctgtggcagaaaagcgcagcattgccacagttgccgcagcacttatcactgccgaggattttgtgttcattgacgcaggcactaccacgctggaactggtgcgggcgctgacgggtgcggcgctcaaggccacctatgtgaccaacggcgtggcgcacgcccggctgctggcgcagaagggctgccgggtgtatctgcccggcgggctgctgcgcccccagaccgaagccatcgtgggcgctccggcggtcagcagcatccagcaatataacttcactaaagcgttcatgggtgccaacggcgtggcgctggaggcgggctttaccaccccggaccccgaggaagcagcggtaaaggccgctgccgtccgccgcgcccgggaaagctggttccttgtggatgacgccaaatttgctaaaatttacccggcggtcatcacggacctgcacggcggtgccatcctgaccaaccgctgcccgaaccctaagtataaacagtatacctttgtaaaggaggcagaagcatgatttacaccgttacctttaacccggccatcgactacgttgtgcgtctggacgcaccgctggaggtgggcgcagtgaaccgcgcccaaggcgaggattgcgtgctgggcggcaagggcatcaacgtgtccggcgtgctggcgcagctgggctgcgagagcgtggcactgggctttgtggccggggagaccggcgcatggctggagcgcggtctggcggcacaggggctcaagaccgactttgtgcatctggaaaacggcatgacccgcatcaacgtcaagatcaaggccgggcaggagactgagctgaacggcgcaggccctgccatcccggaaagcgctttgcagcagctggaagcccagctggacaagctggccgagggcgatatccttattctggcaggcagcatcccggcaagcctgccgcaaagcgtctacgagcggctgctggcgcggctgcagggcaggggcgtgcgcgccgtggtagatgccacccgcgaccttctggtaaacgtgctgccctaccaccccttcctcatcaagcccaacaaccatgagctgggcgagatcgtgggcaaggtactgactactgacgccgagatcgtggcagctgcccgtactttgcaggaaaagggtgcacgcaatgtgctggtaagcatggccggggacggtgcgctgctgctggacgagcagggacaggtgcaccgcatcggttgccccaagggcaaggtggtcaacagcgtgggcgcaggcgacagcatggtggccggttttgtggccgggtatctgcaaagccgcagctacgcgcaggcgctgcgtctgggcacggcctgcggcagcgcaacggctttcagccttgggcttgccacaaaggaaaagatcgacgagctgctggcgcagctttgataggataaaaggaacaaaggaggaacgtttatgcgcattaccgagttatttaccgcacagtccattgcgctggacgaagcgctgcagacgcaggagcagatcctgagccgtctggtggagctgcaggctacccatggcaacatcaccgacaaggaggcctacaaaaaggcgctctatgcccgcgaggccgagggctctacctatgtggataacggcatcaccgtgccccatgccaagaccaatgtggtcacccgtcccagtctggccgccctgcggctgagcaccccggtgcagtacaacgccgaagatgacggcaccaccgacctgctgtttgccattgccgcaccggaaaacggcagcctgcatgtggatatgctggcccgcatgatgcagatgctgatgaacgaggactttgtggaaaagctgaaagctgccaagacccccaaggagttcttggagtgcatcgacgcacaggaagaagcacagtttggtgcagagagctttacccagcaggccatcccgcaggacggctaccgcattctggccgtgaccgcctgcgtcaacggcattgcccacacctacatggccgccgaggcgctgaccaaggccggtgacaagctgggtctgcccaccaaggtggagaccaacggctcggacggcgcaaagaatatcctgacccgcgccgagatcgccgcctgcgatggcatcatcgtagcagcggaaaaaaaggtggacaccgcccgtttcgacggcaaaccggtgctgttcacccgcgtggacgacggcatccataagccggaggagctcatcaagaagattgcccacggcgaggtgcctgtgttccacgccgagggcggcgcagcagccgaggacgacaccgccggtaaggacagctttggccgcagcctgtacaagaacctgatgaacggcgtttcccatatgctgcccttcgtggtaggcggcggcattatgatcgcgctggccttcctgctggatgattacagcatcaaccccgcaaacttcggcatgaacacccccgttgccgccttcttcaagacggtgggcggcgcagccttcggctatatgctgcccattctggcaggcttcatcgccatgtccatcgccgaccgcccgggcttggccgtaggctttgccggcggcgtgctggctatgaacggcacaaacttcaccgaccttgccgcaggcagcaccaccggcatctccggcggcttccttgcagcgctgctggccggttttgcagcgggctacatcgtgcagttccttaaaaagatcaccgaaaagctgcccgccagcctgaacggtatccgccccatgctcatctacccgctgggcggcattctcatcgtaggtgcgatgatgtgcgccgtgaacccggtaatgggcatgatcaacaccgccatgaccgactggctgaacgcactgggcggcagctccaaggtgctgctgggtgctatcgtggccggtatgatgagcgtggatatgggcggcccggtcaacaaggcagcctacgtctttggcaccgcagcccttgcctccggtaactacgaggtgatggccgccgtcatggtgggcggcatggtgcctcccatcgctattgccctgtccaccaccttctgcccccgcaagtggacgttggacgagcgccgcaacggcattgtgaactacgtcatgggcctgtgcttcgtgtctgagggcgctatcccctatgcagcagccgacccgctgcgcgtcctgcccagctgcgttgtcggctctgcggtcgccggtgcgctctccatgaccttcggctgtgcactgcgtgcaccccacggcggcatcttcgtattcccggtggtggatcacgctgcgctgtactgcgtggcgctggctgtgggcagtgtgctgggtgcagtgatcctgagccttgtcaaaaagacccagcccgccgaggcgaagtaacaagccattttcttctccatacggatagttcttcataagagcaaaggggactgccgcacaccgcggcggtcccctttgcgttttgcacaggcaccattttcacaaaaaacaggacaatataccgcccaaaacggcctatcctgccggaattgcgttcagcgctttgttttgcattgcaccccaccccgggctgtggtatacttatattcgtgattttaaagcccgggtatggtgtgccgggccaccagagaggaaacgaacgatgaaaataggatttgacaacgacagatatcttgcgatgcagtctgagcatatccgcgagcgcatcaagaagtttgacaataagctgtatctggaattcggcggcaagctgttcgacgattaccacgcctcccgcgtgctgcccggctttcagccggactccaagctgcagatgcttttgcagctcaaggagcaggccgagatcgtcatcgtcatcagcgccgaggacatcatcagcagcaaggtgcgcggcgactacggcatcacctacgatctggacgtgctgcgcctcatcgacgcttttcaggagatggggctgtatgtgggcagcgtgtgcgtgaccaagtacaccgccgccgccgaggtggaagcctttgaaaagcggctgagcagtctgggcatccgcaccttccgccactataagatccccggctaccccaacgatgtggcccgcattgtcagcgacgagggctacggccgcaacgagtacattgagaccgagcgcccgctggtggtcatcactgcgcccggccccggcagcggaaagatggccgtctgcctgtcccagctgtatcatgaatataagcggggcgtcaaggccggttacgccaagttcgagaccttccccatctggaacattcccctgaagcacccggtcaatctggcctacgaggctgctaccgccgacctgaacgatgtgaacatgatcgaccccttccatctggaagcctacggcgtgaccaccgtgaactacaaccgcgacatcgagatcttcccggtggtgaacgcgatgttcgagctgatcgcaggccagagcccctataagtcccccacggacatgggcgtgaacatggccggcaactgcatcgtggacgacgcagtctgctgcgaggcctcccgcaaggagatcgtgcgccggtactacaagtgcctgtgcgagcagaagatcaccggcaccgccaaggagagcgagcgctacaagctggagctgctgatgaatcaggccgggctgaccatgggggcccgggaagtggaaaagcaggcacacgcccgcagcgaggctaccggcggcgcaccggctgctgccattgaactgagcgacggcactgtcatcaccggcaagaccggcccgctgctgggtgctaccgcaagcgccctgatcaatgcgctcaagtatctggcgggcatcccgcaggagacggatctggtcagcgccgctgccatcgagcccatccagaccctcaagaccaactatctgggtggcaagaacccccgtctgcataccgacgagatcctgatcgccctgtccagctctgccgcttccagcgagcttgccgcagcagccatgcaccagctgcccaacctcaagggctgcgatgtgcactccaccgttctgctttccagcgtggacagcagcaccctgaaccgtctgggaatgtacctgacctgcgaccccgtctacgaggaagaggatcgcaagtaccataagctgtaaaaataaaaagaaactggtaaacaccccggtcagcgccgtcaggcgctgaccggggtgttattgcttgccagttgtacgcagttgtggtacacttgttctgcttaatttttatagcagataggaaaagaggaacaacaacatggaacaacaacacaagcgcagcgcattctccggtaagatcgggttcgtgctgtctgccgcaggcgcttcggtgggtctgggcaacatctggcgcttcccgtatctggcagccaaatacggcggcggcatttttctgctggtatacattctgctggcagtcacctttggctataccatgatcgtggccgagaccgcgctgggccgtatgacccacaaaagcccggtcagcgcctacgcccacttcggtaagggcaagggcatccgcttcggcggttggatcaacgccatcatccccattttgatcgtgccgtattattcggtcatcggcggctgggtcatccactatctggccgagtatctgtgcggccgcggcagtaatctggcggcagacggctacttctccggctttatcaccaacggcttgcaggcagaactagcctttttgctgttcagcctgttcacgctgggcattatctttgccggtgtgcgcaacggcgtggagcgcgtctccaaggtgatgatgccggtgctggtggtgctgtcgctggtcattgcgggctactctgtcacccgtcccggtgcactggcgggtgtgaagtattttctggtgcccaaccccaaaaacttctcttggatgaccgtggtcaccgccatggggcagatgttctattctctgtccattgccatgggcattctggtcaccttcggctcctatatgaagaaggacgtctctatcgaggagtccaccgagaacgtggaggtgttcgataccgccattgccatcatggctggcctgatgatcatcccggcggtgttcgccttctccggcggcgacccggacaccctgcaggccggtcctgcgctgatgttcatcaccatccccaaggtgtttgccagcatgggtctgggcaccgcggtgggtgtgctgttctttgtgctggtgctgtttgcagcgattaccagctccatcgccctgaccgagagcgctgtctccacctttgaggacgagctgggctgggaccgcacccgctccactgtgctcatcggcgccatcatggtggcgctgggcagcctgtcggcgctgggctacggcccgctggccggggtgaccgtgttcgggatgcagttcctggacttcttcgactttttgaccaactcggtcatgatgcctattgccgccattgccacctgcctgctggtgtcccacgtcatcggcgtggagcagatcgcgcaggaggtggagcaggacggtcagcgcttccgccgcaagccggtgttcaattttatgatccgctggctgtgccccatttttgcagccatcattctggcaagctcggtggcaaacgcctttggctggatcgccatgtaaatga

SEQ ID NO: 13730 - DNA, 7840 bp, Unknown
  gut microbiota DNA sequence
ctttttgtttctaccggctttacttccgagatttcccgcctcacagcacacgacctccctgctgttcaaaattcgtcctcaaatcttctacagcctccgcatccgggttcaggctcatgcccatgcttatcacgctgttcagcacccagtctgcggcagcagctttcaggccgtactgtccctgcagctgttccagaaattccttacggggtgtgaacgatttttcggctgcggcacagtaatcaatgaccgtgctgattccatcaaagaaatcaaacacagctttccgggtcttagccacatccagttcgccgcctgcaaagacctgttccaggtagcggccgtcctccggcttcaacatcatctcatggcgtttcagccagagcttcagctgctccatctccgaactgctcagcggttccagctctttgcccactgccagttgtccgaatacaaactctgcgttgatttcacgcggcatttttgaaggcttgtggtaaacagcattttccggcatgggatacgcctcaatcttgcagagcaccgcctccggccactcgttctggtaaacggcagccacacccagcggcagcttggacaattcatcgatctgtgcctccttcagggcggcagacttgcctaccagcttgcgatcttcttcgtccggcaggcgcagaataattttggtgttcgtgttgcggatgaccgacatatccagcagtccgggtgcctggtctgcaatgataaacccctcaccataagtacgcatttccgcaatagcatttgccagcatttccaccgacttgccctgcaaatttgcaccttcctgtgattgctctgccgaggtcttgcgcagcaggttgtgcgcttcttccagcactgtgacatggcgaagcctgctgttcatcccgctgctgcacatccggtattcctgtaacttcatcaccaagatgcccatcagcagcgatttcgtttccatagagcccacacggctcaaatccacaataacattgcggtcaaacagcgcttcgtccgtcagcgcatcttctgcgcaaagcacacttccataaataccgtttgtcagagactttacgcgggtgcacaatgcgcccacatagtcgctttgggtatccttggaataatgcgactcttcaatgacgcccggcagaatatccagcaggtcaaagaaggttgggaaaattcccttctcgctctcagaattgcgcagatcccagcctactttctgatagctgcgctcaatagcatccttcagcaccgctggcatggctgcatacatcggccagcaggcgttgaatatctccaccagacggtcaatatgttccagaatatggatattctcagggaatgcaaagggattcatgcgcagcagcggcgtttctctggggtttgtaccaaacacctgcacatctgtacaattgccgaacacgttcttgtattcgcccttggccggttccaccacaagaaacgtcgtttgtccgttctttgtgatctcatccagtagatggtagaccgcattggatttgcctgtgccggtcgagccagtgatgaacgtatgggaagccatcgcctgccggttcaagagcagtcctgccgcttcctctttacccatgtggtaaatcttgcccagattcatcttgtcctcatccggcatcgcctcatccggcacattgcggccaaactccgcgtgctcaataatcggcaaaccatgcactgagcgggtgggcaaaccaaggtgcatcggcagttcccgcccgctgaccagcgtacctgccgtgtaaaacagactgtcagcttcattctcccagagctggcgtgcaaagacagggtgtgtaaaccgtttgagatattctcgcatagcagttacacttgcacggtcctgccaaagattgaccgcaccgctttccacagaagagccttctccaatcatcagcgaacgatatgtattagctgcaagaagagccttgctggggcgagaggacaaaaaataagccgcacaactgtaacagccgtaatcttcactttctttggtacgcttgatttgctcgtcaattcgtgtcagcagttcttccaccgccttgttgcagacttctatctgctgcgtccgcgcagtgccgtgcgtatccgtcgtcccgttggaatgctgttcattggtgctgtgcgcattgctgcgttccaccgtagagctgtctgtgtgcgccgtgttgtatccccggctcatcccaaagcccagcgactttccgatgctccgtgccgtactccatgcagtcccatttgtttcatgtccagccaccataggcaccacagcgccaaacagcggtccagcctttaccgccgcaccaactgtactcgccgccgacacgatggctgctccggcaggcgggaagactgccgatgccgccactgctccaagcgcaaggatactcgcaccagccgcaacgccgaccatcgttcttttgctcggcaaccgaagccgtgtgaccgcgtgcgactgtcctatcgtattcgtcgttccttggttcattccagcgttaaagttaaatcccgtgtttcggccttgttcatcgctgaaaccactgctcgttccgtccgttaccgtatccgatgtgccagagcagaacgtctccatgaccgcatggctttcgttttctgtataagaccacgttgttttgcggaacggagacaacgcgctatacagttcctcatatccatttcggatgccagcctgtgtttcttctgtaactggctctgccagaaataacgctgtataagcatcgccatccattgcatcgataaaacgctcaatgccctgaataaatgctttgtcctccgtcttggatttatctcgcaatgccgcaacgcaggagacagaagcgattgccgattgtgccgaaccgaaagaaccgttatcgtcttccagcagcgcgtcaatttcttcctgatggagttcctgtacttccgaaccggggaagttactcttcatccctttttccagcgcatcaccggaaattgcaaggtcgcggttatcgatgctctgcctgcccggattctgccgcacccccaaataaatatctgccggtgcaccatctgccggaacatcgatcatcacagccagactgcaaccaagggccatgctggaatgataaacggtggagagtttttggagcatatcctcgccttttttcagggtcagctccttcatctggaacagcttgatgcaggtcttgacatccagcgttttcttcatttcttccgatggctccaccagcgaataactctgcaattccggcagatattttttgtacaccagatggtctgccagcgtcagttgatttgcaagttcttccatcgactgcctctgggagagatcctgattcgtcatttgtaaatcgttcatgttggtttcctcttttgacagaaagtcgttttattcaaacatcgctgcacccatcacgtttatatcttcaactgcttttgtttggttcacccaatattttcagaaatccatttccaatgccatgcgcagtcttttacgatttgatgctttttcttttgagcgttcaaagcttttgttcatcttcaaaatttcatccatggtcgttttggtctgctttcctgcaaatacgtcccttgacatttgctttatggctttgctcatcctgcttgcatcttccttggcctctgctactatatagagcacatccgcgcggtgcttatccttttccacaccaatgccattctggtagcaataggccacattgctgtctgccacatagaaaccatgatctccttcactcgctgccccaaaatgggccagagcctctttcccatctttgggtacaccaatgccccttgcgtagcaaacgccaagatcatttattgccttcatatattcctgctgtgctgatttttggtaatactctactgcttgtttcacattttgggtcacagcatttccgataaaaagacacgttgcaaaaaggtactgtgcctcagcatctccttgctccgctgcctttttatagtacttgacagcttccgcaggaagtttgtttacacccaaccccttcatatagcattttccaagatttctctgcgcttccttcgaaccgttctctgccgccttttggaacagttcaaacgcttttctcgtctctacccccactccaatataatactcgcccaatttattttgtgcgtcggcatttccctgttctgcggccttttcgagccattccatagccttactcttgtcttcctctacaccaattcctgcaaagtaggaacatcccaaaaagaattgtgcttccgcctttccttgttccgccgcttttttaaaccattcaaaagctttacgctcatctttttctgctccgattccctcagaataaaaatttcccaaaacaacctgtgcatctgcatagtcttgctcagcggctttctgcacccagtaaagtgcccgcttttcatcttcttcaacacccaaaccattcaggtaacaggctccaagatcatactgtgcagcagcaaagtcctgttcagcagattttttgtaccattcgattgccttcttttcatctttttcgaccccatatccattaagatagatacctgccaaaacatattgtcctgcgggatggccttgctccgcagcttttcggaaccactttattccttcttgctgagcagggtcgttccaatccgcgtcatcatttgctaaggtcaaaccatatttaacctgcgcgtctgcatttccttgctttgcagccagatagaaccacttttttgcttcttcttcatcctgctgaactccatctccgtcgctgtacatatcacctaccacagactgtgcatccgcgtctccctgctctgcggccttcttcatccatttgaatgcttctgcatggtcttgctcaacaccttcaccattgtaatagcactctcccagattagattgcgcatttgcatagccttgtattgctgagttgtaaaacagctcaactgctttcttcaagtctttttcaaccccctttcccgttttgtaatctaacgctaaattgcattgcgccttgggatggccttgtgccgctgactttgcataccatttggcagcttcttttacatcttttgagacaccttcaccgcgatcatagcggacaccaagacgattttgcgcatctgcatttccctgttctgcggccttgcggtaccacttagcagcttccaccatatttttttcattacctttgccttctgcgtaacaaaggccaagccgtaactgggcttccgccgaatcatacttttccgcagcaactttgtatgcctgaaacgctccttcctcatcgcagaccttttcacaccgctgtgcgctttccaaatatacttgcgcattgtcctctttgctcgtctctgcaaccatttcaccaagaccgtactgctgcacacaataggcaaacacactttttggcatatctgagccgtagaaatagtagctgtattgggtatcaggccctgcattccgtgtctggagttttacttcttcgccaagacccttccagctggcacggcccgaaacaggcataaaccattctggaataggcttgttttcaatggctgtcaacccttccatctcgcatttgtcgatacggatagattgcaaagcattatcctgatagaaaacttcgacccgaaccttgttcatacagcagaactccttttattttttcatttccgatataattttgatgtaatctccctgacttctcacccacatattgatacctgtaccgaacacctcagcttctacgatccaacctttttctgttacctgcaaaacctttgcagtgggcagtcggtcgagaacggattccagacttggcccggtatactcgaaccggatggtctgcaactcgccgccgtacataaactggatgcgcttgcgcatctcgccctcctgaaagcggtcggtatagcgctgggcaaagtgccggtcgagggtcttatagttctgaatgcggtcgatgcggtaaatcgtcggggaattatcctgcggattcttgaagtgcttatccttgtcgataccttcgatgaacgccgccagatagaaataatactcgctgaacaggatacccaccggctcaatggtgcgcacacgggtctcgccatcgtgggtgcggcagtaggtaatttccataacattgtgattttctactgccgtgccgatttcccacaggctctcaatgaacttccggccgtgctgcggctcgacgtaatggaagcgttcgttgctgatgaggtctttcacctgattcaaccggtccagcggggtgcacacctgcaccagcttgtccagaatggggaacatttcctccttgaccatggaacggctttccagcaaaatcttgcacactgccagaatctcgctgctggtgaggaagcgtgaaagcgtgtcatccagcagataaccgccttttgcggagttgtataagatctcccggcgcggctcgctgtctgcaaaatagctgcgcagggtatcaagatcgcgctggatggttttctcactgacgccaaagtggtccgccgtttgctgtttgttcagcacaccgccctgtaccagaatctgctgaatatagagtatacggtctaatctactattacgcacagttcattctccttctctgttcattgtaacacagtgcaacaacagccgcaattctttgtgtgaaattttgttgttttgtgaaacagccacaaaatttttgtctcttttgcacaacccccagtatacaaaaaaagatggacagcttgtctgtccatcctccaaaaagccaagtgcttttctcacaaattccatctgcggttcagccggtagatcacatcccatacatcatccttaaaagtgtacattacctgacgcggtgatgcacttctgcttgccatgcagacaagcagaaacagttcggcggcaaatgccgcgcccagcagaaacatccatatttttttcattgcgcactctcctttgatggcgtttatgcccttttgtctgtctattataacgatcctgttggacagtttgcatgtcctttctgtaaaagatattttctgcttttcctgtacgttgcaacacaaaaaccgccccagcttccattgcggaaaccggggcggttcgtttgctttatttgtgctttttcaagcgctcacgcaatcacttgcgggggttcttgatagcagcctgagcgggtgccaaaattacagagcgttcgttttactccaccatgacattaatcattatcgaatgacctttctcgaaagaagcaccaagaaatagcttgtcattgtcactccagagaacgcctctaccaatgaaaccatcttcgttgcaagtgtagcaggaaaaagatcgccatagcctactgcaaaaaaagtaatggcacttgcataaatgcactctagccatccacttactccttgatattgtaaacatggtattacataatatgccgttccgaatattaaaatcagaagaattatagttaaaaatgttcggcacggtttggttccatatccgctaatccaatccagcagcctgcgtaatcctcttatataatatcttttttcttctttcgttttcgctttttgataatgaagatgacaaatatcttcattatcatattccccgagctgtctaaaattttcctttagcatcaagagttgttcattctttttttcggtaatcttttcaactagtttagggaagtctttaaaataaattctcccactattgattgcatcctcaaatgatacttcttctgtatcttctaat

SEQ ID NO: 13731 - DNA, 23370 bp, Unknown
  gut microbiota DNA sequence
caaacaaaaattccataaatcatgcccagagcaaagcggagggcattcaagagcgtcccagctttttcagctccactaccggccagccaagggcgcggatagcgcttttatcgtgcgtagccagcaacaccggcttgcccgcgcagcgctgccgcagcagcgccgccgcccgctgcagggtgtccgggtccatgccggtaaagggctcgtccaacagcagggtgtcgctgggtgcccacagcgcccgcagcagcgccacccgccgcttttgcccgccggaaagcctgcgggcgggcagctgcaaggcggcagtgcccattccaagctgttgaaaatcgcttgtaatttgctctttgtactggttttccgcccccggcagcaccaaggtgacgttctgcaccgcgttcagctgaggacaaaggcggtcttcctgaaagaccgccgccacccggcctacgccctccacgctgccggtggtggggcgttccagccccatcaggatgcgcagcagggtggtcttgccccagccgctgggtgcccacagcaccacgggggcatccacctccatgcacaggtcggtgaagagcggtgccgcgccgaaccgttttgtcaggtgttgaagcttcagcattttgtcccctcctctcccagcactgcgccaacggctttatccagtgcaaacaggaacagcttttcaaagcctgcgctcagcagaatgatgacaaaggtccacgcaaacagttccccggtggaaagggtgatcttggcacggtacagcgcatcgccgatactgccgttgggcaggccgatgacctcggccgccacgccgcttttccagcagatgcccagcgccacgctgcacccctgccggaaggccggcagcaccgccggcagccagattgcccgcaggcggcggcctgcaggcagacggaacaccgccgccatttccagcagctgcacgtctgccccggcaatgccggtgcgcaccgcaccgtacagcaccggcagcaccattaaaaagctgataagcaccgaaagggcgctgccccgcacccagaccagtgccagaatgataaagcttgccaccggcgtggtcttgaccaactgcatcaccggagccagcagtgcatcggcggcgctccaccgggcggcgcacaccgccagcaccacgctgaccactgcgcccagcacaaaacccagcaaaatgcgcccggaactgaagcccacccgctgccagaaatctgcccttggcagcagctgcaccaaggtgcgcagcgcctgcaccggcgataccaaaaacacctcctgcccgatggccatagctgcggcctgccagaccgccagccagaacgccaccgccagcagacggcggaaaaactgcttattctgcttcataaactgccctcttcccctgcctattataaggtatagtataccataccgccccgcaaaggggaatgacctgtgcaccacctgcggcgggtcggctcacgctgtatatacttttattcaatcatcgtatgcttgacatgaatttgtatccagtgtaaactggaaacaatatgcggtgcaactttggcaccggcgcaggaaagaggggacagtattgacgcaagcgctcaagggccgcaagctgttgcttgtcggttttacgttgttttccatgtttttcggggcaggcaacctgatcttcccgcccgatttaggcgcaaaggcaggggcaaacctctggcccgcctttctggggcttgctatcagcgccgtgggtctgccggttgcgggggtcatcgcggtggcgcgggctgacggtctggacaagttggccgggcgggtgcatccggtgttcgcgcaggtgttcatgattttgatctatctgtccatcgggccgtgtctggccattccgcgcaccgcaagcacctcctttgccatgctcaccccgctgctgggcagcagtgccgggcttcaactggggtactccgtgctgttcttcggggcagcctttctggtagcgttgcacccggacaggctcacccgctggctgggcaggctgctctgcccctgcctgctggttctgattctgattctgttcggcggctgtctgctgcacccgttggcggcgcagtacgctgcgcccaccgagacgtatcgttccgcagtcgtgttacagggcgtattgtacggctaccagaccatggacgcccttgcggcgctgaactttggtgcggtcatcgccatgaacatccgggcgcaaggcgttgcccgggagcaggacgtgcagcgcagtgccatccgtgcagggcttgtggcgggcgggctgctgctggcggtctacaccatgctgggacacgccggagcactgaccggtgccgccgcgcccggccttgccaccggtgccgaggtgctgaccgtgctggccgagcggctgttcggaaaagcgggactggtgctccttgctgccatctttatgctggcctgtttcaacacctgtgtggggctgatcgcctgtgtgggagagtatttccacaccctgctgccccgcatcccctaccctgttcttgccgccttttttgccgttgccagtatgctgatcgcaaatctggggctggcagatatcctacggttatccgtcccggtgctcaacgccctgtacccggtagccattgtgctgattacgctttccttcgtgcccgggttggaacagcgccgccgggtctatccgctgtgcatcggctgcactgccgtgcagagcattgccgccgcgctgccgcttggcccgctttctgctcttgccaacgccctgccgctggcggcgttgggctttggctgggtgctcccggcggtcatcgggctgctggcaggcatctttttaagctgcactgaagaataaaggagatattactatgatccagcctatcatgcacgacccgctgtttctggcgcagaagtccgcccctgccaccccgaaggatgcccctgttgcccgggacttattggagaccctgaccgcccacgccgacggctgtgtaggcatggcggccaacatgatcggcgtgctcaagcgcatcattgcagtggaagctgaggacgggtatttggtgctgttcaacccggtcatcctgaaaaaatccggccagtacgaagccgaggagggctgtctttcgctggagggtgtgcgaaaaacaaagcgctaccagagcatcaaggtgcagtatcagaccatggacggcaaaccgcgcatcaagacctttaccggctggacggcgcagatcatccagcacgagatcgaccattgcgatggaatattggtttaagcttttatcatgcacaaagcccccgagggtgtgaccctcgggggctttgctatgctgtaacagagaaatgaaggtgttattgtgaggtcattagcctttcacgccacccaaagcaacgccgcggacgatgaacttggacagcagcaggtagacgacgatgaccggcagaatggcgatggccaccatcatgtacaccttgcccatatcgaacttcaggaagtccgcgctgcgcagctgagcgatcaggatcggcagggtctttttgtcggcagtgtccaacaccagagccgggatgaaatagttgttccagctggccacgaaggagaagatggcctgcacagccagagccggcttcatgatgggcagcacgatcttattaaaggtataaaactcgcctgcgccgtcaatgcgggcggcttccacgatctccatgggaagggaggcatccagatactgcttcatgaagaagaacacggtgggtgctgcaatgctggggatgatcagcgggatgaagctgtttttcagccccatcttggagatcagctgcaaaaagcccagtgcggacacctgtgtaggcatggtcatgatgagcaaaatcagggcaaaggcagcctttttgaatttgaagttataggcgtagatgccgtaggccgtcagtgccgagaagtagacgctgagcgctgccgagcaggcagacaccagcaggctgttgcggatgccgctcatcacggggatgttggcatccgtaagcacgttgcggaagtttgtgatgatggacttgcccggcatcagcgagaagcccttctgaatctcgaagtgggtgcgggtggagttgatgatcagcacatagaagaagaacaggcacagaaagctgatcagcaccagcaccagatagcaccacgcacggcgggcggtcaggatcgccttttcggactggtttttaggcgtatgtgccatacttatttccctcctttggcagcagccttcttggctgctttcagttccttgcgctgagccttggtcaggccgtcatcctccttggtcagcgagaagtacacgacgacgcacagcactgcacacacaaggaacagcaccacagatactgcaccggccatgccgtagttcttgctgaacaggtggttgttcaggtacatgatcatggtggtggaggtacggtcggggccgcccttgccgttggtcaggatctgcggcacatcgaacatctgcaggccgccgatcatggaggtgatcatcacatagaccagaatggggcggatcaggggcagggtgatcttccagaacatctggttcggggtgcagccgtccagctctgcagcctcgtacagggtgggatccacgcccataatggctgccatcagcatgatggtggtgttgccgaaccacatcaggaagttcatcaggcccaccagaccacggttgccccacacagtattcaaaaagctgatgggggtcttgatccagcccatgctcagcagcactgcgttcaccgggccgttatccgagaacagggcgaagaacagcatggcaaaagccgaggccatgatcaggttgggcatgtagatgaccgtcttgaagaaggtctgtcctttcagcttcagccgcaggtcggtgaaccatgccgccagcagcagcgagacgatgatctgcgggataaaaccgatgatccagaggatcagcgtgttgctgaaatacttgggcagatcggtcgcgaacagggtgatgtagtttttcagacccacaaagctgggtccgatgatcttcagaccgctgcggtaatactcaaaaaagctgtaatagatggtggatgccagagggatcagctggaataccgcgaagatgataaagaacggtgcaatgaagatatagccccatttcgcgtagctgatcgaccctttcttctttgttttttctcccatgagatctccctcctgccgggtcacagcaaaaccaaaggggcgggcgagatacgccgcccgcccctttgcttcaattttcagttcggagtaaaaccgcttatgcgggccagaccacatcggtcagctcggggtacttctccttgatggcggtctcgaagtttgccttggcggcatcctcctccacgttgccggtgaagtaatccttgaaagcgttctggaagctctcgttcaggccctgatcgtacgggccggcgttggacatatcgatcttggttgcagcttctgcaaacagagcgatgtggttctggccgccgaggaagtcggacttgtaatcgctcttggcgatctcgttcatggccttctcgttgttggtgtagtcctgcgtatccatggtgatctgcttcatgatggcttcatcgcaggtcagcttcagcataacgtccttgatggtctcaaggttgtcgctgccggctgcgccgcagatccaggtgccgccccagtagtagggctgagggccttcgcacacagcgtagtcgccgtagatgccgttgccaacctcttccttgccgccctcagcggtaggagttgccagagagttgcccagcagggtgaagttgatgccccaagtggagtagaagaagccgaacaccttaccggtggggccctgatcggaagcccactggctgtcccacaggctggacttgttgttgtagcccttgtcggtgtactccttggtctggtccacccacttcatcaggttctcgtccacggtaacggtggtgccggtgacccaaggtgcggagacgttgttggagaaggtgcggtatgcatcgtcaaagccggacagcatcttgtagcccttggcagcagccttggcagctacatcgttgaacttatcccagtcggacaggtaggtctgcacttcggcggggtcatcggtgcccagcacatccttggcaatgctgcggcggtatgcgaacagacccggggtagcctgccaagtggtgccgcgctggctgccgtccacagaaacgatgtccttggtgtactggtactggccggccagatcggaatcggtcaggccgatatccttcttgacatccagaacgtagtcggaatccacatacttcagagcgtagtcagcctcgatcaggaaaatgtcgatcttgtcgtcatcggcagcggaatcctgattcagcagagcctcgtccagcttgttctggtagttgttgttctcgttggcgttgatggtccacttcacggtggtgccgtccttcagggtggtggtggacttgtcggctgcgatctccttgacctcgggatagtagtcgttgaagcggctctggaactcatcattccagcaccagatgttcagcaccttgccctcggcagcagccggagcagaagcagctgcagaggatgcaggagcggcagaggaagcagcagtgctgctggaagaaccgccgccgcaggctgccagagcagcaccaacagtcacgacaccggaagcgagcaggaaattacgacgagagatctttttcataagggtaaacctccttcatggttttccaattaaaaaattcatactcaaaaactccgcgctgggagtcatgggcctttgttaaaggatgcggacggagccgccgtccagcagtttgccggacacccggatctgctccggcagggtcacacgcggatgctcgatcagctcgatcagcttatccgctgccagcctgccaagggatttggtgttctgctggtaggtcaccagcgggggtttgaccacccgggagagatagatgccatcgtatcccatcactgagatgtcctccgggatgctcaaccctgcttcggtcagggcgttgtagccgcccagtgcggaaaagtcatccgggaagatgatgcaggtgggccgctgcggcagtgccagcagcgcccgggtctcctctgcgcagcgatccacatcgtggtacacaccgcagcggacgtactcctccggcaccttcagccccagctcctcgcaggcttgatagaagcctgccaagcggttttcggtaacggcggtcttttcgccgtggatgaaggcgatgcgccggtgtccgcaggcccatgcctgctgtaccagagcctttgtgcccgccacgttgtctgaaaggatcgccatacggttgttgaacacatggtcgatggtcaccaccggcacatcgccgttgaccagttccaccacctgcggatcgtaaaagttcacacaggcgatcaccacgccgtccacaccccggtagtggcaatgttccagatagctcatggacttgccgctgatgttgtggttgatgaaggtgatatcgtagccgcgcttttccgcttctaccttgaagctgtccagcactgcggagaagtactcgtgggtcaggccgctctgtttttcatctacgaacagaacgccaagattgtaagtgcggttggttttcagcgcccgggccgctgcgttgggcaggtaccccatgcggcgggccgctgcacggatgcgctcccgcgtggccggtgcgatatccggctggtcgtttaaagccttgctgacggttgcgacggatacgccgcattctttcgccagatccttcagggacggcatcttttagcctccttccgaggataggagcagcgggatgtttctcgcaagttccttaatcgttttcgcagcctcaatatatcgcattctgcaccaaaaatcaagtgaaaacgtaaaagttttagctcagctgcatcacttttggcattttgttccaatacagcctgtaagaattgtgcatctcgattcactttcgttacatttcgattaaaacgaaaaaattttcgttgcagtttcgttatggttttcggtgccggaggccgtatgtatatattacttttaaaatggggttttgggtctttcgttcgccctttcgccggtgtacgccgtgccgaaagtccccgaaaaccgccggggcttcgcagattattttaaaatttccgttgagatttttgcaaaaagctcttgcatttttgggtgggatacggtatgcttagcgtgatgagattgcttctttcgcagcgccttaatcgttttcgcccatcgacacactgcccgcctgacaaggcgcagttttaaggaggaagcattatgaagttcggatattttgatgaccagaataaggaatacgtcatcaccaccccgcagacgcccctgccctggatcaactaccttggcagcgaggacttcttcagtctggtctccaacacggcgggcggctacagcttttaccgggacgcccggatgcgccgcctgacccgctaccgctacaacaactccccgctggacatggacggccaccggatctacatcaaggacggcgaaaccgtatggaacccgggctggcagcccaccaagaccccgctggacagttacagctgccgccacggtctgggctacaccattctggagggcaaaaaggacggcgtgaccgcccggcaggagctgttcgtccccaagggggatgcctgtgagctggaccgggtgacagtgtgcaacggcagcactgttgtcaaggagctggatctgttcagctatgtggagttctgcctgtgggatgccgtggacgacagctccaacttccagcgcaactactccaccggtgaggtagaggtagagggcagcgtcatctaccacaagaccgagtaccgcgagcgccgcaaccactacgccgtgttctgggcaaactgcccggtggacagctttgacaccacccgggatgccttctgcggcgtgtacggcggcccggcagacccgcaggccgtccgcgctgggcactgctccggcagcattgcccacggctgggcaccggtgggtgcgttgcacatccacctgaccctcgcccccggcgagagccacagcatcctgtttggtctgggctacatcgagaacccgcagcaggagaagttcattgccccgggcatcatcaacaagacccgcgcccacgccatgatggagcgctacgccaccgatgcacaggtcgatgccgcccgcgccgccctgcgcacccactgggagcagctgctgtccacctaccatctggaatccggcgaggaaaagctgaaccgcatggtcaatatctggcaccagtaccagtgcatggtcacctttaacatgagccgctctgccagctactacgaaagcggcaccggacgcggcatgggcttccgggacagctgtcaggatctgctgggctttgtgcacatcatcccctcccgcgcccgggagcgcattctggatattgccgccacccagtttgaggatggcagcgcctaccaccagtaccagcccctgaccaaaaagggcaaccgggatatcggcaccggcttcaacgatgacccgctgtggctcattgccggtaccgccgcctacctgcgggagaccggcgactggtctattctggaagaacaggtaccctttgataacgacgccaccaaggcgcagaccctgatggagcatctgcgccgcagcttcaactttacctgcacccatctgggtccccacggtctgccgctcatcggccgcgccgactggaatgactgcctgaacctgaactgcttctccgagcacccgggtgagagcttccagatcaccggccccagcgagggtcctgtggccgaaagcgttttcattgccggtatgttcgtcaagtacggccacgaatacgcccagctgtgcgaccatctgaatctgaccgaggaggccgctgccgcccgcaagcacattgatgccgtggagcaggccaccctgaccgccggttgggacggcgcatggttccgccgtgcctacgatgctttcggcaagcccgtcggcagcaaggagtgcaccgagggtcagatctttattgagccgcagggtatgtgcgtcatggcgggcatcggcaaggagagcggacaggccgcgcaggcgcttgccagcgtggaggagcggctggacaccaaatacggcgtggtgctgctgcagcccgcctacaccagctatcagctgaatctgggcgagatctccagctatcctccgggatacaaggagaacgccggtatcttctgccataacaatccgtggatcagctgtgccgaggcaacgcttggccacggcgaccgcgcctttgcagtgtaccgcaagacctgccccgcctatatcgaggacatttccgagatccatcgcaccgagccctacgtttacagtcagatggtagccggtaaggacgcccccacctttggtgaagccaaaaacagctggctgaccggcacagcggcatggaccttcttcaacatcagccagtacattctgggcatccagcccaccttggacggcctgaaggtagacccctgcatccctcacaccctgtccggcttcaccgtgacccgccgcttccgcggtgctgtgtaccacatcacggtggataacgccgccggggtgcagcacggcatcaaggccgttaccgtggacggcaaggccatctccggcaacattctgccgctggctgccgccgggactgaggtaacggtgcaggtgaccatgggttaacccgactttttctgctttttcatattattctcctttctgtgaccaaagccgctgcgcagacccctgcacggcggctttggtttataatgaaacagtttaatgattgaaaatgcgctccgcattcgctctgcgcatagatagcggaattattattttaatttgcatttcagccaagcctgcgggcttggctgaaatgctttttcacgggaggggtcgtaatggtaaaatagcgctttcagactgcaactgctgttttcctctgcgaccccgcttgtgaaaatgcgtttggagtaggccgcggttgcgtagcaatgaaagccccagtggggcttttaagcggcggagcggtctgcgtgagcagatggaggggctttgccccgacaagttcccgcaggccgcgacaaacgtgaaataaaaataatctttccgctgaagatggccagagcataagcggaggccattctaaatcgtccccttccctcttgcattttttgggaaagaggtgtagaatacagtcacaatcaaacacaggggagctcgtgcagcgggctgagaggaagtatagcaagcttcgacccttttacctgatgcggataatgccgccgtaggaagtcataccctttatgattttttgcaggaggagccgcgccgggctcctcctgtttttttgtacctctgcggaggttccgcagccggctgagggggagcgccctgagccttggatgaatgcagcgatgggaagccgtgttccggcgtgagaggaagccaatgagcttcgaccgcaccttccgtacctgttcccgccttgtggcgggcacgggctgttttgttgcgggagcgccggtattcatcctgcgctgccgcagatggttgaaaaggagctaatttattatgaaaaatctctctgtcaaaaagcttgcccttgccggtatgttctgtgccctgtgcgtggtgggcagcgtgttcagctttcccatgttcggcagcaagtgcgccccggtgcagcacatggtcaacgtgctgtgcgccgttctgctggggccctggtggggtgtaggcgtggcctttgtggcttccctgctgcgcaacctgcttggtctgggcagcctgatggctttcccgggcagtatgttcggcgcactgctgtgcggccttgcataccacaagaccaaaaacctgatcgccaccgtggtgggtgaggtgttcggcaccagcattctgggcggcctgtgcgcatggcccgtggccatcttcctgatgggcaagagcgctgcggacatcgctttctacgcctatatcgtgcccttcctcatctccaccgccgtgggtgcggtgatcgccggtgctgtggtgttcagcctgcagcgctccggcgctctgcgctccatgcagaacagcctttcctgagcggaggtgccggaaatgctcaaaaccgcctttgagaacctgcgcagccgcagccctctgatccacaacatcaccaactatgtcaccgtgaacgactgcgccaacatggtgctggcctgcggtgcctcccccatcatggccgatgatgccgccgaggtggaggagatcaccgccatctgcggcggactgaacattaacatcggcacgctgaacagccgcaccgtcaccagtatgttgttggcgggcaaaaaggccaatcagctgggtcaccctgtggtgctggacccggtgggtgccggcgcttcccatctgcgcaccgacaccgccttccgcctgctgcgggaggtgcagttcacagtgatccggggcaacatctcggagatcaagacccttgcctccggtgcaggcaccaccaagggcgtggatgcggacgtagccgacaaggtgaccgaggaaaatctggacagcgctgtggcctttgcaaaggcttttgccgcccgcaccggcgcagtggttgccattaccggtgctatcgacatcgtggccgatgcacaaaaagcctactgcatccgcaacggcaacgccatgatgagcagcatcaccggcacgggctgtcagctttctgccctgacggcggcttttgtcaccgccaaccccggccacccgctggaagctgccgctgcggcggtgtgcgccatgggtctggcgggcgaagttgcccaccagcggctcaccccgcaggatggcaacgccacctaccgcaattacatcattgatgccatttacaacatgacccccgaacagctggagaaaggcgcaaactatgaagtgcgataaacacaccatgctcctgtacgcggtgaccgaccgcgcatgggtgggcgagcagacgttgtatcagcaggtggaatgtgccctgaagggcggtgccacctgcgtgcagctgcgggaaaagcagctgggcgacgccgattttttgcaggaggccattcagatccacgccctgtgccagcagtacggtgtgccgctgttcatcaacgataacgtggaagtggcactgcagtgccacgccgagggcatccatgtggggcaggacgatatggctgccgcacaggtgcgtcagcgcgtgggcgacggtgtaatgatcggcgtatccgctcacacggtgcaggaagcactggacgctgtggcgcacggcgcggattatctgggcgtaggcgcggtatttgccacccacaccaagacggacgtgagcgagatgccccggcagaccctgctggacatctgcaacgccgtggatgtaccggtggtggccattggcggcatccacaaggagaacatcctgcagctcaagggcaccggcgtggacggtgtggcattggtaagcgctatctttgccgcaaaggacattgaggccgagtgccgcgaactgcgtgtcctttcggagcagatcataaagtaagctatcatcccgcggcaaaccgggggcaccaccttgggccgcgttacaaaattcatggagaaaaccaacatgaaaagcgtattttgcgcaggtgccggcatccagagcgtactgttttttctgaatgacggttacctgtctgccacccttgcctgcgggtcgggagtttctccgaggaccgtccgctggggtgggaccctgctgccgcaggcagtagggcgggcgatggaatggcctgcaacagcaacgaccgccgccagtggcggaaacaggaagttgctgttggggcagcggccagcaggatgcgagtgttgctcaatgcacgaagcatccgctgggtgccgcaacccgaactcgtgtccgaggagaaagctcccggcacacaggctcccctgcatcaatgcatgaccagcaccctgctgttcagagataaactgtcatttggaggaacacagcgtatgcagacttataccacccagatggatgccgcccgcaagggcatcatcaccccggagatggagatcgtagccaaaaaggaataccgcaccaccgaggagatccgccagtgggtcgccgagggcaaggtagccattcccgccaacaagcaccacaagtgcctgaaccccgagggcgtgggctccatgctgcgcaccaagatcaacgtaaaccttggcgtctcccgcgactgcaaggactacaacattgagatgcagaaggtgatgagcgccgtgaacatgggcgcagaagccattatggatctgtccagccacggcaacactcagcccttccgccagaagctgacccacgagtgcccggtgatgatcggcactgtgccggtgtacgattcggtcatccactaccagcgggatctggcagaactgaccgcacaggacttcatcgatgtggtacgcctgcacgcagaggacggcgtagactttgttaccctgcactgcggcattacccgcaagaccatcgagcagatccgcaagcacaagcgcaagatgaacatcgtgagccgcggcggctctctggtgtttgcgtggatgagcatgaccggcaacgagaaccccttctacgagcactttgacgagatctgcgagatctgcgccgagcatgatgtgaccatctctctgggcgatgcctgccgtcccggctgtctggctgacgccaccgatgtgtgccagatcgaagagctggtgcgtctgggcgagctgaccaagcgcgcatgggcacacaacgtgcaggtgatggtagaaggccccggccatgtgcccctgaatcaggtcgccgccaacatggaggtgcagaagagcatctgcatgggcgcacccttctatgtgctgggacctctggtcaccgatatcgcccccggctacgaccacatcaccgctgccattggcggcgcagtggcagccgccagcggtgcagccttcctgtgctatgtgacccccgccgagcatctggctctgcccaacgtagatgacgtaaagcagggcatcgtggcctccaagatcgccgctcacgccgccgacatcgccaagggcatcccccacgcccgggacattgacgacaagatgggcgatgcccgccgcgtactggactgggatgcacagttcgcctgcgcgctggaccccgagaccgccaaggccatccgcgacgcccgcctgcccgaggacgaccacagcgacacctgcagcatgtgcggcaagttctgcgccgtgcgcagcatgaacaaggcgctggccggtgaatacatcgatatcctgtaagctttccccgcgctgaaaggcgcttcttcctccgggactgctgcacaaaccgtgcggcagtcctttttttgtgggacgatttaaaatgccctccgctgccgagctgcggcacattcagtggaattattattttgcatttgctgcactgcgttcagtttggtcaatctattctatcaattttttagattttacaattcttctgtgctgtactataatgaagtagcaactttatttctcaaaagtacaggaggctgttttcttgatagttgatctgattgaagcgctttaccgcctgctgtggggcgatttattcaccctgccggtggcaggcggcattggcatctcctttatggtggtgctgctgtttgcagccggtatcggctttaccctgcgcacaaggctgctgccggtgcggctgttccgggatatgatcggcgcagtgtgtgaaaaaaagcaggctgcgggcgggctttcctccttccagacgctggtcatctccaccgccacccgggtgggcatgggcaatcttgtgggcgtggtggccgctgtttcagcgggcggcgcaggcgcggtgttctggatgtgggtcactgcgctgctgggtgcttccacctcctttgtggagtccactctggcgcagaaataccgcgtgccggacccgctgtacggcggctggcgcggcggcccggcctactatctccatgtgctggccgagcgcaaacggggcaaaaagctcaagcgctctgtgtgtgcagcgctgtttgcagtgtccggtctgatctgctggtgcggtatcagccaagtcatctccaactcggtcagctctgcctttgaaaacgcctttcaggtcccgccgctggccaccaccgtggtgcttaccctgctggcagcgttgatcgtgctgcgcaagaatgccaccgtgaaaagccttgacttcatcgtgccggtcatggcggtgtgctactttgtcatcacggtgggcatcgtggtgctgaatctccggcagctgcccgccgtgctggcacgcatctttgccgaggccttcggcctgcgtcaggtggccgcaggcggctttggcgcggtgctgatgaacggtgtcaagcgcgggctgttctccaacgaggcgggcagcggctctgccccctgcgccgctgccgctgcggagtgcgacgacccggtaaagatgggtcttgtacaggcgctgggcgtattgatcgataccgtggtcatctgcagctgcactgcttttctgatgctgctggtgccgcaggagatcaccgccgggctgaccggcatgaaccttttacagaccgccatgcagtaccatctgggcagctttggcatcgtgttcattgcggtgatcttagcactgttcagcttttccacctttttgggggtgctgtactacgcccggggcaatgtggcctacctgtgcggcgacaactggtggagccagaccgcctacaagctgctggcgctggccatgctgctggtgggcggtacacaggcctacaccgtggtgtgggatctgggcgatgtgggcatcgggctgatgaccatcttcaatatgctggcgctcgttcccctttccggcgaagcgctgaccgctctgaacgactacgaaaagcgcaagaaaataaaataagatcacaaaaacgggctgctgcacaaagttctgtgcaacagcccgttttgtaatatgcgaaagctttcagctatgctgcttcagggcgcagacggcgatgctcagggcgctccatgcggcctgatacattagcactgtggcgatggaaagctgccagatgctgcccgcataggtcagcagcaccgcaatgaacaccgagaagcacaccgacaccagctgcaccgtagtagcgctggtctcggcattctgtgcctgatcggcagcctgtaagccgccggtcaggctggcaaagccccggtggtggtacaggcagcagtcgggcttttccggggcagcatcggcggcttcaatggcctgacactggtcgccgtccagcacggtgaccatgccctccggcagatgataagcctcggtgatgtgccgtgccgtcaggctgggatccttgctggtgaccagcagacggatgttttccctttgcagggaggcaaggctgcgtgccacattgcggccgcccacatagcgcagcacgaacatggcgtgcaggttgccggacaccgccagatacaaaatttgcagctcgccgtttttggagtggccgtcctcgtaatcctgctccggcagggtcacaccctcctgctccatgtagcggcgggtgccgatgaggatgcggttattgtcgcaccatgccgagaagcccagcccggtgtgctgctccagatccttgaccgggaacaggatatcggtgcggtcctcgatgatctggctgaacagcccgcgcagggtgtcgcagctttcgttcagcacactggctgcatacaggatagcgcggtcgatgcgaccgcccttgaagatgcggatatcctccagcgttacgctgtcggcggtaaacaggtcatcggcgtccagctcaatggtgtcgatgccgcccagctcctcaatggccgcccaaccgggcaccacagcgcccacagcggcagcagctctttgcagacgcagcgccgccagaccgggcaccagcaccgaggaaaggggtgcgcccatgcacagcacggcagccgccgcagccacggcgcagttgatcccgccgccgaacagcaggaaggctacgcagctgagcactgccgccgccagcaggatacaggccaccttccgggcacggcgctcgctggcgcgctcgctgaggctctgctccacaaagtcattgctggcggtctgtaccgggcggctcagcagcacccacgggtccttctgctccagatcccgggcgagggcgcggatcaggtctttatcgcgggtgcggtaagcgccccgcagttcgccgctctctgctgccagcgcatagccgccctgcacggcagccagcatcacccgactgcccaccagcgccagaaacaaccccagcgcagccataccggtcagcagaccgatgccctcggtgctacggtaggcgttggcattcagcatggccaccaccgcctgcagcagggccgccacagcggccaacgcgggcatggtgtctgcactgggacggccgcgcagaccggtcagaccgtcccgcagcaccgggtagcccacaaacaggctggcggcaaacagcagcagatttgcggcatagaacgccgccggagcagcgtccgggtccagcaccgaaagcggcggcagcagacgctctgccgtcagcccaaggtgcagcagcaccacggccagaatgcccgccaacacacaccgcagggtcagttctgcagccatgtggtgcagcttgtcggcggtggattccggcacagtttcctcggcaggggcagccgcttgcgcttccggtgcggtctccggctgtgccggggtcgcggcagctgccggtgcggatacagaggcggcagtctccgctgcgggggtgccgtcctgctccagcgggagcaggggcaggctcatagtatcctctttttccggcttgcgggcagcgggcttttcgtcctctgccgtgccgaacatctggaaaatagactttttctccggcttttttggcagcgtttccgggtctgccggcgcgctggcaaacaccaccggcggcaactcctcggcggcgttctgtgcagcctttgccggggctttctccggctctgccgcaggctgtgcaggcgcgggctgcaccttgggctgcggcgctacctgtacgggctttgcgggctgcggggcaggctttgccttaccgctcatgccgttgagcatatccttcagctgctgcatctcccgctgctccagttcctcctgcggcagcagcgtctccggggcgttcttcgccttaggctgcttttggggggctgcaacaggctgcggcaccggctggggcgcgggcttttccggctccggctgcacggcagcagccgccttgggtgcaggcaccggctctgccggaactgccttggcaggctctgggctggcggactgcatcggcattgccggaacagggtctgcggtacgcagttccagcgccatgtcctcctgctccggctgtaccggctttgcatctgcccccagcaggatctcgccggtggggatctccagcacaggctgtgccggggcgggcgtctcttccttgtcgtggctgaacagcttgcccagcaacccggccttgggcttttcctccaccggggcaggctcgtcccggcgggtcatctcctcgggcagatcaatcacactggtgctgaaaaagttgcggaaacgctcctctgccgagagctcccccgcctgcttgcccttgcgttcatttgtattgttcggcatccttgtccctcccactgttctggatggagtttaccgcttgttttattcttctacggcgcgctgcgactggatctcgtacaggatgatgccagccgccaccgaaacgttatagctgtccacgccggtgccgggtgcagccatatccagccgcaccacgccgtcacacagcttcttgaccagctgggataccccgctgccctcgctgcccagtaccagcgcgatggggccggtcaggttattcttgcgcagagacacgccgtccatgtcggcgcagtagacaaacacgccctgctccttcaggcggcggatggtttcgccgatattggccacgcgtgccaccggcagacgctcggcagcgcctgcgctggacttgatgacggtgggggtaacggatgcaccaccccgcttggggatgacgatgccgtgggcaccgcacagcagtgcgctgcgcatgactgcgcccagattgtgggggtcctcaatgccatcgctcagcaccagaaagggcggctcgcccttggccttggctgcggccaacagatcctccacggtcgcgtactcgatctcgctggcaaaggccgccacgccctgatggctctcggtgccggtcatcaggcgcagcttgttagggtgcacccgcttgaccgttgctccggcctccttggccagtgccgtatagtatgccgccactgccggggccatcccctcggcaataagcacggtgtccacaccggagccgctcttgagcagctcggtcaccgggtttttgccgtagatcaggctctcacttttctgctgcggctgctctgcatcgcggcgcggacggcgcggctggttacgttcttccatctttttatgctccttccgttccgggcgggctgcgccgcaccggaacgttttattttgtttatgataatccaagataaagtataccatatctcgcccggcttcgctacaaattgcagggattttattttctgacgcctaaaattttttcagtaaaacgcagcttccccgccggacagggcagctgtaaaaatgttttgcccgctgcccgggcagcacggcgcatttccgctgttttgccaaagcaaaaagttttccacaaaatgtgtctatacattccgtaaatagcctgtgatttttccacaagttgaaaactcagtggaaagtgtgtaaaagtccagccgcagcgcctgttttccgggtggaattaaacagtttccaccgggttttcaacagcaggttcccccatatcctggcaaaagccttacaatttgtaaaattcaagttggaattatgacaattttttgaaccagaaattgtccgcttttgcaatttcctccaacatcattttgacgaatgttaaaatatgttgaaaacccgtgccgcttccgcacaaggcagatgttgcattgtatatggatttttgtcgccaagcgcagagtatttctgccgcagccgcatcagccgctttgtgccgtgcccgttccgcagcagctctgcgcaagaaaaagcgcctgttcggattgattttaggcgcagtttggggtatactaaccatgtgggctcgttaaaccatgcacaatgcggtgtgtggcagagccggaaccccgataatttttggaggtaatgaataatgttggtaaatgcaaccgaaatgctgctcaaggcacgcgatggccactacggtgtgccgcagttcaacatcaataatctggagtggaccaaggcagtcctgaccgcctgcgaggaaatgaagagccccgtcattctgggcgtttccgagggtgctggtaagtacatgaccggtttcaagaccgttgccgccatggtcagcgccatggtcgattccatgggcatcaccgttcccgttgctctgcatctggatcacggcacctacgagggctgcaaggcctgcgttgaggccggcttctcttccatcatgttcgatggcagccactactccatcgaggagaacgtggaaaagaccaaggagctggttgctctggcacacgctcacggcatgagcatcgaggccgaggtcggctccatcggcggcgttgaggacggcgttgtaggcgctggcgagatcgctgatcccgaggagtgcgcaaagatcaccgctctgggcatcgactttctggctgccggcatcggcaacatccacggcgtctaccccgcaaactggaagggtctggacttcgaggctctggaccgcatccacaaggccaccaacaacattcctctggttctgcacggcggcaccggcatccccgatgagatgatcgcaaaggccatcagcctgggcgtttccaagatcaacatcaacaccgagtgccagctggtgtttgctgaagccacccgtaagtacatcgaagagggcaaggatcagcagggcaagggcttcgacccccgcaagctgctggctcccggcgcaaaggccatcgaggccaagtgcaaggagaagatcgagctgttcggctgcgcaggcaagggctaagctgaggcttgtatcgtaaccggtacaccacccaataaaatatgcgtccccgccgcactgttatgcacagtgcggcggggacgctttttattttgaaattcgataatgccccacgatgtcggttcgtttttccagaatgtcctgttcgtaagctgtctgccatgggtcattgtggtgaatgatataaggcactccgtttttatttcgccggtcggacacgatgccgatatgtctttcaaagatcacaatatcgccgccctgccattcctctatttctgagacatccgtggtcagggcagctgctgtgtgtgcaaaaaacaccttcaggtttcgtacccgtcggaaatctatgtttgcatccggttcttccaccatataatcctgtggctgctcccggatatctgcgtccacaagctcttgtagatcatatccggcattcttcaacgcatatgcaactacatcggtgcaaacgccataaccatcgtcaggataaccggtctcataatagcggcttttgtattttggatgtgtgctcacataggccagtgcgccgttcagaatatccaactgatcgtctacgccgtcatcatctcgatctacgttgctatgaaactgcggtatcctgccctgatagtcatcctcaagccggaacgccgaggtgtgctgataatgtgtctgcgcataaaatacgatgctacataacagtaaaagcgccagtaccgctatataatgctttgctgtatccttgcgggttctgttcgaacgcatattctcaccctttcttgctctgaagataccagctttttccctgttctgcaaccctttagcatatatagcgcaacaaaaaagccctgagattttcatctcagagctctttattaagtcggcgactacctattttcacaagccgtttccagctaactatcttcggcacaagtaagcttaacttctgtgttcggaat

SEQ ID NO: 13732 - DNA, 35702 bp, Unknown
  gut microbiota DNA sequence
atcctgcgcagatatagcctttctggtaggcctgatagatggaatttttataactcagcagataggaacttgctgaaccgagcacatatatcatatagatcagggtgatatgttcaatgccctcgccgcccttgatgaggtagggcagaaacggcagcagcaccaacccgaacagcaacaccgagactgccaccgcccggtacatccacttgtacaggttcatcagccgcgccagtttctgctcgtcatcccgggctgccggttcatacatgctgaacaccatagccgtaccgatgcccagctccgcaaaattaaggatgctgagcacatcggtaaacaggccgttgacccccagatattccgctgaaaggcaacggatgaacaccatccggttgatgaaggacagcagcatcgtcaaaaactgcccgccgatgttaaacagcatattgatgatcgaataacgtgttctcatgcgatttttaattctcccctgcctttgatgttccgcagccacatatattcccgcggaaatagccgcaacagcaggctttgcagccagagtcccgccggaacggtacaatactgccgcgtccggtccaccacatcaaactgcatccgcagcatttcccggctgcggggtgccttgcgcagcgccgggggcagctgccggtacacccggctcacgctgcccatcgtaaactttgccgcatttgccagcgcatcgtatacctcgttttccacgaggcagttccaataccgctgtgcggcctcggcagcatcaaaatggcgcagcgttttacttccgttcataatgctgctgccgcgctgcacataataatacagctcctttggcacaaccacggcctttttggtgttcagacagatttctgggagcacaaaaatatcctcgttcagcttcccctccgggtagcgcagctgcgcaaagatagcgcggcggtacagcttgttccacgcaggctggatcatcgaatccgtagcatttttcagtaaatcctgcccagcaaagacctttttttcaagacgaacgtgcatcgactgacatggcgctcccgcctcgtccacctcggcgtaatcacacagggcaaggtctgccccggtgctttgcacggccttgtacagtgtttcgtacatttccggtgcaatatagtcgtcggaatccacaaagccgatccactcgccccttgccacatccagcccggcattgcgggcagcagaaagcccgccgtttttctggtgaagcacccggatgcgggcatctttcgcggcagcggcatcacacagcgcagggcaaccgtccggcgaaccgtcctccacaaggatcagctcaaagtccgtaaaggtctgtgccagaatggaatcgatacatttttgcagatagttttccaccttgtacaccggcacaatgatgctgagcaatggtttttcgcagggcacagcgtgttcctcccgttttatcttttcagcccgtcacctcggtgcgcaggcgggcaatgagccgttccatcagcgccacccggttgaagggggtcatcaggtaaaagccgtctgcatagggcgcagccgctttggctgcctgcaccgagacttccaatcccagttcctcgcctgcggcacggtccagcccctcaaacctttggatgatggactcctccacatggatgccgttgacctcgttttccataaagatggcattgcgctggctgaccaccggcaggatgcccgccagaatttttgcgcgctcacccagcgtctcccgggcttttttcaggttttccaccgcctgtgccgacagcaccggctgggtaaggaagccgctcatgccgttttccagcttttctgcggcgcggcgcagctccacctcaaaattgcgggcgttcaggttcagcgcaccaaaaaccgtgatgggtgcgggcatctcccgcccttctcctgccagcgacacgatatactgtgccaacttgcgggagttgaactggtacacatttttcacctcgtcccgctcggcggtggggatggggtcgccggtaatggccagtacctcccgcacgccctcggcgtacagtcccagcagcagcgctttggtagcattcaggttgcggtcccggcaggtcatgtggggcagcacgttcatgcccagttcccggtgcacccggcaggccaccaacgaggaatccatccgtgcccgggcaatggggcagtctgcaatggtcagcaggtcggcaccggcggcctgcagacggcgggcaccctcgagataggcggtcaggtcggcgtccttgggggagtccagctccaccgcgatgacccgctgtccggtgcgcagcttgcgcaaaaaggcatcgtccgtttccactgcagactttgctgctgcagcgggctttgccgctggggcggcaggcagcgcttccggcaaagcatccagcgcggtgcgcagggcagcaatgtgctgcggcgttgtaccgcagcagccgcccagaatgcgcacgccctcactggcaaggcggctcagctcccgggcaaaatattctggcttgccctgatagcgcacctgcgcccgtgccaccaccgggtagcccgcattgggcatgaccgaaaggggcagccccgcatcccccagctgctgtaccagtgcacgcatcgcgcccggggcagatacgcagttcaggcccacggcatccaccacgccgctctgcgccacgcggcgcaccaactcggcgcagtaacggccctcgcgggtgtagccgtccggcagcaccgcaaaggataccagtacaaaggcctccggcacagtctgcttcagcgcacgaatcgcttccagcacaccgtcctcggcgctcagggtctcgaacagaaaattccgtgcacccagcagcgcaaagcgctttgccacagcaagatacacctgctccgccgggagattttcggtatccggtgcggggccaaggtcggcaaacactgccgcgccggtctccccggcggcctttgctgccagctgccagcctgcatccgccagctgctcccagcccggctgctgtgccgccgccagacgcggcaggctgaaggtattggtcttgatggcgtccgctccggcggcaagatacgcccggtgcaccgccagaatgccctcggggtcggtcaggtttgcctgctcgcactcctgccccggctttgctttataataggtacccatgccgccatcgaacagcagcggccgctgggctaacagtttgcgcacatctagcatcgatacttttccctcttcctataaaggatttcatctttcagtttatcgtagttcacccatccggtcaagcggttttcttcatttcgcttgcggcgcggccatttttgtgctatcttagggataacttttgagaaaagggagaggatggatcatgcgccacaccggcacacctgaactggagaccgaccgtctgctgctgcgccgtctgctgccgcaggacgccccgcagatgtacgaaaactgggcaaatgacccggctgtgacccggtttttgcgctgggaaccgcacaaaagccctgccgagacccgggaactgctttcggcgtgggcagagctgtatccgaaccccgattattaccagtgggccatggtggaaaaggccaccggacaggtgtttggctccatctccgtatacaacgccctgctgggtgagccgcagcaaaaggccaagtggccggggctggaactctccggcggcatctgggagccgggctactgcatcgggcagaagtggtggggcaagggccttaccaccgaagcactgcaagctgtggtggatttctggttcaatcaggtgggcggtgccttcctcacctgctgccacgcggtgcagaaccctgccagcggccgggtgatggaaaaggccggctttgtgtaccatcacaacgacgtttaccacaaatttgacggcacaccggtggaatgccggtgctatctgctgacaaaagaacgctacgataacagaaaggacttactttgagcgagctttatgatattctgaccgagacccctcccacaaaggtggtgctgctggcactggatcaggggctgtgggactgtgagcgcagtctggcagagctttctgccctgtgcgaggccaaccacatggaggccgtggcgcagatcacccagaagcgccagaccccggagaccggcatcgtgctgggcagcggcaagctggaagaagcttcccttgccgcccagacgctgggcgcggaatgcgccgtgtttgacggcgagttgaccggcagccagatccgcaacatctccaacgcgctgggcgggctggaagtcatcgaccgcaccatgctgatcttggagattttccgcagccgcgctgtgaccaacgagggcaagctgcagaccgaactggcgctgctgcgctaccgtctgccccgcctgcagggcatgggcgaggcgttgagccgtcagggcggcggcggtggcggcggtgcccgccgcggtgccggtgagaccaagctggagttggaccgccgccatgtgcacgcccgcattgatgcgctggccgagaagctggccgagatggaaaagcgccggggcgagagccgcaaggcccgcgctaagaccggaatgccggtggtaagccttgtgggctacaccaacgtgggcaaatccagcctgatgaacgccctgtgcggccccagcgtggccgaggccgatatgctgtttgccacactggaccccaccagccgtaagctggtgctgcccagcggcatggcggtgctgctggtggacacggtaggctttgtgtcccgcctgccccacaatctggtggaggcgttcaagtctacgttggaagaagccgcatggtctgatgtgatcgtccgggttgcagacgccggggatgaacagcgcgaggagcagcttgccgtcaccgacgaggttctggatgggctggactgtaccgacattccccgcctgaccgtgtacaacaagtgcgacaaacccaacaccctgagctttgaccccgacattctgctgaccagcgccaaaaccggctacgggctggacaagctgctgcaaaagctggacgaggtgctcagcgaccgggtgcacaccatccgggtgctgctgccctacgacaagcttgggcttgccgcccccatgcgggagcgcggcagcgtacaggtggaggaataccgggaggacgggctgtatctggaaggcatcgtcaaaaccgaggacctgcactgctttgagggctatctggtctaagcggaataatattttgatctagagcaaacccggaaagtctgcggactttccgggtttgcattttcacgggtggggtcgtgaccggaaacagctgctctatgagccaagtacgttgtctaccactgcttttttcataaataaaaagccccaacaaacacaaaaacccgcctggcagcgggtttttgtgtatagaggggtgggaaagtatataaagtggtgaatctcaatatcattggcagacttttattcattgcgctgccttgcatgatgtattatacccgtttttcttttcttgtcaaacaggattttcggattttgctttaaaataatactttacttttttgcaaaaactttatataattaacatagaatttcagaaacgaaattttattccatttccgtgggtttgcacaacataaaaactttactttcagaaaattttatacaatccaacatattttgaaggaggctcttctcatggacgatcttgaccgcaaaatcctcacccttctggcaaaaaacgcacggatgcccgtcaaagaaattgcggagcaggtgtcgcttaccagcccggcagtctccagccgtatccataagctggaaacggacggcatcatcagcggctataccgtcacactgaaccgtccggcagaccggatgtatgtggatgcgctcatcagcctttcggttgccccctccaagcaggatgcctttctggagctgctgcaaaacagccgcgaggtgctgcaatgctaccacgttaccggtgcgtacacctttctggtcaaggtcagctgcggcagcatggcacagctggagcacctgattttgcagttccagaagctgggcaccaccagcacccagatcatcctgtccaccccggtgaaccacggcgatctggacgctttgatgctgtaagcgagtgttgttcataaaactgttactttttccctgcaattttgcggtgcggtggttcgtatccagaatagcagcccaaaaccggcacacactacctgtaacgtgtgcgcccggctgcaccttccacacacagcactatgaaaggaaatgcaatactatgaaaaaattcatcgccgccctgctggcagggctgaccctgtttactttggtgggctgctccggcggcagcaaggccgacagctccacccccaaggactacgcccagatcatccacgacgcccgcagcgacgaggacaacgagtacgatatgatcttcaccaagggcgaggacggcaagtttaccgccattgacggttacagcgccgagtacgagcccgaccagctgaacgaagagatccgggacatcctgatgcccctgctgaatctggaggacggccagtacaccgcctttgccgccagcatttccagcatgatggtgcgcagctacgccgttgccatcgtgaagcccgccgagggcaagaccaatgaggtaaaggcagcactagaggcctatgttgccagcgagcagcagtccatggagcactatctggaggaccaataccttgttgccaaggccgctaccgtcaccgtagcccccaccggcgaggtggttctggtctgcgccgaggatcacgacaccattctggccaacatcgaaaaggctttggccgcgtaaaaagttttttgaaaccgcactctgtacagggtgcggtttctttttgcggcgggttatgctataataccccttggatccatacatccgcaggagaaaaactatgagcaaagcaaccatcgtcatcccaaatatcaacggcaagggctggctgaaggattccatcgagtccatctacgcccagaccgaacaggactttgacctgatcgtagtggacaacggctccaccgacgaaagtctggaacaagcccgcagctactgcacccgccccaacttcaccctgatcgaaaacggacgcaacaccggcttttcctacgcagtgaatcagggcattgcccgggcacagagcaagtatgtggtgctgttcaacaacgacgcctttgccgagccgcagtggctggccgagcttttgcgcaccgccgatgcggaccccaagatctttgcggtgcagagtttgatgatccggcactttgagcgggaactggccgatgatgctggggactatgtaacatggatgggctttgcctgcaagaccggcgatggccgccgcgccagccgctacacaaagcaaaagcgcatcttctcggcctgcggcggcgcagcactgtaccgcaaaagcattctggatgagatcggcggctttgacgagcacttttttgcctactttgaggacgtagacctgagctggcgcgccaacaatgccggctacaaaaacgtgctctgccccactgccaagtgctaccacatctgcggtgccagcaccggcgctgtgcgctacaacgcctttaaaagccagcagagcggccgcaacagcattctgctgccgctcaaaaacgagccgctgctaatgctggtgctcaactttatccctctggcgctgggctatctgctcaagtgctacaagttccacaagcagggctttggcgaggcctgggacaagggcatgcacgaggcctttgccctgctcaaagcgggcaagctggacaagcgtcctttccgcctgaaagacctgcccaactacatcctgatggagctgtggatgatctggaacatggtgccctacctgtggtatcggctggtggtggtacggtttgatttgaaataaaacgtacaaaaaacacccgactgtgaaagcaaacgcacagtcgggggtttccttttaccttttattctgcggtgctggcggcatcctcagcggcgggggcttctgccacggcgctgtcagcgcccgtttctgcctgcgcttccggctgcacagccgaggcagcagccgaatctgccgcagcagagtctccggcagtggccagaatggcgtcctgcacatcgctttccgccataggctccggctgcgcagcagcggagcttgcggcgctttcgggcttggtctcgctctcggtcaggccggtcagataccagctgccgctctggcgctcgaacaggtaatccatatacttggtgggggtgtccgaggaggggttgatgatgctgtcatctgcgctggcggtggggatatagcccacggtgacgtgcagcttgccgctgcgcttgaacagcttgaccacggtggcgcggtagtagcccaccgtgccggtaatggggattttgtagcactgggtggtctcgtcaaactcgacggtcatatcctccatatcaaagctgcggtgggtcagcttgaagccggggcccagcagctttgccagataggcatccacttccaccgagggcagcagcagctgctcggtctcggggtcggtattgtaattctcaaagccgccctgcgtctcctgaatgctgtacacacagccccacacagctgcctcccgcagggtcaggtcatcgatgttctcaatgccgtcaaatggcatggggtcaaacaataccaagccttccagcttgtcctcgtattcctgcttttgtgcagtatcgtcaaacaggtttgccacaaggcccacaccggcccgcagcaccgtgataaacccgatgagcaccagcaccgtgatcagcagacccaaggtctgccgccagcggcggcgcttgatccgggcgtgttcttccggggtgatcgtatttttcattggtctgagtctcccaaagttttttgtctacccaacagtataccacatccggccgcagagtgcaaaacctgtaccggtggtttttttgtgaaagcaggttttttattcccagtccttccatatttcgggctgatagcccacagtggccttgcggccgttacgcacgatgggggtcttgaacagctgctgattttcaaacagcttatcttctttctgccagtccaccagtgcatccagcagcgcaagggtctgcttgtcctttgctgccggatttaccagcgcttcccagccgcccaaggcgcgcgccacgttatcaaactcgccccggctcatacccttttccttcaggtcgatcatctggaattttatgccgcgctccttgaaatagcgctgcgcctttttggtatcaaagcacttgctcgtgccaaagatctggatattcatcttctctcctcctgccggttcccggcggtcttattgtaccacaccgcaaaccgcttgcataggcataatttgcggcaaaacgggcaatgctttccgcaaaggaggtgtttgcatgaacgcattcgtagaccctgagctgtgcatcggctgcacccagtgcgccgggctgtgccccgccgtgttccgcatggagggagttctggctgtggcagagcccggccccatcccgccggaggaggtgccgcaggccgtcaccgcagcccagagctgcccggtaagcgccatccgcattgaggaataagcccggcatcggtaaggctgctgcacagcttgtgcggcagcttttttgcggcaggacgatttgaaatgccctccgctttgctctgggcataggcagcggaagaacattataaatgatacgattgtcacggcttacgagccgtgacaatcgcatttttacgagagacggcatcacgaaaagcagccacttctcttttttgcgcaaaaagctcccgcgcggtgcggttttgtgctatactataagatgtgagattacgcaacggaggaactgcattatgcgtttactggtcattgacggcaacagcattgccaaccgcgctttttacggcatcaagctgctgaccaccaaggacggacgttacaccaacgccatctatggctttttgaacattctgctctccctgctcaaggagtgccagccggatgaggtggctgtggcttttgatctaaaagcccccaccttccggcataaaatgtacgatggctacaaggccacccgccacgccatgcccgaggagctggcacagcagatgccggtgctcaagcagctgctggcagaccttggctaccgcaccgttaccgccgagggctgggaggcggacgatattctgggtacactggctgctgcctgcgctgcccgcaaggacgactgcttccttgccaccggagaccgggacagcctgcagctggtgagcgagagcaccaccgtgctgcttgctgccaccgtaatggggcgcagcaagaccgtggtgatggacgaggacgccattcaggaaaaatacggccttgcgcctaagcagcttatcgaggtgaagagcctgatgggcgatacctcggataacatccccggcgtgaagggcatcggcgaaaagaccgccctctcgctggtgcagaccttcggctcgctggagggcgtgtaccagaacattgacgacaagcgcatcaaacccaagcagcgggagcacttgttggaagacaagcccatggccgagttgagccacacgctgggcaccatccgcaccgatgcccccatcgacaccgccgagggttcctacaccgtgggcgagggcaacaaacccgccgccgtgcggcttttgcaggagctggagattcactccctgatcccccggttcgggctggacggcgtagcgccggaagccgctgctgaggaagaggctgtggagctgccggaagcagagctcactcccctgcccctgacccccgccgggcattatctggtggctgcccgccccgccgttaccggcaagcagggcacccgcaacgtggtattgcagccggaaagctggtacgccgtgcaggatactaccgtctatccgctggaagatgccgacctagtgcggctgctggacaacgccgatgtgacgctggatgtgttcaactccgcgcccctgtacgccaaggccatggctgccggcggctggggcagcagcatcgtctgggacggcaagctgaccgcctatctgctggacgcctccgcctccaagtaccagattagtgagctgattcccgcctacaaggccgctgccgcctttacctgcaccgattacccggacgccggacggctggccgacctgtttgcccggatgaaggccgagatcaccgcctgcggcgaggatgcgctgtataatgagatcgagttcccgctggcacaggtgctggctgatatgacccgcaccggcgtgctggtggataaggacggcatcgagcagttcggcgtaaagctgcgggaggagctggagcaggtgctgacccgcatccacatggagaccggcagcgccaccttcaatcccaacagccccaaacaactgggcgagatgctgttcgacaccatgggtctgccccacggcaaaaagacccagcgcggctggtctaccgatgccgaaacgctggaaagcctgcgcgagtacccgctggtggaggacgttttgcagtaccgcgcctaccagaaactgaactccacctatgtggagggtctgctcaaggtcattggcaaggacgggcgcatccactccaccttcaaccagaccgaagcccgcaccggacgactctcctccgataatcccaacctgcagaatatccccatccgcaccgagctgggcagtcaactgcgtgcctactttgttgcaaagccgggctgtgtgctggtagatgcggattacagccagatcgagctgcgcatcttggcgcacatcaccggagacgagcacatgcagcaggcctttttgaacggcgaggatatccaccgcagcaccgccgccaagatctacggcatcccgcagagcgaggtgacgccccggctgcgctcctctgccaaggccatcaactttggcatcatgtacggcaagggcgcgtacagcctttccaaggatatcggcgtgaccgtgaaggaggcagacgccttcctcaagaactatctggcggccttccccagcgtgagcggctatatggacaagaccatcgcggacgcaaaggcaaacggctatgtatccaccctgttcggccgccgccgcaccctgccggagctggccagcaccaacttcaacgtgcgcgccagcggcgagcgcatggcccgcaacacccccattcagggcaccgctgcggacgtgatcaagctggccatggtgcgggtgtggaagcgtctgcgggacgaaaaaatggccagccgcctgatcctgaccgtccacgacgaactgatcgtagaggccccggaggcggaggccgagcaggctgcccgcatcctgcgggaggaaatggaaggctgcgtgcagtacgcggtgcccctgagcaccgatgtgcacgcaggcaaaaactggctggaggcacactaaaatgatcattctcggaatcgagtctacctgtgacgaaactgctgctgcactggtggaggacggacggcacctgctgagcaacgtcatctccaccagcgtcaaggaacaggcgctgtacggcggcgttgtgccggagatcgccagccgccgccactgcgagtttatcagtgctacggtcaaaaaggctctgctggacgccggcaagaccatagacgatgtggacgccgtggctgtcacctttgcgccagggctcatcggtgcggtgctggtgggcgtgaattttgccaaggggcttgcctactcagcaggcaagccgctggtgccggtgcaccatctgcggggacacatcgctgcgctctacctgacccacccggagctcaagccgccctttttgtgtctggtggcctccggcgggcacagccacatcgtggaggtgcaggactacacccactaccacattctgggtcataccgtagacgatgctgcgggcgaagcctttgacaaggtggcccgcacactgggtctgccctaccccggcggccccagcgtagccgccgccgcaaagaccggcgaccccaaggcctaccgcctgccggtaccccatgtggagggcaagtacaacgtgagcttttccggcttaaagaccgccgtgctcaacgaggtgaacaaggctcagatgaagggcgaggaagtgaacgtgcccaaccttgccgccagctttcaggagcgcattgcgggcattctggccgaaaaactgctgctggctgctgccgataccggggcaaagcaggtgtgccttgccggcggcgtagccgccaacggccgtctgcgccagctggtaaatgacggtgcccagaagctgggtgcaaaggtttacctgccggagctgaagttctgcggcgacaacggcgcgatgatcgccgcacagggctactaccagtacattgccgggcataccgccgggctggaactgaacggtctgcccaccctgcccatcgactatgaataaatacaacatcggaggtgttcccatgactgagcgtaatcctatcctgcaaagcctgttcgaccgcaagtcggtgcgggtgtatgaagaaaaacccatccctgccgagatgaagcaggccattttggaagctgccgcacaggcgccctctgcgggctgtcagcagctgtataccattttagacatcaccgacccggcactgaaagaagcgctggccgaaagctgtgaccaccagccctttattgccaaagcaccgctggtgctggtgttctgcgccgactgcaaaaagtggtacgacgcctacttagaggccggctgcacgccccgcaccccgggcgtgggcgatttgatgctggcagtcaccgataccgccattgccgcccagaacgccgtagtcgccgccgaaagctttggcatcggctcgtgctacatcggagacatcatggaaaactgcgacacccagcgcagtctgctgcatctgccggactatgtgttcccagcagtaatgctggtgttcggctggcccacccagcagcagaaggaccgcgtaaagccccagcgctgcgccatggagcatatcgtgcacgaaaacggctaccgcaccatggacggcgcagagctgcgggatacctttggctacaaggctggcaacaccccctttgaccagtggtgcaccgccttctgcaaccgcaagtataactccgatttctccaaggagatgacccgctcggtggaggagtacctgaaccagttccggtaatctgaaccgcaaattacagcaacaaaaagcggcagctgcacggtgttttgtgcagctgccgcttttctcgtttatctttggttttccgcaaacagtgcgcccagttccggcaggatatcatgcggcagcatcccgtactcgccgcgctttgcggcggcgcggtcggcggcggcaccgtgcaggtataccgcacaggcagcagcttggtaggcgggcagaccgcaggccagcagcgccgcaagcatcccagccagtacatccccgctgccgccccgggcaagtcccgggttgccggtggggttcacacacacccgcccgtccgggcttgccaccacagtgcgtgcgcccttcagcaccaccacggcgttccacgccttggcatagcgcagggcgatgccctcccggtcggcggcaagcgctgccgccggaagcccggtcagccgcgccatctcgccggggtgcggggtaactaccagttctcccgccgggtgcggaaagggcttgccctcggtcagcagctgcgcggcggcgttcaaaccatctgcgtccaacaccgcagcccccgcaaagccgggcagcagctgctgcaccagcgtgcgggtctcggtggcccgggcggcgctttgcgctgtgccgccaaggccggggcccagcagcagcacggtggccttctgccgccggagcagcggcacattttccggcgcaatgccacactgtgcgccctctttacaggggcacaggcagcactccggcaggcgggtgacagcagcgctgaccaccggctccacactggcaagggtaacgatgcccgccccggtgcgcagtgcaccctcggctgccagcagcgcagcgccccggtaaaaggcactgcccgccaccgccagcacactgccaaaggtgcccttatggctgtcccgggcacggcgcgggatgctttgccagacaaattcttcggtaatttccacagccatgggcgcacctccagagaacgatttcaaatgccctctgcgttgctgtgggcatttttagcggaatcattattttaagattgtcggtttggaaaatctgcggattttccaaaccgactttttcacaagagaggaattttttcgggataacttttacgcctgtccctgcacaagggcacggatctgcttttccacgttctgcacttcctcgtggaacatccgggcggacacgcgcagtgcgccgtggccaaggatgatgacctgctccataccgtccgaggtcgccacacggacgcggcggctcttgccgatctcatgggtgacccgctcgatgaacatatcggcggtctcggcctccttggtatagaccacatggatgttgtggtactgctcgatggcgccggggctgccgggcacgcggtaggcatcgaacaccagaatgagcacgcatttctggtagccctgatagttgcacaggatgtccatcagcttgcggcgggcggcgtccaagctttccttcgccaacgcgttcaactcgtcccacgcaaagatgatgttgtagccgtccaccagcagatactccggggcaatttcccactgctctgcggcaaaatccgggcgttcggtcttttgcaccgggcggaacgccgccagcgggtcccgcttgatagggccataggtgcgctcaaagatcttgagcagttcggcgtcctcctccagcgtggcgcggtaggccatggcgcggcgctggggcgcagcctgcacctccgggcgggcgggctttgccttgccccagccgctttcaacgtgcatatggctgcgcacctcgctccacggcaccacaaagcccgcaccatgggcgcagaacacggaatctgcggggttgtccagatcatgctccggctggtagccggtttctgcaatgacctcctgtgcattgtgacaggggcggtaaccgtccagtgtcaggctcaaatgtcccctgccccgggtgtagctgaccacctccatggggtagctgcgcatggtggataccggcgcaaagccggtcagggtggcagtctccgcgccgctttccggcgggtcaaagctgccctccatgcgctggatatcgctcatggcgcggccgatgttctccaccggcacctccagccggaaggcataccacggctctagcagctggcttttggccagcatcagtccctgccgcacggcgcggtaggtagcctgccggaaatcgccgccctcggtgtgcttgaggtgcgctttgccggcaagcagggtgatttttacatcggtcagcggtgcgccggtcaaaacgccaaggtgctgcttttcttccagatgggtcaacaccagacgctgccagtttttgtccagaacctcttcccggcagtcggcggcaaactgcatcccgctgccccggggcagcggttccagcagcagatgcacctcggcatagtggcgcagcggctcgtaatggcctacgccctccatgggctcggtgatggtctccttatacaaaatgccgcccgggccaaaggatacttccagcccgaaccgctctgccagcaggctgcgcagcacttccagctgcacctcgcccatcagctgcacatggatctcgcccaagctttcgttccacaccacatggagctggggctcttcctcttccagccggtgcagcttgcctagcgcggcgtgcacatccgcaccctccggcagcagcacctgatagctgagcaccggctccagcaccggcacatcgctgtcccgctctgccccaagcccggtgccgggctttgcatgggtcaggccggtcacggcgcatacctgtcccgggccgatagcctcggtcagggtatactttgcgccggagtacagccgcagctggttcgctttttctgcccacggctcaccgtctgcttcgccggagagcagagcctttaccttcagctccccgccggtgacccgcagccatgtcaggcggatgccctgctcgtcctgtgataccttgaacacccttgcaccaaaggcgtgcagcgccggggcggggcgggtgtagcggtccagcccgtccagaagtgcatccaccccgtccagccgcagcgccgccccgaaccagcacggaaaaacgtgccgccgggcaactgcggggataatgtctgcatcggtcaaggttcccgcgtccagcattttctccatcagctgctcattgcacagcgccagtgcttcgttgcgggcggcaggctctgcgccaaaatccacaaagccctcgccaaggcggcggttcagctgggtaagcagctgctcccgggtcatgccgggcaggtccattttgttcacgaatacaaaggtgggcacatggtagcgccgcaacagccgccacagcgtttcggtatggctttgcacgccgtccgttccgctgaccaccagcacggcgtaatccagcacctgcaaggtgcgctcagtctcggtggaaaaatccacatggccgggggtgtccagcagggtgatggcggtattgcccgccgtaagcagcgcctgcttggaaaagatggtgatgccgcgcgctttttccaagctgtcggtatccagaaaggcatctccgtggtctacccgtcccagcttgcggatagcacctgcgcggtagagcatggcctcggagagggtagtcttgccggagtccacatgggccagaatgcccagtacgatctgtttttgcgttgtttccatgcactgctcctataagccgttttataagcatcgcacccgcttataaaacggcttctaaaaataatttcctgtttattgtaacacgctttgcggggaaaagaaagttttcgggcgcaaatcccacaggcaaaaagcagcaccggacagaaagtggtctgcccggtgcaattttcttaaaaaagatccagcatattgtccagatagattgcctcccgcacctgcagctggtattccggctttgtcatatagtaaagcagaaattccagcaccagtgcgctgccaagccccctgccctctatcttgaactgggaaaaacctgcgggcaggtaccgctgccggatgtcatccgtcccgataaacccggggctgcgcatcgccttggaaaagcggtagccctcggcggcatccggggcggcgcagtggtggtccgggcagtcctcgcccagattctggcggctgaccgtctcgtagcagcgcttgcgctcggtgcagccgaaccagcagcactcattgcacaaaaattccaccttcgccttttgctccggcggcagggtgcgcagctgttccagtgccgggttcagccggaaatccggcaccacataccggaactgcggcttttccagctcctgccgcagctccgcaaactccgtgagcaccttggtggtggaggataccagatacagctccggccagcgctgccgcagatagtccgccagcaggtcagaatggacgatcacgccgtttggcacactgccgctttttgcaaactggtcacacagggcgttgcactgcgggtcggcaaggtgctcagcccgcagcagggagttactgaaggtcagccgcccggagataccgtattcccgcagcagcgccagcacctcgtgcgccgctgccccgccgcaggagatgcgtcccccgccccagatgcagcctgccggagcgccgtagatggagccgatggtgcaccaatcgtaaaaatattcccggtgctcccggtacagcggcaaaaagcggcggtacagctcgtaaaactcgaacaggccgggtagatgataacaggcagctgcgggcttttccatagcggttcctttcctgcaaaaagggagctgctgcgtaaaaatgccgtgcagcggctcccctgtttttatcgtatttgcttttgttacacggtagcgccgacctgaggggcgccgcctgcgagctgctctgccgtaagcggctgggcttctgcgggggcgttcagccgctccttggccacagccagcatcagcttgatgcggttttcctgattgacccgggtggcgctggggtcgtagtcgatgggggtgatgttggcgctggggtacagcgcacggatcttgttcaccatgcccttgcccacgatatggttgggcaggcagccaaagggctgcgcacacacgatgttgccgtagccgccctgcaccagctcgatcatttcggcggtcagcagccagccctcacccatttttgcgcccagcgagatgacccccttgggcttttccaccagctccttgaaggggcccggcgcatagaacccggcgtccttctctgccttgagcatgacacgctccacgctgtccaaccagttgaggaactggtcggtgcctacctttacagccagcttgccgccgtaaagcacatgatcctcgcccatgttgaaggcgcagtactgcacaaagcccatcagaccggggaagttcacctcgcagtcctgactttccaggaatttttgcagttcattgttgcccagcgggctgtacttgacgtagatctcgcccacaacacccaccttgaccttgggcacccgggtgaccgggatagtggcaaattcctttgcgatgagcgggaaagtgtgcttcatttcccgggaagtaaagccttttccggccagcaaggcacggcccagacgggcgatccagcggtccatcatgcggtcagcagcacccttttcgttctcgtagggggctacctgattgcgcagcgcacacagcatatcgccgtagaagatgcaggcgatacacttgcgcgccagcgggagggtcatctggaagccgctgtccttttccagaccggaaaagttcaggcttgccaccgggatctgcgggtaaccggccttgaccagcgccttgcgcagcagatggatgtagttggaggcacggcagccgccgccggtctgggtgatcagcaaggcagtgtgctccagatcatacttgccgctgttcagcgcatccagaaactggccgatgaccagcagcgccgggtagcaggtatcgttgtggacatacttcagccccagctgtgccacggcactgccgcagttgcccagcagctcacacttatagccttcgcagcgcagtgcgtactccataagccggaactgggtaacggccatgttggggatgaggatggtgtgggtctttttcatctccggggtaaatttgggataatgatattccataggttcctcctatgttactctaaacaagatagtccccgcaaaagcttcccccgccgggggaagcccttcagcctatcttttattctgacttttctgcggcggcctcgtcccgctcgtccagtgcggcaaacaggctgcgcagacggatgttcacggcaccgaggtttgtgatctcgtcgatcttcagctgggtgtacagtttgttgccccgctgcaaaatctcgcgggtctcgtcggtggtaatggcatccacgccgcagccgaaggacaccagctgcaccagatccatatccttctgggtggtgcagtacttggcggcagcgtacaggcggctgtggtaggtccactggttcagcacactggtggggaacttctgcacccggttggagatgctgtcctcggtgaccaccgcagccccgtggcgggtgatcaggtggtcgatgccgtggttgacctccgggtctacatggtaggggcggcctgccagcacgatgatgcgcttaccctgacggcgcgcctcgtcaatgatctcactgccctttacccggatctttgccatgtgcgcttcgtactccgcgtaggcagcatcggctgcggcctgcacctcccgctcggagatgccgccaaagtacttgggcagcacctcctttgccatcttgtgcacaaaatccttgggacggtggatgcccacataatcatagatgaactttttgccttccagctccgggcagttgcctgccaaaacctccgggtagtaggccaccaccgggcaattataatggttgtcgcccaagccctcgtccacgttgtaggtcaggcaggggtagaagatggcgtccagctgcatctggctcagcgccttgatgtggccgtggctcagctttgccgggaagcaggcggtatcgctggggatggtagcctgtccggccagatacagcccgcgggtggacaccgggctggtgtgcaccgcaaagccaaggctcgtccagaaggcgtaccagaagggcagcagttcgtaaaagcccagacacagcggaataccgatagagccgcgcttgccgggcacaggcttgtagctggccagcagctgctgcttgtaggcgtacaggttcaggctgttatcctcacttttgccggtaacgggcttatcgcagcggttgccggagatgaacttgcggccatcggcaaaggtgttgacggtcagctggcaatggttgccgcagccgccgcacttgacgctgaccacctgctgtgcaaatttttccagttcctgctcgtccatcatggcagaggtggtctggttgtttttatggctctggcgcaggccgtacaaggcagcgccgtaagcgcccatcagaccggcaatgtccggccggatgacctccacgcccatctctttttcaaaggcgcggagcacggcttcattataaaaggtaccgccctgcaccacgatcttgcggcccagctcttccgggctggaagcgcggatcaccttgtacagcgcgttcttgaccacgctgatggacaggcctgcggaaatattctcgatgctggcgccatccttctgcgcctgcttgaccgagctgttcatgaacacggtgcagcggctgcccaagtccaccgggcggtctgcgaacagacccagtgcagcaaacttcttgacgtcgtagcccagcgcctgcgcaaaggtctgcaaaaagctgccgcagccggaggaacaggcttcgttcaggaagatgttgctgatggcaccatcctcgatcttgaagcacttcatgtcctgcccgccgatgtcaataatgaagtccacgtccggcataaagtacttggcagcggtaaaatgtgccaccgtttccaccagaccgtaatcacagcggaaagcgtttttcaccaattcctcgccgtagccggtggtggtgacgctggccacctgcagccccgggtgctccttgtaaatcttgagcagctgctctcggatgaggggcagcgggttgccaaggttgggctgatagttggtgtacaaaatctggctcttttcgtccaccaccaccagcttgacggtggtagaaccggagtcgatgccgatatgcaccggcccgcagtgggcactaaaagccacgcggggcacactgtgagacatgtgccgtgcgtggaaagcctcgtactcctccttgctggcgaacagcggcggctcgctggcataggtagcagtggcggcgtacttgtccagcgcagcggccacctcggtgagcacaaactccttgtcggcatacagagccgcgcccagcgccacatacagcaggctgttttccgggcaggtgccggtcacgttcagcgcttcgtcaaagctcttgcgcagcacggtgctgaaggtgagcgggccgcccagatagaggatattacccttgatggggcggccctgtgccagaccggcgatggtctggttgaccacggccttatagatgctggcggcgatatcctcggtgcgggcaccctgattgatcagcggctgcacgtcactttttgcaaacacgccgcagcgggaagcgatggtataggtgcgctgcgcctgctcggcagccttgttcatttcctcggcgctcatcttcagcagggtagccatctggtcgatgaaagcaccggtgccgccggcacagctgccgttcatgcgcacctcggtgccgttggtcaaaaacaggatcttggcatcctcgccgcccagctcaatgacacaatcagtctttggcataaagcgcttgaccgccacgcgggtggagaatacctcctgcacaaagggcacaccgcagctgtcggccaagcccataccggcagagccggagatgctgagcagcgccttgcggccatgcagatgctcggcatcaatgcgccgcagcagctcctgcgccttttccagaatatgactataatgtcgttcgtatgtagaatacagcagttcatcatgctcgcccagcaccacgcacttgatggtggtgctaccgatgtcaagacctactctcaccttgtttttcctcctaaggacaaataaccggaacataacgccccggctgctatggcaaacaagccgtttgcgacaaagacccgcaacggcgttttttctttttagcttcccgcattgcgcatctacgtcattttcaaacagtacgcgttataaaaaacacagcaaatgcgcttttgcatacattattattataatccaatcgcgggcggcattcaatccatgttgtctattttacacgaaaaaaatagtattttttgctcaaaaggctgaactttttgtgaacatgtgtcggttttcccgcaaaaaaagccgccgcacagcgctttgtgcagcggccttataccggcggaacgatttcgaatggctccgcatgcgctttggctattttcagcggaagttcctctctacgccccacgcgtaaaaatgtttttggagtgctccattctccttaccggttcacgaaattcagcaccagaaccagcagcagcatgtgcacggggtaaaaggcgtagcaggcatactggaaaggcttgctgtggtagccctgccgaccgcggtacagccagatgggcaccagtgccagcagcgccagcccctgctggcaaagctcaaagtccatgccgaagagctgaatggggtacataagcccgcccagcagctccacgttgacccagtacagcgctgccagctgccccagcagacaccaccacttgcgcccgtgcccgtgaaaaaagtagaagatgaacacagtcagcacccctgcaccgtagtagtccaccatgcccagcgtgcccagcaccgcgcccgccaccaccacaagggcggataccagcaggtacagtcctgttttttgctttttgcgcaccgtttccatcaagtggatgcccagaatgcccaaaagcagcgtccagatgacgttctggtgcaccgggtagaaccatgtaccgccgtacatcaaatcgaagggcacttccgaaagcagggcaaacaacagcagacgcagggtgtattttttcaggtcgtgggtgtggaagtagccctccaccgccataaaggcaaagatgggaaacgccacccgcccggcacaggtcagccattcctgcgcgggcagcaacgtcgcccacaggtggtccatcagcatcagcgccatagcaaggatatgaagcgccgctgcgctcaggtcaaagcgggtcgcggcagtggaatcgatcggtttggttgacatgatcctacctcgtttttgtcgaaatttggtcgttctgtctggaatacgaacgagccccgcaaagaattgcagccccggtagttcttttcccgccggggccggcttgctgctttattttttctgctgcgaacaccctagcaacaaaaaggtagcgccaaggcagcgccataccactgccgtagcgtgatcccctccggtaacaaagttcagcgccgcagcaagaaaaaacagcagcccgatgagataaaacagcttacaccttttcatagctcatacctccggttttggttttccaccggctattttggatacggcaagcgcagggacggctgccattttttgtgtgcacaggggcgcaaagcgcccgcccggcacgcagaaggtgtgcgcccgcaaaatctgcgggcaaaattcatgaagggtggcttgcctgcctgcccatggagacgtaagcgcaaaagcaggaatgcgggaaaaagcaagggacggtttcggcgaaaaagcgtctggcggtggcggaaaagccgaacgcaagattttttcatactagctggctcgtaaggtgagccgtaccaaaacttccttgcggaaatatgcagcgttatagttcatctgcacctgaaccggcagctgtgcacccggcgcttgccgcgcccaaaatagtcggtggaacgtttatttagttttggacattttccagataggtctcaaatgcctcggcaaagctggcgttcacatcaaaggggacagtgtagtccaccttggaggtcacaaggcagaggtccagccgattggaggtctcgtctgcctgccggttcagcttgctcagcgccgcatggatgaccttgcggtcgtagttgatggtggtcacccgcttcacatcgcagcagtaggagatctggtttccctcggcgttgaaacggtagccggtgcccccgccggagagcagctgctcagagctgcgcaggtcgttcatccgtttgaaggtacgggcaatgctctgccgcgcggcattcaggctgacctcgctgtccatatccatgtccagtgcatcctttgccttgcggatggcagcaaacaggcggctcttctcctccatcagatagagcatgaaccgggcaacgtcggtgatctgctctgcatattcggtctgtgctacgtccataacggtctcgtcctcagcctcgggcatcaccttatggcgcagataggtgttggccaccttggtcacgttggcatcgcaatccagaatgccctgcgcctcgtccagcagggactggagcttgttctggtagcggaatgcttccttcaggttcatagtcgttccctccatcttgttttttctgctttcagcttaccacagactgcccgcccgcgcaagccttccggtaaaatgagcaaaacgcccgccccggtcatgccggggcgggcgttttgcatttgctgtgacacttattgggataagagattggcattactcagccggccacacgctcggtgcggcctgcctccagcatatagcgcaggaagccggtcacgtcggcagggtcggtcacggtgaggtcaaagcccttttggggggcagtgtccatcatctgcagcatggagcgtgcggtagtgtcctttttcaggtcgcaggtcttaccgttgtccagatgcagcagcacgctgccgtggctggcagaaagctggttcatgaaacgttccttatcaaaatactcgatccgaagcataggaatacctccttgatgaaatggtttatgttacacttgccgtccagtcctctttggacagacagcgggagaatagcggttttgcccggcagtggaaacgcttgcacagcttgcgtcccggctgccttggtgctatactgagcttggaagctctgataggataataccacaaaacaatcgaaaattatagaacagaaccgcatagtatatgcaacaaaaccggcattgacaaaaaacattcaaagtattgcggaaaggaattggtgaatatggcatatcagacaagctgtgcatcctataccagcggccgggtggggctgtccagcgctactgccgtggtggccgatgccgccgggcgggagcagacccagcacggcagcccgctgttccctattgcctgctatgccgaggatctttcctgtttttcggtggcgtggcactggcacgaggaatttgagttcattctggcggcgttggggcccatccatgtggacgtgaacaagacccggctgactttgcagaccgggcagggggtgttcatcaactccggggcgctgcacgcggtagagcctgccgagggcagggcgctgctgcactccggcgtgttccagccacggcttgtcggcggcatggacaccgtattctggcaaaaactcatccgcccgctcttgcagcccggcacaccgcccttctttttgctggacgaggccgtgccatggcagcggcaggtgctgctctgcctgcgggaggcgtggaagggcgtggcggacgagccctttgactacgagaaccgggtgcgttaccaccttactgccgccctgcggctgctcattacccaatgcgtcagcggcaaagtaaaggtatcggagcaggagcagatcgcctcggagcggatgaagcagatgctgcgctatgtagaggagcactacgccgaggagctgaccgtggaaaaactggccgactgcgttgccctgagcgaaagtgcctgtctgcgcagtttccggcagtttctgggtatcacgcccatccagtacgtcaagcagttccgggtggaaaaagccgccgagctgctgcgctccacccggctcaagaccggcgaggtggggctggaatgcggtttttccgatgccagctactttatcaagaccttccgggagatcaagcactgcaccccccgggagtaccgtatccgcttctgctgagcaaaaagtaaaaaatgccgggcagctacaggctgcccggcattgcattataaaatttccccctgccagcgctccggcgggatgaccggctcggtgacaaaggcctcggggttcggagcaagaacatggcgggtgacccggaaaagcccctcggcgtcgcacaggatacactttgcatcgccaaattttgtattccgggctgcgccgcagtccagatatgcctgttccagcttgacgaaatcctccgagatgtgcggctgctgtgcgttgtagtggcggcgcatatagacggtgtgctgcgccccggcttcgtccaccacggtcatctgcaggggcttgtcggtcaggcggttcggcacgttcagtacctcctccacgctatggataaaggtgttgcgggcgtgggtgacccccagcagcagcactttgccgtgggctgcccgcagccggtcgtagcagccgccgggagtgcagggggtgttggcgtccagctctccttccagatacgcagccgcccccttgccgtaagccgccatgctgtgggtggggtgtagcgagcgcaccaccccggggcgctgccggaacagctccggcagaatgcccacacagcacgggctgcggcgcacatcgaacacccggttttcctcgttgatgaaccgccatgtgtgggtgggcagcagcagcaagccctccgcaaaaaactccatcaatgcgtccagaaccgtgtctgcgccgccctccaccgggccgatggacttcatggaggaatggatcaggatggtctcgttgcctgtcagccccattgctgcaaggtcgtgcttgaggtcagcctttgtatatgccatgtcgtttctcctttttgggcattttgtctgtacccagtttaccgccttttgtgcggcaaagcaagcacgcacgcaaaaaaggcaaacaccctgttgtatttgccggagacgagccggtatctgcggggtgtgtgcccttgcagcttttttagtaaaatcctgtatacagcatatcatctcgcagcgttaccgcgaaacaagcacagcgccttgcaattatagcaatttgacagttgtttcctgttttctttgtgcatttggtacaacagtcacttgattgcagcattttatcagcacttttcccgcattgcaaagtggtatatcagtttttcagtttcaggaacagttccgtgcgcgagtgcgcattcttgtatacaagtattcaaatcaagttccattccagcattgacattcagttgctgtaacggtacaatgatactaagattacatttaccggataaatggagaacaactatggctacattacagcacactgatgagctctatcatattctcgaggacgagatctgcgcgttgaagatcctgcccggggaagcgctgagcgaaaaccagctgtgcaagcggttcggcgtttcgcgcactcctatccgcagcgttttgcagcggctggagcagaaccgctttgtgcagatcattccctgcaagggcaccattgttaccgccatcgacaccggcgtggtggaccagctcatcttccagcgtgttgcagtggagggcatggtgttccgggattttgtgcagagctgctcgcccatggagattcttgcggtagaacacctttataatatgctgctggaagccgctgcggggcgcagcgacccggagaactttgatttcaaccacttcctcagctgcgaccttgccatgcacgagtactggttccacaagaccagcaaggagtacctttgggagcagatgacccgcccgcaggcagactactcccgctttatccgtctggacatcgtgggtgcacgcaacgtgtccagcgtcgtcagcgagcacgccgagatgctgcgcatcctgcgtgagaaggatctggacgccatcgagccgctgatgcgcacccacctgtacggcggtgtgagccgtatgggcagcaagatctactcggacgaataccgcggctacttcaagctgccggagaacaaaaaataaagaaggccgccgcacaggaaactgtgcagcggccttcttctggttgcgccagcaggagtcgaacctacgatgggggagtcaaagtcccctgccttaccgcttggcgatggcgcatcatgcaaaacagtatagcatattttccgctgttccacaagaggtgcgccgcatttttgcagctttttctgtgcgctgtctgccgcatttgcggcggtttgggtcggtttttgggctttgcggccggggccctgcgttttccatatccttccatgtttttacgaaaggcaagttttgcgggatgcgtttttcaaaaaacacagtccgcagggggcacaagattcatattgcaaaggtgagatttattttttcctgatttttcttattattttctcaaaagactgtattttttgttgcggttctggtacactggatgtgataaaaataagttgaagaaactacgccgatgtccgggctgtccccgggcggggcagtgtctccatctttgtgaaggaaagcgaggggtctcatgaaaaaattcctgaaaacgctggtggtcgggctttgcctgttcacgctgctgtgctgcgcactgccggctgcatttgctgccgacaaaacttcagggagcaaaaaggaagagaacgtgtacgccattggtatggatgcccagggcggcatctgctccaccgtggtaacctacacgaacctgtccggcaaactggagagcacgcccgagcagcctaccatgacgggctacacctttgatggctggtacaccgagccggtgggcggcagcaaggtgaccacctccaccgtgttcacctccgacgccaccatctacgcccactggactgccaaggccggtacttctaccgtgccgcagcccaccacccagcctgccgccacccagtggcaaaagtatgtaggccctgcccttgtggccggtgccctgcttactaccctgctggtcgccaccatgttctgaacactgctgtaaacacaatgacaccattgaagaaagggatcttaccatgactacttctaccatgaaaatgcccgccagctattccgctatcgaagccgaggagatgacctatctggacggcggcgccagcaacgcttatcagtccttcctggacatcggcaaggtgttcaactacattgcccgcatcttctccggtgcaagctccatcatcaacaacgttaacgtcatctaccagtcttttgtatcgctgaacagcctgctgggcagcttcggcaagtaaaagcatcaccccaaagttcagatccgggagccgcgcttttttcgaaaagtgcggctcccgtttttcgtacacgctgtaattcagtgcattactgcgcagcacttcacgttccagaattgtgaacaaactttttaagcttttggggggtcagtggccgttttttgggctttttctatataaaaagcaaaaaaatgcgatattttttgggctttatctcttgattttgtgtctgatttgttatattgttgttacatggaatgtgctaaactaagatagtttataaaaggtctctcccgctgcgcaaattgcgtggcaacaagtgaattatcaggcatttcctttaagttgtttcggtattttcgaaataattttcgttatctttacattcgggagtttgtacgcaaatggcagatcgtgaactgcggcggatgcaccgcgctgaactgatagagatcatctatgcgctgaagcagagcgaggaccagctcaaggcgcagaacgccgcgcttaccgcgcagctgcaggaccggcagctccggctggaaagcgccggttccatcgcgcaggccgcgctggagctgaacaacgtgttcgccgccgcgcaggccgccgccgatgactatctgcactcggtgcaggccagtcttgcggacaccaacgccaccgccgccaataccctttcgcaggcgcgcagcgaggccaagcgcattctggagcaggcacaggcagacgccgacagcctgaaagcgcaggcgcagcaggaatgcgacgccatgaccgccgccgccgcgcaaaaacgcacccagaccgaggccgactgcaaggccatggtagagcgcgccgagcaggaggtgcagcagcgctggcaggcatttgaccacaaggccaacaagctgctggatcaataccgcagcactgacggtctgccttcggaggaaacatgaaaaaacgcgatatccggttcgcttccatcccttccaccgaggaagtggccgcagaacgtgagcgtcttgcgtaccagagccgctaccagcgggtgctgcgcagtacgatctatattttggtggtggtggccgcagcagccgtgctgctggctacgctgtttctgccggtgcttcaggtctccggcgacagcatgtaccctacattaaatgataaagacattatcctgctggtaaaatccaaccacattgaaaacggtgagttatgcgggttttactggcagaacaagctgctgctcaagcgcatcatcgggcagcccggtgatgtgatcgatatggacgtgaacggcgtagtctcggtaaacggcgtggcgctggacgaaccctatgtggacgcgctgaccgtgggcgaatgcgacatccggttcccctatcaggtgccggaaaaccgctacttcgtgctgggcgaccaccgtgccacctctatcgacagccgcagcagcgtgataggctgcgttgaaaaaagccagatcgtgggcagggttttcctgcggatatggcccttgtccagtttctcgttgatccattgaccccgggaggaggtatttcgttatgaacgacattcttaaaacgtacatggagcggttccgtgagaaccggcacaccctgcggcgctacaccgcatttgtgctggcacttgccatgatcaccaccctgttcgtcaactggcagctgcatggcgtgggcatctcgatgaccgcgcagtaccagtgcggcgaggaggagcacacccacaccgcggattgctacaccaaggtgctcacctgcggttacgaggaaggcgagcttgaaaatgcggacgaggtggccgccgctgctgcgaccagccagcccaccgttgaggctgagcccgcgccgctggcactggagccgcagatcgagtttgtgccccacgagcacaccgaggactgctacaccgaggtgcagactctgacctgcatggaggaagagcacgtccacggtgacgactgcttcgaccccgaggatggcagcctgatctgcgacaaatttgagcatacccacgacgaaagttgctataccaccgagtacgagctgacctgtggactggaagagggcgagcttgtggagcaagtggtggagcccacccagagcgccgagctggcggctatggctgtggccgagcctgtggcactggagccgacggtggacaccgtggagcccatctaccaccaccacactgacgcctgctacgaggaagtgcttacctgccccctgccggagcatcaccacaccgtagcctgcctgagcgacacttctgccgaccttgagacccccgaagagtggcaggccgccaacgccgaggccgtgatgaccggcaactgggacgaggacctgctcagcgtggcaaagacccagctgggctacgagcagagcgagaaaaactttgagatcgaccccgcggacggcgtgaccctgcactactactcccgctacggccagtcttacggcaacccctacggcgagtgggacgtgatgttcctctcctactgcctgaagtacgccggtatcccccagagcgccatcccgcaggaggccagcgtgcttgccctgcgcagctccatgagcgacatggactggctactggacggcgaggacggcagcgccgccaatgtgggcgacatcgttatttataataagtacgtcacccgcaccgtggctgtggacagcagcgccgatggtgcagcggacgatctggacgaccagttcagcatggacgctgagggtgagaacggcgcagagcttgaggaatccggcgctgctgcgctggataccgcccccgccgccgaggacgcccccactgccgacagcgtgatcacccccgatctccccgataccgccaacccggagcagcccgccgcaaagccggtggacagcaccggcacctctgcatccggcgcggacacccttatccccagcgtggtgtcccccgctgccgagccgcagaccaccaccgtgactgacgctcagcccgtggagaccgtgggcatcgtgagcgaggcggacgatgacaccctgaccgttatttccggcgatgtggacggcaaggtggctgaggttaccctttccagcgccgaggtactggccgtggtggatgttgcctatgcccagtacgcagacgagatgctctcctctgccgttgacggcgccctgtattcgcccatgatgctttcgctgacgggtgagcccacgaccgtaagcaccacgaccgttggctctgccttggacggtactaattatgttactgatttcaagattcagaagcagcagggcagccaatacgttgatgttgccaccagcgttgtcactgaccaaatgcacggctaccttgaactgaaggatattccggctcaggacattgcaagccatgactacaaggttaaagtagctttgccggaggcttttgacttgcagagcgttgcttcggaaactggcgacttgatcgatccgaactataccggtccaaagggcagcgtttgtggcacctaccagtttgtaaaggaaaacggtaagtggtacgtcctgttcacctatgaccgtgattttattcatcaggatcaggtgtcgaataccaccaaggtcagaagtacagtcaactttgatttccggtgggaccaaaccaaggtcacgaccggcgggagcaatgagtttaaggtcaacgaaaaagcaaaggtcaccatttatattaagcgcgaagaaagcaccacgcccggcgaggaaaagaaattcagtctggataaacaatctgccgggcttaagtacgacggcaagaatgcttacgttgattacactgtaaaacttaccctgaaggaggacagagcagcccccctgacgctgaccgatacactcacaaatccgtccggggtcaccttcgactatgttgacaccttcctccaagttactggcccggatggttctgcgcccgacatttcttgggcagataccacaggtagtacgggcaaaatgatcaccttgggcactagtggtcagaccctgaaaaagggcacctataccatcacttaccgcgtcaaggctgataattttggcagcacaagttacaacggggacgatttaaaaaactttatcaaatttggtgatgatgtagaaggtacttccacctctatcaaaacaaaggatattgaaaaatcgggcaagctcagcaaagacggcgagatcatcacatggactgtcaagatcaacaacggtgacgtcatgcgttatctgcctgctaacgctaaatttaccgatacgatcgacacaaatcaggaatttgttgccaattctttcaaggtcaaaaagaccgatgcagacggcaatgagaccaagaccaaaccaacagatgtctacaacagtacagaccacaaactcacctacaaccttgagccaggcttcaacaagtatgagatcacctaccagacaagggtcacaaaagctatccctctgaccggtctggatgtcaaaaacaccggcaatctggagggcggtgggctggacagcagctctgaaggcactgtccacatcgactcagatgttcttaccaaagaggcagttggtgagccgactaataatggtacagaggccaccatgaagtgggtcagtatcatcaactcgacagctgtcagtgactatatttactacgattacagtaacgcggtgcaggatgcagacggtaaaaaccgcaaggcgcagacc

SEQ ID NO: 13733 - DNA, 3068 bp, Unknown
  gut microbiota DNA sequence
aaaagctgtaccggtggcacagcaacctgcaccgccaaagcggtctgtgaggcgtgtggtggggaatacggcgaaaaagactccaataaccatgatttagtgcgtcacgaggcgcaagcccccacctgtacgggaatcggctgggatgcttacgacacctgctcccgctgcaactacaccacctatgcggagcagcccgcgctgaatcatgatttggagcagcacgcagcaaaagcgcccacctgtacggaaaagggctggaacgcctacgaaacctgttcccgctgcgattataccacccgcaaagagctgcccgcactgaaccatgattatcaggctgttaccgtagagcctacctgtgaaacagacggctatactgtttttacctgctcccgctgcaaagacagctacaccgcagacccgaccgataagctgggacaccagttcggtgcatggtccccgaacgaaaccggctctcagagcgccgattgtctgcggcagggctgcgcgcacactggcagcacggattgccggaagtttactttccgcactgcggaaggcgaaacgctgaccttctgccccgtgtgcgggcaggcagaaaacgccgcgcagctggaaatgatcgaagccgcaacggcgtgggctaacagcggcagtctttctgcggaggatgtgaccgcacggacgaacggggaatacctgagtgtggcctttgaaaccgcaggcagcctgacgcagcccaccggtcgggtaaggctcgcgctgcccgccggattgctggaaggcaaaaagcttgtgcgcattgccccggacggcacacagacggagatgccgtttgaaacagagcgcggaaagctcatctatacgctggattttgcaaacagcgagctgcccgtaatgctcttccggctggtaccccagaccgccgccctctgaatgcttttacagcgcgcaaacaataaaccataaaatgcccgcccaccgtggttttccacaggtgggcgggcattcttttgtgcccttttgggcataaaaatacccccggaggatgcagcgttttttacgctgtctactctgggggcaggatagcaagcgctgcgcggcagctcccggaagcggacactgtattgctgaaaaagcacttcctagcgctgctcctccggcgggcagcagctctcccgcgggataagcttatgcggcacgatgatctttgtggccagaaggttcgggttctcgatgtggttgatggtctggctggcagcctccatgcccagctggtaggggttgacgtccacggtggtcagctgtgggctgccctgccctttgttgcggagtgccccttggcaaaccggacgggattgcgctataatagagccgtaacagttccacaaaggtgtggtaagggaggtgcggtcatgatccgggtggcgatcgtagaggacgacgcggaggtgcagggagtattgcaggagtatgtccggcggtatacccggcagtacgggacagagtttgaagtgacggtctttgcggacggcgtggatattctggaggattaccgcgcggtctacgatattatttttctggatgtggagatgaagcatctggacggcatgaccacggcagagcgcatccggcagatggatgccgaggtgatcctgatcttcatcaccaatatggcgcagtacgccatccggggctactcggtgggggcgctggactatgtgctgaagccggtgccctactttgccttttcgcagcagctgctcaaggccgttgcccggctggaaaagcgggcaaagcactacctgaccgtgccggtggagggcgggctgcgccgtctggacaccgcaagcatctattatctggaaagcgaggggcaccgggtgcacttttacaccgacgagggcgatttttctgcccccggcgccctcaaggcctttgaggaaaagctggcagactgcccctttgcccggtgcaacagcggctaccttgtcaatctggcacaggtgcgggagctgcggcagagcaccgtacaggtgggcccctgcgagctgcaggtcagccgccccaagcgcaagggctttcttgccgcactgaccgactacatcggaggtgaaggctcatgaccgcgctgccggatatcccccggctgtacaccgcccttgccgagtgtctggcggtgttgctgttcaccccggcgcttgcgccccgcttttccagagcggtcaccgggggtatcaccctgctgtgggcggcggtgctgtcggcctttctggggctgacgggcaatgtgcccggcgggctctggatcccctgcatggtaacggccatcgggttttcttacttatatttatggggtgtgtggagcatcaccctgctggaagccgggtatcactgcgcccgggcgtttattctggcagagcttgccgccagcgtggagtggcagctgcactgcgccctctggcccgcccgcggcccatgggagccgctgtctttgctgctgctggcgctggtgtatgggacgctgttcggcattatgtgctatctgcagcaccgccgtccccagcccgccgggcacttacagatcggcggcagcgccgccctgacggcggtcatgctggcgctgaccgcctttgcggtgagcaatctgggctttttgcccggcagcgagatcaacatgagcattttttccatccgcaccttggtggatttttccggcgtgctgatcttatctgtgcagcacgagcagctgcaggagaacgctttgcacagcgagcttgccgccatggacgaggtactgcaccgccagtacgagcagtacaagcgcagcaaggagggcatcaacctcatcaaccggcggtaccatgaactgaaagtccagcttgcccgcatccgggaggagcaggaccagaccaagcagaacgccgccattgccgccatggagcagaacatccgccagtacgaggccgagaacaagaccggaaacccggtgctggataccctgctcaccgccaagagcatggaatgtcaggaaaagcagatccgcatgaccagcgtggcagacgggc

SEQ ID NO: 13734 - DNA, 51070 bp, Unknown
  gut microbiota DNA sequence
aaatcgagacaagtaccgggtataaattccagtttacacagcaagacccccgccttatgttccgggcaggaacacagggcgggggtcttgttattgttttgattcagatttcagctcagtccagcggctgagagggcttccagtccttatagttctcgtaccggctctcgcggatcttgtggtgagaccagatctcatcggcggtgggctgccagtcggcggcgtaagccttgcacttctcgcacaggtgctcgacgctttccggggactgcaggtcggtgctgtgggcaccggtctcgtgcaccatcttttccagcagctcagggttttccagcatcgggcagggacgcagatggttcttgttgaagggctggccgttgtggtaagccatgaacagcgggctgtgcagaatttccagaatagactggtcgtggatattggcgttggagtagtggatgaacacgcagggctcggcgtcaccggcagagttgatgtggaagtagttgcgaccgccggcgatgcagccgcccacgaactcgccatcgttctggaagtccatgggatagaacgggatatcgcacgcagaagagcgcagataccggatgcggtcaatcatgtacttgcgctgctccggggtgggcatcagctccggggcggcctcgttgcccacgggcatatagtggaaatagaagccgaagtgtgcccccttctcgcacaggaagcgcatgaactcgtcgttggtgacggcgtcgatgttctggcgggtgtagcagatggaggtgccgaagaggatgccgtacttcttgagcagatccatggcgtgcatcacagcggcatagtggccttcgccgcggcgggcgtcgttggtctccggggtgccctcgatggacagcataaaggcgatattgcccagacgctgtacttcttcacagaatggctcgtcaatgagggtagagttggtatagatggcaaactccacatcgttatgcttttcggccagcttaagcacgtccttcttgcgcaccagcggctcgccgccggtcagcatatacagatacacgcccagttccttgccctgcgtaacgatcttatccatatcctcaaagctgaggttgttcttgtggccgtactcgcctgcccagcagcccacgcagtgcatattgcaggcagaggtggggtcgaacaaaatcagccaggggatgttgcactggtatttgacgcggttctcgcggatcatcttagtgccgcggaagaaggcttcgtagcccagattcagtgcggtggtacgcgcaacatgggggttggtctggtccagcacgcagttgatgagcttcgtccacttgctgttggggtcggtcagcacctttttggcgttctcgtaggtctcgtcgctgaagccgctgccgtagaactgctttgcagcatctaccagctggcacattgttttttcacggtcttgctcggcgcgggaaagcgccacgtccactattttaccaagcgcagcacgctgcatcttgtgagtcaggttatcaagagatgtattcatagctttttcctcccgaaatgattcctttggaaattcttattttgcttgaccacatcctaccactttgcgtgtttttgtgccataaacagaaaatacgccgtgatggaaaacccatcacggcgtaccctttgataaaattttattgaagccgcacagccacaaagcacatcattcctctactttcaagctgccgctgctcaggcggcacagtgcacggcggaaatccccgtggatcatggtgctcacgcgctccaccatcttcttggggtcgcctttcatatcccggcgggtccattccagcgtcatgcccaccagtgcatacttgtaaaaatcgacaacaaactgcttatctgcatcctgcacggtgatatcgtggcattcacggtctgcaaaatccttcaggatggtgtccagcaatctataaaggtactgctccacctgttccctgcccaccgagcggtaaacgttgagcacaagggtcttgttgtcctgcagctggtgtaggacgtccagataggcttcgctccatgtcccaaagccccggcggccttccatcgcctttgcggcatcctccgctaagatccagtccaccagatcgtaaatgtccttgaaatggtaataaaaggtcatgcggttgaccccgcaatcctcggtgatatcgttgatcgtgatcttgttcaggggcttttccagcagcagcttcttcaaagatgcctccagtgcccgttttgtcgtttgtgacacaaaaacccatcctttcccggcagacgccgctgccgtttccgtgaatgataccccatgatttattttaccgcaaaacatgaccttatttcaagtaaagattttacctttttatgaaatttgtgtgtgcgctgcccgccgcgaaggtgctgtttttacattatatccgcccaaaataagacaaaagtcttgattttctcccagcggttgcttagaatgaataagaagcagaattttatgcagtgcatacctgccgagggagggttattattatgatgaaaaccattgggtttttaggctgtggaaacatgggcggtgccattgcccgcgccgtgtgcaaggctactgcgcctgagaatgtatttctggctaaccgcacggcggccaaggctgaagcactggctgcagaactgggctgtcagacagctaccaacgccgaggtggccggtaactgcgacctgatctttctggcggtgaagccccagatgatggaagccatgctggaaccgctgcggttcatccttgccgagcgcaccaagcggttcgtgctgtgcaccatggccgccggtctgccggtggcacgcattcaggagatggcgggcggcgactaccctgtcatccgcatcatgcccaacaccccggcatcggtgggcgaaggcatgatccagtattgctctgccaacgtgaccgccgaggaggaggccgcattctgtcagctgatggctcccgccgggcgtctggacgccgtagccgagggcatgatcgatgccgcaagctgcgtttccggctgtggcccggcatgggtgtaccagtttattgaagcgctggccgatggtggcgtggcctgcggcctgccccgggcaaaggcgcaggagtacgccgcacagatggtgctgggcagcgcaaagctggtgctggaaagcggcaagcaccccggtgcgctgaaggacgctgtgtgcagccccggcggcagcaccattcagggcgtgcgggtactggaagaacacgggctacgcggtgcggtgatggatgccgtgctggctgcttacgacaaaacaaaggaaatgggaaagggttaatggaatcatgcgcatcgttgtgaaagtgggcacctccacattggcataccccaccgggcggctgaacatccgccatgcagaggaactggtcaaggtattgagtgatttaaagaacgagggacacgaggtcattctggtgtcctccggcgctattggcatgggcgtaggcaagctttcgctgcctgcacgtcccaaggataccaccaccaagcaggcctgcgccgccgtggggcagtgcgagctgatgtacacctacgaccggctgttcagtgcctacgatcacacggtagcgcagatcctgcttaccggcgtggacgtggagcacaccgaacgccgggtgaacatccagaacaccctgacccgcctgctggagctgggtgcactgcccatcatcaatgaaaacgacagcgttgccactgatgagatcacctccattggcgacaatgacacgctggcggctattgtggcctgctgctgcaaggccgacctgctggtgctgctgagcgacatcgacggcctgtacactgcgaacccccacacccacccggatgcggcgctcatcccgctggtggaggagatcaccccggaagtgatggcactggcagacggtgccggctcggcactgggcaccggcggcatggccaccaagctgcgggctgcccgcatggtgaccggcagcggtgcagatatggtcattgccaacggcgcacacccggaactgctgtatgatatcgctgcgggcaagcccatcggcacccgctttgccgggcacaagcagcccacactgtccacacaggaggtttgagctatgaccacacaggaaattctggaagccgcccgcggggcaaaggctgcgctggcactggctgatggcaccagccgcgcacaggcactgcacagtatggctgcgcagctgtgcagcccggcaaacatgacggctatccttgccgccaacgccgacgatatggccgctgcaaagggacatatcagcgaggtgatgctggaccgtcttgccctgaccgaggagcgcatccgcgccatggcaaagggcattgaagaggtcgctgccctgcccgacccggtgggccgggtgctgaagcgggtggagcgccccaacgggctggtgatcgaaaagaccgccgtgcccatgggtgtgattgccatcatctacgagagccgtcccaacgtgaccagcgatgccgccgcccttgccatcaagagcggcaacgcctgcatcctgcgctgcggcaaagaggcttggcgcagcgccaacgccattgtgcaggcactgcggcaggggctgcgggagaacggtctgccggaaaacgcggtctgcctgatcgaggacaccacccacgcctctgccaacgccctgatgactgccgtgggctatgtggatctgctgattccccggggcggtgcagggctgatccgcgcctgcgtggaaaacgccaaggtgccctgcatccagaccggtaccggcatctgccacatttttgtggacaacaccgccgatcaggccaaggcgctggatattattgaaaacgccaaggccagccgccccagcgtgtgcaacgctgaggaggtgtgtctggtgcactctgccattgcgcaggagtttctgcccaagctcgcgcaacgtcttggccccgaccgcgtggctgcgggcaagctgccggtagagctgcggctggacacgcgcgctgccgccatcatttccggcacacctgccggtcctgcggactttgacaccgagtttctggactacatccttgccgtcaaggtggtggacagtgtagatgaggccattgcccacattgcgcagcactccaccggccacagcgaggccatcctgacccggacgcaggcagacgccgaccggttcaccgctgcggtggacagcgccgccgtgtatgtgaactgctccacccgctttaccgacggcggcgagtttggtctgggctgcgagatgggcatttctacccagaagctgcatgcccggggtcccatgggcttggaggagctttgcagctacaagtacgttatccacggtgacgggcagatccggtgatttcccctgccctggcttcttcataatttttttacaattctgtccggcctgcgggcgtggcagagcaagtttttcacagttgaaaaaaatttcctgtacaggccgatgcaagctgcttcggcctgtatttttgttttaccgggatggactgtatttcgattcaagtgagaaaagtgaaaaatatttcacttttctcagaaaacggattctcttggatggtgatatgtatccaagaattcgccgtttctcacaatgtaaaagtagtactattgtgtttttataggtcaaaaaagcaaaattttctcttgacagagcgttttctgtgcggtaaaactatagtgtaaggtttgatatcgatttcactctcgtttcacagaacttcaaaaattcgtacatcacaactggtactatgtaaaaataagtaaaggagagagcatcctatgacgatcgcaattcttgcccacgattcccgcaaagaactggctctgcagttctgtaccgcttacagtgccatcctttcccgcaataatgttatcgccaccggtaccaccggccggatgcttgcgcagactactggtctgccggtgcattgctacctctccggcaagctgggcggtgtacagcagatcacctcccgcgttgcctgcgatgaggtggatctggtgctgttcttccgcgacccgctgaaggctgatgccgccagcctgaccgagcagaatctgctgcgcctgtgcgatatgcacagcgtacccattgccaccaacattgctaccgcagaggtgctgctgcgtggtctggatcagggagatctggactaccgcgaagggatgcacccggctatgatcgagccgatccccgccatgcaggcccgtgccgtgtaagcgtttatttgtgtgttactttgtgtatagagggaaaaaaggagctatcgcagcgtgttgtgcgatagctccttttgttataatgatatcctgcccgcagggcaaacattactccttaaaataagctttctggacagccagcagcacaccggcgcggctggcggcaaagttcaagccgccctgcaaataacaggtataaggggcgcgcagaggaccgtcgcaggaaagctcgatggtgctgccctgcgtaaagctgccgctggccatgaccacctcgtcggtgtagcccggctccgggctgggttccggggcggcgtagctgtccacggggctggcagcctgaatgccctgacagaagccgatgagcgcctctgccgtaccggcatcaaagcaggtgacgatatcgttgtgagcctcgcagtagcgtgggatgggctttttgcccagcagctccagcatacactgggcatagatggcggtcttgatggcctcgcacaccacgccgggagcgtagtagaagcccagatacatatcccggggggtctccagcgtgcagcccagctccttgccaaggccgggggcgttcaggcggtaagcgcacagttccaccagatccttgcgacccacgatgtagccgccggtgggagcaatgccgccgccggggttcttgatcaggctgcccactgcgatatccgcgcccacctgacagggctcctgcgtctgggtgaactcgccgtagcagttgtccacaaaaatgatgatctccgggtttgcggcgcgggcggtatcggcaattttgcggatggtagccagatcaaaggcgttgcgctgtaaatagccgcggctgcgctggatgtggcatacctttgcaccaggggcttttttggcgatcaggtcgtagtccggggtgaagtctgctttaaggggggcttcgtcatagtttacgccgtagtccatcagggtaccggtgcccttgcccttgccgtccagaccaatgacgccctccagcgtatcgtaggggcggccggtggcggccagcagggtgtcccctgcccgcagcagaccgaacagcgccaccgccagcgtgtgggtgccgctctggaactggctgcgcaccagtgcatcctctgcgcccataacctgcgcaaagatctgctccagcttggcacggccggtatcccacaggccgtagccggtggtgcccagcatatcggtggaggacatctgggtatcagcaaaggccttgagcattttcagctggttgaaatcccggatctcctccatctggcggaagtagggttggcacagctccatggccttttcgtccagcgccagcacctcgggcttataatcaaaaaagtggttcagaatcgacattataacgtgatagttccttcctgttattattgggttctttgtgcaagaagctttagcatttctcgggcacatagcgggcgtactctgcctgttttgcaaagccaaggcgggtataaaaccgcacccgctccggtgcacagaggaacaccgggcgcagcccttcggcggcaaggctgtttgccatttccacaatgagccgcccgccgatgcctttgccccgcagcggctctgcggtctgcccacaggccatatatgcctgcccattgcacagggcataagcgcccacggtgcagacgactgtactcccctgctccaatgtccacgccactgccctgccccggctgcgctttgtgcacagttctgagtaaaaatctgcctgccgggcggggtctgctgggtaaagcgctgctgccacccgggcggcagaagcttcccggcagagggtcagctgcgtccacaaagattcgtccacggcgggcaggggcagcggcccagcctgcggcaacccgaacacggtcagcgtttctgctttccgccagccatccggcggcgggcaaacggcttcgtccagaatggcgctctcgcacccgcagaaggacaaaaagcctgccaattctgcggggtttgcgtgcccagccagccatgccgtgctgccggaaagttccagcgccagcgtggggcccgcgtagaaccgccacggctgacttttgcgaaagagcgcacagtccagcggcagcagagcgtccagcaccggcagaccccggcaggcattcgcgaaccgggtgcggcgctttacatcctttacctgtgcgatcacttgagcgcgttgacgatctttttgaactcgcggccgcgcacttcaaagttggggtacaggtcaaaagaagcacttgccggggacaggatgatgatatcgccgggctttgcggcggcacgcgccagctctacggcgtgctgcatattgtctgcgtgttgaatgggcagagcggcttcgtcaaagccggagcactcccgtacagcctgctcgatgcgggggccagtcgcgcccatcagcaccagatttttgacgtgggcgatgatctccggtgccagcggctcgtaggggatgtgcttatcgtagccgcccgcgatgaggatgaccttccggtcaaagctgcgcagaccggcaatggtacgggtggggctggtgccgatggaatcgttatagtacagcacgccgtccagagtacgcaccggctcaatgcggtgctccacgccggtaaaggtgctgcccacctgacggatagcctctacgggcacctcgccccacacggcagcggcagcagccagcaggttttcaatgttgtgcagaccgcgcagcttgacatccttctgggcaaggaagggggtcacgacaccatcctcggccatgcagagcatgccgtcctccttgcgcaggaaggcaccgttgtcggtatcgtgcaggcgggtgaaccacacctgcttgcccttgcagtctgcctgcatggagcggctgatctcgttctcatagcccaacacggcgcggcagggctgcttctggtacagcaggatattgcgcttggcattgatgtattcctgcatatccttgtggtgatccagatggttcggggtcacgttggtgaccacggcaatgttggggcttgcgtgcatgctgatcagctggaagctggaaagctccaccacagccacatcctccggggacacctccggcagcatgggcagcagtgctgcgccgatattgccgcccaaatgcaccttgcggcctgcggcctcgtagaatttggagataagggttgtggtggtggtcttgccgtccgagccagtcacggccacgatctcgcaggggcagaaatcgaagaacagttccacctcgctggtgaccatggtaccggcagccatggcatcctgcaggggcttttcaaaataacccacaaagcccggggtgcgcatgatgatgtcctgtcccttgaagccgtccagatagttttcgccaaggctcaggtcgatgcccagctcccggatggtggcggcataatcgccaaagtcctccacgctctttttctggtcgcacagggtcacatgagcgcccagctccacaaactccttgatgagggtcttgtggctgacgcctgcgccgataaaggcgacctttttgccctgaataagctgggcaagcttctgctgatctttctgcataaaaacagttcctcctctaataggatcatggtataacaccgcgccgcacgggcagcgcggggatcacttcgctgtaccattatagtccatttgcgcgcaattggcaacggaaaaccgcacagtctgcttcaaaaagcccgataaattcacaaaaaggcaattgttttttctgctgctttctgctacacttgtcgttgcagagcgttttttgccgtttctgcgcgaagataaacggaatgaggttattctttttgaaacgatggttgcgttttaccgcagcggtgctggctgctgcgtttctttttgctctgaccggctgtggcagctccacaaactctgccagctttacttggtttgtggacagcatccccgcaaatctggacccgcaggtagcctccggtgcatcggatgtcatcgcctgcgagaatctgtacggcacgctggtgcgcaaggacccggacggcgaacttgtgccggggctctgtgagaagtggacggtctcctcagacgggctgacctacacctttaccctgaaggacggcctgacctacgctgccgccaagggtgccgccacagagtacgacattaccgccgaggattttgtatttgcgttccggcgcattttccatgccgagaccgcctcgccctatgcggtggagttttccgccattcagaacagcgccgccgtgctggcgggacttgcagacgaaagcagtctgggcgtttcggccaatgggccgctgacgttggtgttccggctgagcgagcgggacgataactttttagcaaagctggccatgcccggtgcagccccttgtgacgaggccttttttgagagcacccggggcacctacgggctgaccgcacagaccacacttgccagcggtagcttttacctgtataactggacggcaagcggcctgtttttgcgccgtaccgtggaaagcccgttggtcggcagtctgcgtctggtgcaggacaccagcggcagcggcaagagcgcagcccagctcattgctgatgacaaatgctctgccgcgctggacgagagcggcgaaaccaccagcttacagacggtaagctattccgacaccacatgggcactgctgttcaacgcggcggaggggtcggtgttccagaaccagcagctgcggcaggcgctggccggtattgcccgggaaaacgccgatgtgccctccagcggcctgtacgccgctgcaaagggacttgtgccggagggtctgaccgtggatgggctggactaccgcgaaactgccggggatcccctgcccaccatcccggagccaaaggccctgtatctggctgcgcggcagggcatggctacctcggatttttccggcgtgaccctgctgctgcccaagaacgccgggctgggcgaactggccgaccagatcaacagcgcatggcagaaggagtgttccctgttcttctcggtggaagaggtagagcaggacgagtttgatgcccgcattgccgccgggaaatacaccattgcccttgcgcccatccgtgccgagggtggcagcgtatatcagatgctgcagcagttcaccaccgcaggcggcagcctgaccggctacgccgatactgtttatgccgaccggctggcactgagcgcacagcagaccggcaaggaccgttgcgctctgttggcgcagtgcgagcggcagctgctggaaagttgcaccgtggtgcccctgttggcgcagcagaagcgtctgctgctggcaaacggcgtgcgggacttggtattcgacccattcttcccggtgctggacctgacttgggccaaaatgagctgaccgcaaatttcgtgcggaaaagccttgacattcctgccctgctttgttacaataatggagcacttgcagggttagctcatccggtagagcgactgcttcccaagcagtaggcggcgggttcgagtcccgtatcctgctccagaatatggcggtgaaacgttcaaaatttgtttgtttcaccgcttttttgtttgtgtccatttcaaaaaatgacgtaaaattttgtgtttttcgctcataatctagcagataatggagcaaacaaaggaacaaaaaaacactcccggacttttttagaaagcccgggagtgtttgcgtttacttgattttatgccgtgttactttgcaacgagctctgcggcaagggcgtccatctgtgcctcggcagcggcattggcggcagagcggatggtgaccacattctcgcagagggtgatgttcttcatgctctccagctcggcacgcataagctttgcagccatgggtgcccaagtgccgttttccatcaggccgacggtgcggttctggaagctcttggtcttgaggtgagtcagcagattctccatcggcgggaagaggaagccgtcgtaggtggcgcaggccagcacgatcttaccgcagcggaaggcttcggtaacggcataggaaacatccgtgcgggtcagatccatctccaccacctttgcgccctgtgcacgcagcttttcagccatggtgtgggcagcggcacgggtgtggccgtggatggaggcactggctaccagaatcttttccggctcctcggccttgtagctggaccagagatcgtagtagttcaggtacttgctcagatcaccggtaagcaccgggccgtgcagcgggcagatcgtcttgatgtccagtgccgcagcctttttgagcaatgcctgcacctgcgggccgtacttgcccacaatgttcaggtagtagcgacgggcttcgctggcccagtcggcgttttcgtcaaactttgccactgcaccaaagcggccaaagccatcggcggagaacagcaccttctcgctgctctcgtagctgaccatgacctccggccagtgcaccatgggggcaaacacaaaggtgagggtgtgggcaccaaggctcaggctctcgccgtccttcactaccacgcggcgctccggggcaatggcatctgcgccaaagaactgctccatatactggaaggtcttggcgttgcccaccacctgcatctccgggtagagggctgccagctttgccacgttggcaccgtgatccggctccatgtgggagaccaccagataggcgggcttgcaatcgcccagtgcctcggcaaggttttccagccaaggctcggtggcgcgggcgtccaccgtgtccagaatggtggtcttttcgtccagaatgacataggaattatagctgaccccggtgggcaccggatactggctctcgaacaggtcgatggtagtatcgtccacgcccacaccaaggatggcttcgctgatttttttcatgctcataccgttcagactccttttgggtttatcttgtgccgtaaattggcaaatatttctgagaacaattcctattgtagcacatcgtcagaaatttcgcaagggataatgcggggagcttctgcgcatcaaagctcttccccgctctccggcagacgtgccgttaccggtctgcccggctcggtgtccagttccagcagggtggcagcggtgttctcgtccagtgtctgcactgcacgcagcttgcggctgatggcgcggctgcgcaccccgatgaggttatccagctcttcgtccgtctggcgcaggcgctgctgcattttggaaagcccctgcccgaacttatcgaactcggtcttgaccgcacccagcagctgccacacctcgccggagcgcttctggatggcaagggtcttgaagcccatttgcagactgttgagcagcgccgccatggtgctggggccggccacgttcacctgataatcccgctgcaaaacttccagcagcccggcgttcaccacctcggcatacagaccctcaaagggcagaaacagaatgccgaaagccgtggtatagggcggctccacatatttttcccggatatcctttgcctcgctgcgcagcaccagttccagtgcgtggcgggcgttttccactgcctgtgcatcgccggaggcctgcgcatcctgcaggtgggcataggtatcgccggggaatttggagtcgatgggcagccagacactgttgccgtccacaccgggcatacggatggcgtactccacccgctgggtgctgccggggatggtggctacgttggtgtcgtactgctccggcgcaaggatctcttccagaatcgcacccagctggatctcgcccagaatgccgcgggtcttaacgccggagagtacctgcttcagcccgcccacatcggcggcaaggctctgcatctcgcccaagcccttgtacacttgttccagctggtcgttgaccgccttaaagctttcggtcacccgcttttgcagcgcgtcctgcaattgctcgtccacagtgtggcggatctcgtccagcttctgggcgttctgtgcctgcatggcggcaaggccgtctgccagcgctttgcgcatctcttccagcttgcgggcgttggaggcttccagcccctgcaagcgctgctccatggtctgctgctgggtgttctgccctgccgtcagggtgctgctcatgccctgcactgcggtttgcagggtatcgctgatgtgcgccatcgcggccagattctgctgtgcctgctgcgcctgcttttcttccagcacccgcgcctgcgcttccagctgctggcgcagccactccttcagggcttcatcgtcctgctgagctgcgggcttgccggtgcggtgcagcaaaagcgcctgcagcaggcagatagccaccagcagaagcgtgtacagtcctgccaaaaattccatagacattctccttttaactcaaaaatccgggtcttgcggtaatggcagacccggatgtgcttatacttcctgatgctttacgatctcctgcgtggtctccacctgctggccgtacagacccacgccgtctacctccatctcgcctacctgattatcacaggggtcggcgcggaaggagcacatgggcgggtcgaaaggcgcgcagatgtcgctgttggccaccatgcggtcggtgtccagattgccgaagtagtgcagacgcatcttctcgttgcccgcacgcgccatggaggcaccggcagagcaatcggcgtacatccagcccttgggggcaatatagaacattgcccagtcgtggcagccggctgtctccggccgtgccaccatgccgctctgccactttgccgggatgcctgcaatgcggcaaagagtgataaaagtagcggccatcacgccgcaatcgccccggcggctgcgggcgcaattatcggtgatgttctcgtgtacaaaatacataggctggaagtggtagtgcacattcagggtgacaaaatcgtaaatgcgctttgccttctgcaccgggtcggtgataccctcggtcagctgcgcagccagtgccttcatatagggggtaaaggcgatgtggggcagctgctcggcggtgtcaaaatccggctgcaccgggtcggcctgcatttccagcggggcagcgtagtgcgcagtgctgcggtagctgtactgtgccccaaagcggcagttctcggcaaggtccgcctcccagtacgcggtgcgctggtgtgcagtctccggtgcaatataagttggctgggcggtaaagctgtccagcgtgatattgctctgtgccgggcaggcagcgggcagcggcagccacaccttgacgtgcacggtgtttctgccctcagcctttgcagcagcaagggcgcgggcaaaggtctcgtcagtcatgccgatgctggtgcgcagggtgatgtctgcgctgactgcgccggtgcgcaccatctggtcgtgctgaggctcaaaacgatcccagctgcgctccggaacgggcgggtccagctgacgggcagcaaggtcgggatgggtagccaccagcgtttcggcagcgcggtagatatagcgcttctgtccttccacaaagcgccagtccatctgcccggcagcgtccagtgcggcaaactcctctgcggtaaagtcccgcagggtggcctgcagccggttcaacagctggtcggcggtcagggtgtagtcccgcggcagacggcgcaaaatctcccggtgcgccaacagaccctgccgccatgcgtccacgccgtggggggtggggtttaccggcagcgcgccctgcgggtgcaggggctggttctggctggcagtccagtcctcggccagacaggcatcgatgcgcgcaatggcggcgtcgtagtaaccggcctctttcaggcggcggatatcgtccggcagctccatattcaggtatgcaaaacaagtattctgatccatcatgttctactccttttttatttatggtcaggcagcggtctgctgctcccaaaaagccacggcatctgtcagccagccctcggcatcggtggtatagcccaccccgatactatgcggcgcagactcaaacaccttcataacataaggtaccttgtgggcttccagcgccgcttgcagcgccgggccctgcacctgattgatcatccaaggcagcaccttgtcgtccttcccgtaccagaaaaataccggcggataatcgtccgtgacaagatctgccacactggagcagtaatagtgccacccatagttgccggtatccataagcgcctgatacgcgatctttacctctgaaaagttcactaccggataagccaacagcagtgcaccgggttttgcagcgccgtaatagccgtagccgcgctccttatttgcgaacacgcccacaagctggccgccagaggagtagcccaccagcgcatagccctgtgtatggatggaaagctcctcgtcaaggcttgtcaccagctgcaccgcccttgccagatcctccagcggggcgttattgcccagatccaaaaaggtgcggtagcgcaacacgaacacggcatagccccggttatgcagctcgtaggccgtggagccgccctcacccatctccgaggttgcggtcaaggcgttgccgggcactacgatagcggttttggcgttgggggtctcggccggataataaaacagctgcacacagcccagactggaattgtgttcgatctcctcaggagtgtagacctgataggtgaccttgacgcccttattatagttatcaatgataaggttcagcgcagcaatgccggattcccggtcggtgtcgccaaaataatcgtgcaaggtcttgtttttccagcgttccaccatcagcggcgtcatctcacggcaatatgtataatagccgcttccctggatcgccgggtttgcgcgcagctgagccattgtagtttctgccgtgacatggggtgcgctctctgcgccaaaggcaggcagcgccgcgcaaagcataagccaaaccatacacagcagtacccggacagtttttctcatacatcctccatgggatacggcgcaccccccgcgccgcattcttgttcccttattgtatcacaaacaggtgagatgtcaaaacaatttctgtgcagtccgcttcttgtaccgcgcggcaaattctgctatactgaaatttatccgggagtggaaagagaatgcgggcaattttcggcccgccgaggatgaaagtatggataagatcatcatccggcctatgacgccggaggactggggcgcggtctccagaatttatgttgagggcattgccacggaatacgccaccttccagaccgaatgccctccctataccgcgtgggacgcttcccacacaaaggagtgccgtctggtcattctttccggcggggtgctggcagggtggtgtgctttgcaccgggtagacccccggtggtgttaccggggcgtggccgaggtaagcatctatgtaggcgagcagttccgtgggcacgggctgggctttcagctgttgagcgcgctgtgcgccgccgctgaaaaggccgggtactggacgctgcaatccactgttttacaggacaacaccgccagccgcgccctgcacgccaagtgcggcttccggctggtggggcgccgggagcgcattgcgcgggactgccacggccactggctggacacctatctgatggagcgccgcgccgccgcagacgaaccggaggggttcaaaaagctgtaaccagccccaccgggcacagaattatttttatttgcagagcggaaaaatccgcagtttttcccgctctgtcttttcacgacgtataaggcagaaggagccgctgcactttttgggtgcagcggctcctgttatttgtgatgattcgattttaccactcgtcgtattcgccgtcggcgtttttggcggcagccacacggctgcgcttgaacatgctttccaccacagcgcagtatttatcggcaaggcagacgatgatcgcctcgcggcagctgggcacatgacggaaggtcagcggccacatgtggctggaaatgatgctctgttcctttttggtgatatggaacactttttctgcattgacgcaggcgcagcccgggtgggagaagccgtgcatctcgaacaggcggcggatgccatggaaagtaccttttttatgccagtcatacagataaaaatcgtgcaggaaagcaccgacagccagcgaagtctcgtctgcacccaaatgcagccgatggttcagccaacagctgaccagcaccacattcttgcagtgctgataggtggtaacgtccccgtgctggatgaactcccgcatctgctgcaccttggggttttgatcgtatttttccaaaatggcataaagccgttcgcgttccgtaacagaaagctgcatgagcaaaatttcctttcaactcaatacgttaacgtttgtttcaggagcggagctgcaccgggttagaattgccgaagttttcagcctcggaagggtttgcccgcttgagggtcaggtctaccagatactgcttgccgtcgcccagttcttccagctgggcaagctttgcattggcagcggcttcgtccgggtaccactggatgaggaagaagttttccgcttccaccccgtagtacagccagaagccgtctgcccgcagcagatcgtccagatgatccacctcttcgccgtccggcaggccaaggccttcctccgcgtagagattttctggctctacctgcagcatctcaatgacctgaatagagctttgcaggtactcgtcctgcgaggtgctcttatcggagcgctcccagccggtgagaaatgcctgcatgagcagatcgcgcaccttgatgcgcggcagtgtgggatccataaccatttttgtttccttctttcgtggttttatccccgttggacagtatacggcatacgcctgtgcaagtcaacggtttatttgtgaattttttgtaggtatgactaaaatttacacacgtttttcctgtttcagtcggttatctcaggcgtggaaggaaaaggtatcgttcagccattccaccgcaagctgcacccagcggttgcggtgggtgctgtcggcgtccacctccggggtggagatgctggtgccgtggcagcccttttcaaacaggtgcacttcgcacggcacgcctgccttgtgcagggcgctgagcagcagcaaggtgttttccaccgggacagtttcgtcctccatggtatgccagacgaacaccggcggtgtggcgggggtgatcttatcctccagtgtaaagcgctggtgggcggcaacatcctgcgtgcctgtcagctgcacaaagctgtccctgtgggcgtattctccggcggtgaccaccgggtaggccagcagcagggcgttgggccgcggctggtctgccatgctggggatctcccacactgcaccggacagtgccagatgcccgcccgccgaaaagccgcacaaagcgatctgatccggcaaaatattccactgttctgcgtgctgccgcacaaggccgatggcctgtgccagctgccgcatgggcagcgcatcccgggcgttctcccctactgcgtagtgcagtaccgccgtgtgatatcccgccgctgcaaattgcagcgctacggggtcgccctcccgggggctgacgtggttatagccgccgccgggcaccaccagcaccagcgggcgctgccggaagtgcggcatggcctccacgctctcccgcaggtagagcgtcagcgtaccgccgccgatcagttccagttgctcaagctgcatttacgcatcctccctgtaaaatccgtgccgttcctccgggtgcgccgcaataaattctgcacacaggtcggcgcagatgcggcacagctccgggcaggggcgcttttcataatagtctgcagtgcgttcctctgccgccgtgcccccggcgggggcaacgcccgcctttgccagcagttcccggcagatgatactgccgccgccgttgcgggtgcggtactgctctgccgcctgttgcaccagtgcatacatccgggatttatccttggggtctgtggggtcggcatagaccatgctcagcacggtcaccacgccgcagaacgccccgcacacctcccgcatccggccaatgcctgcgccaaaccctgcggaaaggcgcagcgccatctcctcggtcaggccaagctgcggtgcaaacgccgccaccacgctctggctacaattatagccctgcaaaaaccatgcgtaggcggcatcgccctgttttgacattttctcacatccttccggcatactcgctccattatagcacagtccgcgcaaaagtgggaaagactttgcaagaaattttattttccatataagaaacgaatccggagcgccgcttcgcgcacaggagaacaaattttaactttttatgaaaagccttgattttccctgcaagtcgttgtatattagcactcggaagttatgagtgctaagcatcctggcggtttgccgggtacggcgcaccaaatatgtgataaaagaggttttgtattatggccaagaaagaatttcaggcagagagcaaaaaactgatggacatgatgatcaactccatctataccaataaggaaattttcctgcgggagctgatctccaacgcttcggacgccattgataagctgtattataagagcctgaccgacgcctccgtgggcatgaacaagagcgatttccgtattctcatcacccgcgataaggaaaaccgcatcctgaccgtggaggataacggcatcggtatgaccaaggaagagctggagcagaatctgggcaccattgcccactccggttctctggatttcaagaaggacaacaaggacgagaacattgatatcatcggtcagttcggcgtgggcttctactccgcctttatggtggccgataagctgaccgttatctccaaggcttatggctcagacgaggcctggcagtgggagtcctccggtgtggatggctacgagatgacccccgcccagaaggataccgtgggcacccagatcattctgcacatcaagccggataccgacactgagaaatacgacaacttcctggacgaatacggcattgtggctatcgtgaagaagtacagcgactatgtgcgctaccccatccagatggagcgtgaaaagagccgtcagaagccggaaccggaccccaagcccgaggactacaagcccgagtgggagacctacaccgagttggagaccctgaacagcatgatccccatctggaagaagcagaagagcgaagtgaccgacgaggagtacaacagcttctataaggataagttcggcgattacgccgaccccgcccgggtcatcgtgagccgcaccgagggtactgccaactacaatgccctgctgttcgtacccagccaccgcccctacgatttctacaccaaggactacgagaagggtctggcactgtacgcctccggtgtgctgattatggaaaagtgtgctgacctgctgccggattacttcagctttgtaaagggcattgtggacagtcaggatctgagcctgaatatcagccgtgagatgctgcagaaggacagccagctgaagctgatccataacgcactggaaaagaagatcaagaacgagctgcacgccatgctgaacaacgaccgtgcgaagtacgaggagttctggaaggagttcggccgtcagatcaagtttggtgcttactctgactacggaatgcacgccgaactgctgcgcgacctgctgctgttctggtctgccaaggagcagaagatggtcaccctgcaggagtacatcgacaagatgcccgcagagcagaagtacatctactttgccgcaggcgactccaccgaccgtctggcaaagctgccctccgcagagcttgtgctggacaagggctttgacgtgctgctgctgactgaggatgtggacgagttctgcctgcagatcctgcacagctacccccgcaaggatgccgaagggaaggacagcaccgtggagttcaagaacgtgaacagcggtgatctgggtctggaatccgaagaggagaagaaggccgccgaggatgccaccgccgagaacaaggctctgttcgatgccatgaaggacgctttgaacggcaaggtgaaggaggtcaaggtctccactcgcctgaaggatcaccccgtctgcctgagcgctgacggcccgctgtccattgagatggagaaggtgctgtccaagcagcccggcagcgagggcgtgaagagcgacaaggtgctggagctgaacgtgaaccaccccgtgtttgctgccctgaaggccgcacaggaagccggtgacaccgagaagctgaacaagtacagcgccctgctgtacgcacaggcacagctgattgagggtctgcccgtggatgaccccgccgcttatgccgaggccgtttgcagcctgatgaagtaaacttttatggagaggccgttgtgcatttgcgcagcggcctctttgcggaagagatattttaattttgcgcttgtcgcggtctgtggaccgctccaggcgcattttcacgagaacataaatacccccttaacaaaaaggccgtgctccgctataatagagtggaacgcggtcttttatttttatctttctgtgaaaggaaatctgtttcatggagccgagaaaacattattttgcaaagatccccaccattgccatctttatcgtgatggcgatgtccgggccgttgggggtgctgctgttcatcctgaaaggcattgaccagaaggtgcagaaggaagaacaggaagctgcccgtgcccggggtgactaccgccccgccccaaatcccgcacccatgcctaaaacgccgcctttccccgggcaggatgttcccacggcagagcagaaaagtgcaaagcagtggcataaaaatattgccgtcctctgcaccatcatgggtgccgttttcctgtttgccggggtgacggatgcggtggatatcatcggtgcatggcagattctgcccgaccccggggagctgttttccgatatcgtcatggccattggcggcggcggtgcgctgctgaccggcctgcggatgaaccgcacccgcaagctggagcagctgctggataaggttgtgggcgagcgcgataatatccccctgccggaactgtttgccgccgccggggtggacgctgcccggggacgcactgcggtgaaaagtgccatcgagcacggatacttcggcgcggatgcctacattgacaaccgcacagacacgctggtggtgcggggcgcagcaccccagccgaaaaaacctgcgcaagccccgacacccaagcctcagcccgccgcagaggacgagtacgccgccctgctgcgccagctgcgagaggtaaacgatgccatccctgacccggtgatgagccagaaaatctcccgcctggaagaagtcagcgggcgcatttttgcgctggcgcagaaggacccggacaaaaaagcacagctgcaaaaatttatgaactactatctgcccaccgcgctcaagctgctgaacacctacgccagcctttcccggcaggcggtggagggcacgaacattaccgaagccaagcacagcatcgagcgcagcatggacctgctggtgaccgcctttgaaaaccagctggacaagctgttccaagccgatgcgctggacgtgaacgccgacattgccgcactggaaggaatgctgaacctcgacggcctgaccggcagcgaatttacccgctgaaccacactcccgcacccgatggctgcatcggtgcgggggtatttttttgtgcaaagtgcaattttccatcccgtcttttttgggcgctgcgctcaaaattccgggatttgtgtgcatttatgccaagcatttcgattcgcccgaaaaacttttattttatttgttcgacagcagtcgattgagctgcacaggcgctttttgcaacttttcatcgagatgcaacaataacacatggttttttgcgttgcgtttgactattatagaagcagctacggcagctgcgaacggctgcatcgacttttccgatcataatagtaggaggaaatttccatgatgaagtccatttccacctggaagcaggagctgaccaagggcgcacacgctgcgcgtctggctgcgctgtactgctgcacccccgacgagacccctgcacaggcagcccgctatgcggctgttctggacgggttagagaccaccttcggcgcacataccgaggccggtttgtatagtgcccctggccgcaccgagatcggcggcaaccacaccgaccaccagcatggccgtgtgctggcaggcagcgtgaacattgatatgatcgctgctgccgcccccaacagcctgaaccagctgcgcgtgcagagcgagggctacgacctgtgcgtcatcgaccttgatgacctgaccgcccgcaaggaggaggagaacaccactgcttccctactgcgcggcgagtgcgaggccttccgtcagcgcggcgcaaagctgtccggtctggacgtgtacatttcctccaatgtgcccaagggcagcggcgtttcttcctctgccgcatttgaggtgctggtcggtgtgattctgaacgactgcttcatggatgaaaaagtctcccccattgccattgcacagatcggccagtgggctgaaaatgtgtactttggcaagccctgcggcctgatggatcagatggcctccagcgtgggcaacattatcaccatcgactttaccgacaaggcaaaccccgacgtggagccggtgcaggtggacttttccaaggccggcctggcgctgtgcattctggactccggtgcagaccatgccgacctgaccgacgagtacgccgccatccccaacgagtgccgcgctgtggccgctgtgtgcggcggcgaggtgctgcgggacgtgccctttgaaaccttccttgcaaatattccggcctgccgcaagcagtgcggcgaccgcgctgtgctgcgcgccttccacttctacgccgataacgaccgtgtgccccagcaggtggctgccctgcgcgagggcgattttgatgcctttttgcagatggtgactgcctccggcgacagtagctgggagtatttgcagaacgtcatccctgccggttacaaggagcatcaggaggtggctgtgaccatcgccgctgccaagcattatctgggcggcaagggcgctgtgcgcgtgcacggcggcggttttgccggtacggtgcaggcctttgtgccggtggagatgctggcagactttaaggcaaacatggaaaagatcctcggcgcaggccgctgccatgtgctgagcattcgtcctgagggaggtgctgtgctgtgatctctaccaccatccagcagctcgtgaactacgggctggacaccgggctgattttgcctgatgacgagatctatatccgcaatcagctgctgatgaccatgcagctggacgactttaccgccccggagggcgaggtgtgctataccgatctggaaagcatcctcaagacccttgtggacgatgccgttgcccgcggcgtgtgcgaggataactccaccgcacgcgatctgttcgacaccaagctgatgggcgtgctgaccccgcgccccagcatcgtgcgcgcaaactttgaggagcggtacgaaaacgagggcccgcaggccgccaccgactggttctacaagttcagtcaggacaccgactacatccgccgctaccgtatcaagcgcgatctgaagtgggtcaccaagaccgagtacggcgatctggatatcaccatcaacctgtccaagccggaaaaagatcccaaggccattgccgccgcaaagcttgcaccccagagtgcttaccccaagtgccagctgtgcgtggagaacgagggctacgccggccgcatgaaccaccctgcgcgcgaaaatcaccgcatcatcccgctgaccatcaacgacagcgcgtggaatttgcagtacagcccctacgtttactacaacgagcactgcatcgtattcaacaaccagcatacccccatgaagatcgagcgggcaaccttccgcaagctgctggattttgtgggtctgttcccccactattttgtgggcagcaacgccgacctgcctatcgtgggcggcagcatcctgagtcatgaccatttccagggcggtcattacgagtttgccatggccaaagctcctattgaaaagccttgggtgttccccggctttgaggacgtggaggccggtatcgtgcactggcccatgagctgcatccgtctgacctgtgcggacgatgcacgccttgtggagctggccgataagctgctggctgcttggcgcagctacaccgacgagagctgctttatctttgccgagaccgacggcgagccccacaacaccattacccccatcgcccggatgcgggacggcaagtatcagctggatctggtgctgcgcaataacatcaccaccccggagcatccgctgggcgtgtaccacccccatgcaaagctgcaccacatcaaaaaggagaacatcggcctgattgaggtgatgggtctggccgtgctgcccagccgcctgaagcaggagctgttcgaccttgctgatgtgctggtggcgcatctgcccaccgcagagtaccccgaagccctgcaaaagcatgctgcgtgggcagaggagatccttgcaaagcacccggagctgaacgccgacaatgtgcacctgatcttgcaggacgaggtaggccatgtgttcgcacaggtgctggccgatgccggtgtgtacaagctggacgaagcaggccgcgccggttttgtccgcttccttgaaagcgtaaaataaaccataaatccccgaggctgttgcacatatcatggcgcaacagccttttttagagcacagcattgagcaaaagcacttttcctttgctctcccccctgtgaaaaaatcaatgggaaaatccgcagattttcccattgataaattaaagtattcattccgctgaaaatggccaaagcagcgcggcggccattcaaaatcgttttttgtagatggaggtatcgctatgcactgcactctggaagtttgcgtagacagcaccgccagcgcactggcggcaaaacgcggcggcgctgatcggctggagctgtgcgccgacctgatcatcggcggcaccactccttcccctgccctgctgcgtcaggtcaaggctgagaccggcctgccggtgcgggcacttatccgtccccgctttggcgatttctgctacgaccgctacgagctggcacagatggccgaatgcgccgccgagctggtagccgccggtgcggacggcatcgtgaccggcgtgctgaccccggcgggagcgctggacacagacgccctgcgccccatctatgccgcagcccggcaggcggctgaaaaagcacaccgcaccgtggactgcaccctgcaccgtgcttttgatgtctgctgcgaccccttcgccgcactggaagccgcaaagcagctagggcttgctaccattctgaccagcggacaggcagcaagtgccccacagggcgctgccctgctgcggcagctggtggaagctgccgggcaggaggtggagattctggttggtgcaggcgtatctgctgccaacatccccgctcttgccgcccagaccggtgcccgggcgttccacctttccggcaagcaggtgctggacagccgcatgaccttccggcgggaaggcgtgcccatggggctgccgggcttttcggagtttgagatctggcagaccagtgaagcaaatatccgcgccgcccgcaccgcactggatgcgctgtaactgcaaaaaacatcgttcttcccgcagtgcctgtttccgcaggaaacaggcactgcatcctgctgttttccgttacacccctcccgtgaaaatgcaaaatcgggcagcccgcagctgcccgattttgttctaataaagtttttcccactttagtgcagggcggcaaaccgggctgcgccgcgggtgcacagccaacggtgcagcagcaaatccagccccagcagcgcggccagacaagcaccttgcgcggccagcggcggcacggcataatccagtaaggtcaggggcaaaaacagcaccccgcccgccagcagccacccgccgaacatcgccagcatactggcggcgctccgcttgaccacggcggcttcgctgacccagtggaggttgggcaggcacaatcccaaggcaaggcccatttgcgccgtcagccacacaaaggctgccagcaccaccatcaccagcagcccctgccctgccggaatgcgcagcgccgccatggcgcacccggcgcaaaaccacgcccccggcagcgtgagcagcaattgcagctccacctttacccgcagaacctgctgcggggcaaccggcaggctttgcagcagccagagggtgccgccctccagcgacaccgagggcgctgtgataaagttcatggcggctatggcgcacaccatcccgcacaccagcataggcaggctctccggcaggtaagcagcagtaaaggcgcgcagatctgaggccttccacagcgctgctgcgcccagcaccggcaacagcagactgctcagtgcacagttgagcagccacatggggcaagcgcccagatgcagcagttcccgccgcagcaatgcccgacgcgggggctgctttttttgcgtctttgcgcggtattccgctttggctctgcccggttcaagggtcaaaagccgcagatagggctttgccagcaccttgccgcaaagcgccatacaggccgcagccagcgccagcaatagcagcagcgccgggacgttgcccactgccgccagacccagcagacgcagcggcgcggcggcacgaccggctgctgcgcccgcctgtacggcatccaccgcaagggcctccaccgcgttgcccacccattggaataccgcataatagaccgccagaaagagcagcgtacccaccacagtgacaaggcttttgtgccgggcgcggcggttgagcagcgccaccgtccagcccagcagaacagccagcaccatagagacccccgccagcgccagtgctaccggcagcgccgccagcaaggctccgccggggcggggtgccgccagcgcatagcagaccaccgagggcacccacgccagcagcagataaatcaggccggtcaggtacaccccgccgcagcgcaccgcaaaaatagtgcccggcgggatgggcagcgccagcagctgctggttatcccggcagcggaacaaatgcccgtagctggtaaaggcactagccaacacactgaccgtcagcgccgaaagctccatcagcacaaaatagagccagtccagcccctgcggaaccagcgttaccgccagcggcagcgccattgagccaaagctgagcatgaccagcagcatcaatgccgcaaacagcagcgtgtagccaaacgtccccacccgggagcgttgcttaccagttttgctgctgcgcacaaaggccgcacccaattccagtagctgttttttgagcaatgcacggatcatagcgcttcccccgtatcctccagttccagaaagacctcctccagcgtatcgtcgccgcgcacctcttccatagcaccctcgcgcaccagctgacctttacgcagaatagctaccctgtcgcaaagcttttcggccacctccagcacatgggtggagaaaaagatcgccccgccttgcgcacaaaaggccttcatctgggtcttgagttgatgggaagccagcgggtccagcccgacaaagggctcgtccattaaaatcagcttcggctcgtgcagcagcgccgcaataatggcaagcttctgcttcatgccgtgggagtatgccccgatggactgcgccaaatcctgcgtcaggccaaaggcatcgccgtactgccggatgcgctgcgtccgctgtgcggcgcttacgccaaagatatccgcaataaaatcaaggtactggataccggtcatatactcgtacagctgcgggtcatccggcagataggccaagcggcgcttgcattccagcgggttctcccgcacggaaatgccgtccacataaatttctccggcatcaaattgctggataccgcagcagcattttaaggtagtggtcttgcccgcgccgttgtgcccgataaaggcacacaactcccccgggcggatgtgcaggcaaaggtcctgcacggcgggcttgccgccgtaggttttggtcagatgctcgatctttaacatgggctgcctccttgctttcagtttcgagccaagtatacaccttccggcagggggaaggtcaagcatttctccgttttttcttgcgttttgtatagggctgtgctatactttttgacgaactgaacagaaaacagcaggtgcgttccgtcactttgccccaccgggcggcggcagggacgttaaaagggaagcgggtgtcaatcccgcacgatctcgtcactgtgataagggagtccactgtcagggtgcttttgcaccggtcactgagccatccggcttgggaaggcggcagcgggcgttgagctttcagtcaggaaacctgcccgctgttggtaccggggctttgccgccccagatcacgaggaattggttgtaccaaaaagcctgtaagatacggggtctttttgctttgccatttcgcaagcggaaggctccgtttttttgcaggttctctttcctgtacccttctgttcggtgccgtattttacccacatcaggaaaggaaaacaagatgaaaaaacgcaacatccgcaaaacggcggccgctctgaccgctctggctctgtgcgccggtgtactgaccggctgcggcggggccgcctccggcactgcttcctctgttgccgccagttctgccgccagcagcgaggcttccggcgcagacgctgacgagcttgccgcacagaacgtggcagatctgatcgacgccatctatgtgcagcagcgcaccgatgacaccgatgcccagtgcgaggccgcaaaggccgcttgggacgctttgaccgatgcccagaaggagctggtggagggcgaaaatgccgaccccgactactttggccgcgacaccggcgacgcctccaaggacgatgcccgcaacgccgatgagatcggtgagaacgagctgctggtcgtgtccttcggcacctccttcaatgacagccgcgccgccgacatcaagggcattgaggacgctttgcaggccgcataccccgactggagcgtgcgccgcgcctttaccgcacagatcatcatcaaccatgtgcaggcacgcgatggcgagaagatcgacaacatgcagcaggcgctggaccgcgctgtggcaaacggtgtgaagaacctgatcgtgcagcccacccatctgatgcacggtgccgagtacgacgagatgaacgagatgctggaccagtaccgcgacaagtttgagagcgttgctgtggccgagcccctgctgggcgaggtaggcgcagatgcttccgtcatcaatgcagataaggaagctgttgccaaggctgttaccgatgccgctgtgaaggatgccggttacgagagcgccgctgccgccgccgccgataagaccgctttcgtctttatgggtcacggcacttcccacactgccaaggtgagctacagccagatgcagaccaccatgcagaccttgggctacgacaacgtgttcatcggcacggtggagggcgagcctgaggacacctcctgcgaagccgtcattgaagctgtaaaggctgccggttacaccaaggtcatcctgcgcccgctgatggtggtggcaggcgaccacgccaacaacgacatggccggtgaggacgccgacagctggctgagccagtttaccgccgcaggctgctttgaaaatgtggactgccagatctcgggtctgggccgcattgcggatgtccagcagctgtacattgcacataccaaggccgctatggatcttctgaacggctaatggattcagaagccctctccggcgctgccaagcatacggagagggcttcttttatgggcgtattccccgcacgaggagaacgtgccccctgccccggcagcttagacgccgggcaaaaatttaggatactgaggtatttattttatgcgttgcaaacagtttatcatcgtttctctggccggtgtggtgctggctgcttctctggcaagctgcggcggggctgtccccgcctcctctgctgcagcaagctctgtggctgcttcctccgtgatggtttcctctgccgctgctgagactgccctgccggacggcgtatataccgctgatttcgagaccgacagcagtatgttccaccccaatgaagcctgcaacggcaagggcaccctgaccgtggaaaacggcgtgatgaccttccacgtcagtctggcttccaaaaagatcgtgaacctctaccccggccttgccgccgatgccgaggccaacaagaccgcatggctcatccccaccgtggacactgttacctatgcagacggcaccactgaggaagtgtacggctacgatatcccggtggaagcactggataccgacttccagctggcgctgcttggcactaagggcaagtggtacgaccacaccgtcagcgtgcgcaacgccgagcccaagaccgagcaggccgccgagacccccgcagacggtgcatacaccgctgccgtggtgctggagggcggctccggccgcgccaccgtggacagccccgctgccctgaccgtggccgagggcaagatgactgccaccatcgtgtggagcagccccaactacgactacatgatcgtggacggcgagaagtatctgcccaccaataccgagggcaactccacctttgagatcccggtagctgctctgggcaccccgctgactgttaccgccgacactgttgccatgagcaagccccacgagatcgaatacaccctgacctttaccttggagtaaccttccatgaagctgacccgcgctcaatttttaaaggctctgcccgccgccgcgctggtgcttgcaggctgcacggccgcgcccactgcacccgccgatacggacgagctggtttttgaccacgcctacccgctggactacgccacccagtttaccgccgactgctatgcggacggctctaccctgctgaccatcccggacgcacaggtaaagttccttgtccggccggagggcgctgccaccctgcacaccgtacccgagggagtgactgtattgcagcagccggtgcagaacatctatctggtgtccacctctgccatggacttgttcctccatctggacgcgctggacagcattgccctttccggtacccgcgccgagggctggtatctggacgaggcaaagcaggccatgcagaccgggcgcattgcctacgcgggcaagtacagcgccccggactacgagcgcatcctgaccgcggaatgcggccttgcggtggaaaacaccatgatctaccacaccccggaagtgaaggagcagctggaacggttcggcattccagtgctggtggagcgctccagctacgagagcagcccgctggcacggatggaatggatcaaactgtatggcatcctactggggaaagaaccccttgccgaggaggtgttcgcccggcaggcgcaacgcattgcgccactgctggaacagccctccaccggcaaacgctgcgcgtttttctccattacttccagcggccttgccactgtgcgcaaaagcggagactatgtggcgcagatgatcggcatggccgggggcgaatatgtttttgcagaccttaccgacagcggcaacagcctttccaccatgaatatcccgctggaggacctttacgccggcgtcaaagacgccgatgtgctcatttataacggcaccatcgagggcaccatctccacaaaagaagagttgcttgcccgctgcgcgttgctggcagagtgcaaggcggtgcaaagcggtgatatctggtgcacgacgcccagctttttccagcagagcatggcactggcagattttatgctggatctccatgccgtttttaccggggaagcaaccagccccgacaccctgcattttttgaccaagatcacctgaggagccgcttatgaccagccgcaaacgccttgttttttcctattgctgccttgccctgctgctggcggtgctgtttgccgtgagcctgttctggggcagcgttgcgcttaccccgcaggccgtgcttgctgccctgacaggacgcgggcaggacgcgctgagcgtgggcattatcacccagctgcgcctgccccgcgcggtgatggccgcgttactgggcgctgcgctctctgcggcaggctacctgctgcagacctttttcgcaaaccccattgccggcccctttgtcatgggcatttccagcggagcaaagctggcggtggcgctggtaatggtgctgtttttgaactacggccagctgaccagttctgccgtgctcatccttgcggcctttgcgggcgctatggcagccatggcctttgtgctggccgctgcccgccgggtgcagcgcatgagcatccttgtaatctgcggcgtaatgatcggttacatctgctctgccatcaccgagtttgtggtggcctttgcgcaggatagcagcatcgtcaacctgcacaactggtcgcagggcagcttttccggcatgacgtggggcaacgtgcgcacggcagcgctggtggtgctgcccgcgctggcggcggccttctgccttgcaaagcccatggcagcttaccagatgggcgaagcctacgcccgcagcgtgggcgtggatgtgcggcggttttcccggctgctggtgctgctttccagcctgctggccgcctgcgttaccgcctttgccgggcctatctcctttgtgggcatcgcggtgccgcaccttgtcaagcagctgctgggcagtgcccgcccgctgtatgtgctgcccgggtgctgcttgggcggggcggcgttctgcctgctgtgtgatctgatcgcccgtagcttgtttgcgcccatggaactttccatcagcgcggtcaccgccgtattcggcgcgccggtggtcattgggctgctgctgcgccgcaaccgggaggatgtgcgatgaagtactctgttgaaaccaacgcccttgccatcggctacggcaaagctgcccttgcgcgggatatcgcgctgggcgctgccaaggggcaggtgctggcgctcattggcccgaacggcgcaggcaaatccaccctgctcaaaacgttggcggggcagctggcccctttgggcggcgcggtgctgctggacgggcaggagcttgcccgcatccccggcaacgcccgggcgcaaaagctggcgctgatgctgccccacacccgccgcaccgagttgaccacctgctttgagtttgcggcggcaggacgcatcccctacaccgggcggttgggcatcctttccgccgaggacaaaaagcagatacagaatgcgctggagctggtgggcgcggcgcatctggccaaccgggacttcaactgcgtcagtgacggacagcggcagcgcattttactggcgcgggcagtctgtcagcagccgcaggtgcttctgctggacgagcccacgtcatttttagatgtaaaaggcaagatagagctgctgaccattttgcaaaaactggcgcatgagcagcagcttgcggtcatcgtgaccctgcacgaactggacatggcgcagaagatcgcggacgcggtggtctgcgtttcgccgcacggcgtttctgcgcccatgtcccgggcacaggcctttgcccgggaaaatatcaaagcgctctacggcctgaccgaggaacagtacagcgctgtttttggtccaccaaagccggaaaagccccaatttgagcactatgtgcgcagcgggcagaagctgctgcgttgcgggtacactaccggcacctgtgcggcgctggccgctgccggggccgcccggctgctgctgaccggcacagcaccggaaaccgtcgccctgcgcacgccgaaaggcattgtggtagaggttgcccccctgttctgccgcaccgttgccgagggtgcggaatgcgccattgaaaaggacggcggcgacgatgtggacgtgaccaccggtctgccggtgaccgccacggtgacgctgctgcccggcacgcccgagatacgcattaccggcggcgcgggggtgggcaaggtgacgaagcccgggctggaccagccggttgggcaggccgccatcaaccatgtgccccggcagatgatcaccgaggcgctgcgccgggaggcggaagccgcctgttaccccggcggctttgccgtgactatctccatccccggcggcgaggaggtagcccggcgcacctttaacccccatatcggggtggagggcgggctgtcggtgctgggcaccagcggcattgtagaacccatgagccagcaggccattctggacaccatccagctggagatgaatcaggcggcgctgcgggcaaaggaccaccggcggctcatccttgccccgggcaattacgggttggactatctgcacgaaacatacccgcagtttgctgatatcccggtggtcaaaacttcaaactttatcggagatacgctggatattgcagcggcggcgcacttcaaacaggtgctgctggtggggcatatcggcaagctgtgcaagctggcgggcggcattatgaacacccattcccacacggcagactgccgcacggagctgttctgcacccatgctgccctgtgcggtgctgaccgagaggtgtgcaccgcactgtacaatgcagccaccacggatgcctgtctggagattctggatacagccggactgcgggagccggtgctgcaaagcctgcttgccgccatccagctgtatcttgaccgccgcgcgggcggggcgttccgggtgggcgccgtgctgttttcaaaccagcatggcccgctgggacagaccgaaactgccgcccgcctgttagacgaatggaaggagtaatgcacatggtacattttgtgggcgccgggcccggcgcaccggatctgatcacccagcgcggtgcagcatttttacaggccgcagactgcattatttacgcaggcagtctggtcaatccggcgctactggggctggcaaagccgggatgtgctatctataacagcgccgagatgacgctggagcaggtactggacgtgatgcgccggatggaagctgccggtaaaagcactgtgcggttacacactggcgacccctgcctgtacggtgccatccgggagcagatggatgcactggatgcagacggcatttgttacgatgatacccccggtgtttccagcttttgcggcgctgccgctgcgctgaacgccgagtataccctgcccatggtcagccagacggtcatcatcacccgcatggaggggcgcacccccgtaccggagcgggaaaggttggcaagccttgccgcccacggcgcgaccatggtgatctttctgtccatcgggctgattgacaaggtgcagccggcgcttttgcagggcgcgtatacaccggacacccccgccgccgtggtgtacaaggccagctggccggaagaaaaaatcgtgcggtgcacagttggttctttggctgagagcacccgtgcagcgggcattaccaagacggcacttatcgtagtgggagattttctcggcacgcagtacgagcgcagcaagctgtacgaccccgcctttaccaccgagttccgcaaaggagaaccggtatgacccgcgcttaccttgcctttacggaaaccggccttgcgcttgcaaagcgtctttccgctgccctgcccggcagcgttgcccggtgcgggcaggatggtgtttctcttgcagaatgggcaagcgcacagtttgtgcagtcggatgcgctgatatttgtaggcgctgcgggcattgcggtgcgggccatcgcgccccactgcaagagcaagactaccgacccggctgtggtagtggtggacgaatgcgggcggtttgccgtgcccattctgtccggacatctgggcggcgcgaacgatcttgcgcgggccattgccgctgtatgcggagccgtgcctgtgattaccaccgccaccgatgcccacggcatttttgcggtggacgagtgggcaaagcaccaaaactgcatggtactggagccggaacgcatcaagctggtcagtggcaaattactggccgggcagccggtatattaccgggctgatttcccggtaatgggcaccgtgcccgcagggttattcctcgctgataccccggaaaaagccgactttgcactcaccctttgccccaccgggcaggcactgcatcttgtgccgcgcatcggagtgctgggcatcggctgcaagcggggcacaagcgctgaaacgctggaagctgcctttgccgccttctgcacccggtacggctttgctgcgcgggcagtcaccgccgccgcaagcatcgacctaaagcaaaacgagccgggcttgctggccttttgtcaggcacacggctggccggtgcggttttactctgccgcacagctgcgcagcgtgcccggacagttcaccccctccccttttgtacaaagtgtgaccggagtggataatgtctgtgagcgggcggcagtgctggacgcaggcggcagcctgttttacccgaaatttgcctgcagcggcgtgacccttgcgctggcgtgcaggccctttgccccggactggaggtggcagaatgcttgacgtgatggaaattgacattgaccgtcccgagaaggtggtttatgtcgtgggacttggccccggcgaacctttttatatgacccagcaggccgcgaacacgctggaaagcgttgacgctatctgcgggtataaggtctaccttgacctcatccgcgatgaatttccctgcgaagaatactacgccaccggcatgacgcaggagcttgaccgctgccgctgggcgctggaaaaagcacgcaccggcaagcgggtggctctggtctgctccggcgatgccggggtgtatggcatggcaagccccctgctggaacttgccccggactacccggatgttgccgtggaagtcgtgcccgggctgaccgctgccctcagcggcggggcagtgctgggcgcaccgctggcgcacgatttttgcgtcatttccctttccgaccggctgaccccgtgggaggtcatcgagaagcggctggcttgcgccgccatgggagatttctgcgttgcgctgtacaatccctcctccaagggcaggccggactatctggcaagggcggtgtgcatcctgctggaaagtggcaaaagcgccgataccgtctgcggcattgtgcgcaatatcggccgggagggtcagactgcccgcatcctgacccttgcccagctggaaagcaccacggtggatatgtttaccaccgtgtacatcggcaacgctgccacaaagcagcttggcagtaaaatggtcaccccgcgggggtaccgcagatgaaggcagtggttttcagcggcactaccgaggggcgggtgttctcccggcagctggcggcgctgggagcggaggttctggtcagtgttgccaccccgctgggtgcagaggaacagggcaaagcagacggcatcaccgtgcactgcgggcggctgacccccgaggaaatgaccgctcttttacagggcgctgccctgtgcatagacgccacccacccctacgcggtggacgccacaaaaaacatccgggctgcgtgtgccgtggccggggtggagtaccaccggctgctgcgggaaggaagccccttgcctgccgggagcatggtatttgccaccgccgcccacgcggctgcatttctggccgggtgcagcggcaatgtgctgctggccacaggcgcgaaagaacttgccgcctttgcaccgctcagcccggagcggctgttcccccgggtgctgcccacgcgggagggcattgccgcctgcgaggccgccggtatcccgcacaggaacatcattgccatgcaggggcctttcagctatgcgctgaactgtgctctgatggaacaattctccatccggtatctggtcaccaaggacggcggtgctgtgggcggctttgccgaaaaagcacaggccgcacaggataccggtgcacagctgatcgtggtgcgtcgcccggctgaaaatggacaaactgctgcacaaattctggcacgctgcaaggaggttctggtatgatttctctgatcggaatgggttccggctgcccggaaagcctgaccgcgcaagggttggctgcactgcaaagcgcagggctcatccttggggccaagcgcctgttggagcatttaccggcggggtgcactgacaactgcaaagccgtgtataagccggaggaaatccttgcgtgtcttgccgcacagtcggatacggacaccgctgttttgtacagcggcgacaccgggttttactccggtgcggcaaagctgctgcccctgctgcgggtcatgggatactccgtccgggtgctgcccgggctttccagcgttcagcttttagctgctgctgtaggacgcccctggcaggactggaaactggtgtcggcccatggccgcgcctgcgacccggtagccgaggttttggcgcatccacaggtgtttttcctcaccggtggcggggacacccctgccaccctttgcgccaagctgaccgctgccgggctgggcgctgctcacgcccttgtgggcgaaaaccttggcacccctgcagaagccatccgctttggccttgcccgggaactggcagagcaaacctttgcaccgctgagcgtattgctcatcgaacgggaggctttgccgtcccgccgcacccccggcctgccggacgatgcctttatccggggcgctgtgcccatgacaaagcaggaggtgcgcgccgccgcgctggcaaagctggcggtcacccccacggacaccctatgggacgtgggcgcgggcaccggcagcgtgagcgtggagctggcgcttgccgcccctgccggacaggtatatgccgtagaatgtgacccggaagcctgtgcactgatccagcaaaaccgggagaaatttgctgcttacaatctgaccttgattgagggcaaagcccctgaagctttggacacgttgcccgccccggatgctgtattcatcggcggcacaaagggcaatatggacgctgttatagacgctgtactgcacaaaaatccagtcgcccggctgtgcattaccgccattgcgttggaaacgctcagcgctgccgtagctgccctgaccgcccacggccttgccgccgaggtgacacagatcgccgtcaaccgcacaaaaacggcgggcagtctgcatttgctgatggctaacaaccctgtgtttctcattacgggggcacggacatgatgcagtttctcatcgccgcgccgcgctccggcagcggcaagaccaccgttacctgtgccgtgcttaccgcattgcagcggcgcgggactgacccttgcgccttcaaatgcggaccggactacatcgaccctatgtttcaccgcagcgcgcttggggtggaaagccacaatttagacctctacctctctgccccggatacggtgcgcacgctttacgcccggtatgccgccgggcacagcgctgccgtatgcgagggtgccatgggcttttacgatgggcagggactgacaacccgtgcaagcgcttgggagctggccgatacgctggcgctgccggtgctgctggtagtgcagccaaaaggggcaagcatcacccttgctgccgagctgcgggggcttttgcagttccgcacgcccagccatatcgtgggcattctgctcaatgattgctctgagtccttgtacaaaacgctgcgcccgatgctggaagccgagaccgggttgactgtggtggggtatctgccccatctgccggggtgcgccattgagagccgccacctcgggctgaaaaccgccggggaggttgcggacttacagcaaaagctgggcaagcttgccgatgcccttgtgctggactgggcacagttggcagtgttgaccgaccgccctgccccggctgcgccgccgcttgccgcgccgtgcacgccctccgttcgcattgccgtagcgcgggatgaagccttctgctttgcctacgctgaaacgttggacgccttgcgggatgcgggtgcagagcttgcatttttcagcccgctgcgggatgccgccctgccggaaaatatcggcgggctgtacctgcccgggggctacccggaactgtatgcccggcagctgagcgagaactgcgccctgcgtgctgctatccgggaggctgttcagaaagggttgcccaccgctgccgagtgcggcggctttctgtacttagggcaggcgctggagggtatggacggcaaaacttaccccatggcgggtgtgctgccgggcagcgggcacaacaccgggcggctggtgcgctttggctatgccgccatgacggcaaaggccgacagtatgcttttccacgccggagaaacgctgcccgtccatgaattccaccactgggattcctctgagaatggtgcagacttttctgtgcgcaaaaccgaaaaaaggcagtgggaatgcggctttgcaagcgcaaatttgtacgctggtttcccgcatctttactgggctggcactgccctgccccgccgctttgtgcaggcggcgcagcactttttgaaacacaaaggatgacaaaaatgaccgaagctgaactgatgcagctgcttgctgctatcaccccgccggacgaaaccgcccgcgccgccgcccatgcccactgggccagccttgccaagcccttgggtgggctgggcgcactggagaccctgctggaagatgccgctgcgctgaccggcacggcgcagtttgatttttccagccgggcggtggcggtgctctgtgcagacaacggcgtggtggcgcagggcgtaagccagaccgaccagagcgtgacccgcgccgtagccgagaaccttgctgcgcggcgcaccagcgtatgcaggatggcacaggcggcgcactgcgatgtgctgcctgtggatttgggcattgccggtgcgcctgtacccggcgtgcgggactgccgcattgccgccgggactgcggactttaccaaaggccctgccatgacccgcgccgaggcagtggaggccattggccggggcatcgccctgacccggcagcttgccgccgagggctacgggcttgtggccaccggtgagatgggcattggcaacaccaccacctccagcgctgttgctgccgtgctgctggcacagccggtacagaccatgactgggcgcggtgcagggctttccgatgcagggcttgcccgcaaggtggaggccatccggcggggcattgcctgcaatgcccccgaccccgatgacgtattggacgtactgagcaagctgggcggctttgatatcgccggtctgtgcgggatgttcctgggcggggcgctggcgggtgtgcccgtgctgatggatggcttcatcagcggggtggcagcgctgtgcgccgtgcggctgtgcccggcagcggccaaggccgtgtttgccagccactgctccaccgagcctgccgcccggctggtgctggacgcgctgggcaaaacgcccctgcttaccgccgggctgcatctgggcgagggtaccggcgcagtggccagtatcccactgtgggacatggcgctggcggtgtacgaggggtgctattcctttgcggagggcggcattgcgccgtatacgccccaatgctgacgctggtactgggcggcgctgccagcggcaaaagcgaatacgccgaagctctcgtgctgcgcagtgctttgccgcggtattatctggccaccatgcaggtgtgggatgccgagtgcgccgcccgggtggaaaagcaccgcaaaatgcgcgctgcaaagcagtttgagaccctcgagtgcccgctgcatttagagacggtgcatttgccccgcaggggtaccgcactgctggaggacttgggcaacctgaccgccaacgagctgtacgaccccgccggagcgggcgatgccgccgccgagcacattttgcaggggctggagagccttgccgcgcagtgcgaaaacttgatcgttgtctccaacgaggtattcagcggcggcgcggactatgccggggataccgaccgctatctgctggcgctggcacgggtgaacaacgcccttgccgcccgggcagacgccgtagtgcgggtggtgtgcggcatccctgtctattataaaggagtggaaaaatgatcgttttgcagaccattgcggtggcctttgccatgttttcggcggtgccggtgccgcagtttgcgtggaacgaaaagaatatgcggtacgcgctgtgcgcctttccgctggtggggcttttatgcggggcactgtggtgcgtgtgcggtgtgctgccgctgcccgccccggcgcgggcggcagggttctgccttgtgccggtgtgggtgaccggcggcatccatctggacggctatgccgacacctgtgacgcccttgccagctacggcgaccgggaaaagaagctggaaattttaaaggacccgcactgcggtgcctttgcggtcatccggctgtgcagctattttgcggcttacctctgcctcgccgcctgtgtgcagttcaccccccgggtgggcgcgctgtggacgctggcgctggtgctggagcgggcactttccggccttgcggtggcggcctttcccatggctaaaaacaccggccttgcccatacctttgcctccactgccgaccgtaccgctgtgcgcaatgtgctggcagtgctggcgatactgctttgtggggcgctgctggctttaggcggcggagcactggcagcagttgcaatcttgctgtttttgtggtatcaccatgtagccgtgcagcagctgggcggcattaccggcgatcttgccgggtggtttttgcaaaagactgagctgtggatgctggcggcgctgtgcgcctgccaatggggagggctgttatgatcttcatcaccgggccgctttacagcggcaagcgtacctttgcccgcaccctgcccggccgctgcatcacagatgcgcagcagcttgccgccgggtgcaaggacaatgctgagcttgagaaacttgcggacaaattatccgcttatgatatcgtgctgtccaccgaggtgggcggcggtgtggtgcccatagacccggccgagcgtgccgcacgggaaaacgccggacgtctggcctgtatgctagcggcgcgtgctgcgtgcgtggtgcagatgttctgcggcatccccaccgttttgaaaggagaattgccggaatgctgatctatttattacgtcacggcctgaccgaatacaacgccgaaaagcgctatcaggggcagcgggatatcccgctttctgccgccgggcgcgctgtgctgtgccgggcagatatttcccctaagactgtgtatattaccccgctttgccgcacccggcagaccgccgaggtgctgttcccgggcgcaaggctcgtagaaacagatgggctgaaggagatgtgctttggcagctttgaggggagaaattatattgaaatggagcacgacccggactaccttgcatgggtagccgccaactgtgaaagcccctgcccggacggcgagaccaaggccgcgttttgtgagcgcatctgcgcagcattttccgcactggtggacaaagcccttgcggatggcgaggagatgctggtcatcttagcccacggcggcacccagatggctgccatggaacgctatgccctgccccacaaggattattacgaatggtgcgcccccaacgccggcggctttgtgctggatgccaaggactgggcggcaaagcgggtgctacatctggtaaagaccgtgcagtacacaaaggaggcgcaggcatgatcggctacgcggtactgggcggctttgtgctggatgccgttttcggcgacccggcgtggcttccgcatccggtggtgtacatgggcaaggccatctctgcgctggaaaaagggctgcgtgcccgcctgcccaaaacgccggagggcgagctttggggcgggcgcattttagccttttgtctgccggtgggcacctttgcactcacaagtcttatctgcataggagccgccgccctgcacccgctgctggggctggcagtacagatgttctggtgcggacaggcactggcggcaaaggggcttgtgcaagagagtacgaacgtctaccgggagctgacaaagcccgacctgcccgccgcccgcattgcggtaagccgcatcgtggggcgggacacgcaggcgcttaccgccgaaggcgtgaccaaggccgctgtggagaccgtggcggaaaacgccagcgatggcgtgatcgcaccgctgttgtatatgctgctgggcggcgctccgctggcactgacctacaaggccatcaacaccatggacagcatggtgggctacaaaaacgagcgatatctgcgctttgggcgtgcggcggcaaagctggatgatattgcgaactacctgcccagccgcattgccgccctgctgtgggtagccgctgctgccctgaccggcaacgatgcccgcagtgcgtggcgcatctggcggcgggacaggcgcaaccacgccagcccaaacagtgcccagaccgagagcgcctgcgccggtgcactaaacgtgcagctggcggggcctgcctactattttggtcaatactaccctaagcccaccatcggcgatgccgtgcgtcccattgagccggaggatatccgccgcgctgaccgcatgatgtacgccgaaagcctgctggcgctggcgcttgggctggtgatacgaggtattttatgatgcagcttgtacatggcggcgactgggccggttaccgggcgcagtacggacaggacgcgctggacttttcggccaatgtcagcccgctgggactgccggagggggtggcaaaggccatcaccgccgcgcttgccaccgcagaccgctatcctgaccccttctgccgcgctttgcgggcaaagctggcagtgcacgaaaccgtgcccgcagcgcatatcctgtgcggcaacggcgcagcagacctgatcttccggctggtgtgggcggcaaagccccgcaccgctctgctgcccgcccctacctttgcggagtatgccgccgcgctggaaacggcgggctgcaccgtccggcggcatttcctgcgggaaagcgaagattttgcagtaacggaggcgtttatctccgctgtggacgaggacaccgacatggtattcctctgccagcccaataaccccaccgggcagctgacgccgctagcactggtagaggcgctgctgcgccggtgcgaagcttgcggtgcgctgctggtggtggacgagtgctttctggactttctgccgcaaagtgaggtgctgtctgccaaaaagcttctggcaagcccgaacctcatcatcctgaaagcttttacaaagctgtacggcatggccggagtgcggctgggctactgcctgtgcagcaacaccgctctgctggataagatgcaggccgccgggcagccgtgggcagtttccagccttgcacaggcggcggggctggcagcgctggacgagaccgcctatgtagcccgggtgcaggtacttatcgcgcagcagcgtcccattttgcgggacgggctgcgcgcactggggctgcgggtgctggatggcagcgcgaattatctgctgttccaagcgccggaaacactgggcgatgccctgcggcagcgcggcatcgtgctgcgcagctgcggcaactaccccggactggacggcagctggtaccgcaccgccgtgcgcaccgcgccggaaaaccagcagcttttaaaaaccttacaggaggtgcttgcatgagccgggcaaaatgtatcatggtgcagggcacgatgagcggggcgggcaaaagcctgctgtgcaccgcgctgtgccgtatttttgcacaggacggctaccgggtagccccctttaaaagccagaacatggcgctgaacagctttgtcacccgggatgggctggaaatggggcgtgcgcaggtggtacaggcacaggccgccggcatggaaccggatgtgcgcatgaaccctattctgctcaaacccagcagcgatgtaggcagtcaggtcatcgtgaacggcgaggtgcgtgggcagatgcccgcagccgcctacttcaaactgaaaaagagcctgatcccggacattttagccgcctacgacagtctggccgaagaggtagacatcatcgtcatcgagggtgcaggcagcccggcagagatcaacttaaaggcggacgatatcgtcaacatggggctggcaaagctggtggatgcaccggtgctgctggcgggagatatcgaccggggcggcgtgtttgcgcagctgtacggcacggtggaactgctggaacccgccgagcgggcacgcatcaaggggctggtcatcaacaagttccgaggcgatgctgccatcctgaagcccggccttaccatgctggaggaaaagacccatctgccggtgctgggcgttgtgccctacctgcgggtggacatcgaggacgaggactccctctcctcccgactggaaagcaacaccgccgtcaagccgctggatgctgccattctgcggctaccgcatatctccaattttacagattttatgccgctggagcagcacccgctgctaagcgtgcggtatgtgcaaagcccccggcagctgggcgcaccggacgtggtcattctgccgggcacaaaaaacaccatcgatgacctgctctggctgcggcaatgcgggctggaagctgcggtacagaagctggcaacctccggcacaccggtgctgggcgtgtgcggcggttaccagatgctgggcgagacccttgccgaccccgagggcaccgagagcggacgcagccagaccgtgcgcgggctggggctgctgcccatccagactgtgtttacggacgccaagcaccgcacacaggatactgccaccgtcaccgcgccgcagctggcgggggcagtgctgaccggctaccagatccataccgggcgcaccgctgtgcagggcgtgcccttctgccgccttgcagacggcagcgccgagggctgcgtaaaggacaacgtggcgggcacttatctgcacggcctgtttgataccggggagctgaccgaaaagctggtgcagttgctgtgcagccgcaaggacatctcccctgccagtgcgccgctgctctccatgcaggagtaccggcagcagcagtttgacctgctggccgacggcgtgcgccgggcgctggacatgaacgccctgtacgccgccatgggactggaagggaggaacaccctatgacaccgcaacaccatctgcccgccgacattgaacggacgagcctttccatcatcaccgcagagctggacgcaatgggtctgaccccgccgccggagactgccgccgtggtcaagcgggtcatccacaccaccgccgattttgactacgcccgcaatctgcgctttacccccggcgcggtggcggcgggggtggcggcgctgcaagccgctgcacccatcgttaccgacaccaacatggcgctttccggcattacaaagcccgggcttgcgcggctgggcggcacagcgctgtgctacatggccgacccggaggtagccgcgctggcaaaagccaacggtaccacccgggcggtggcgtccatgcaaagagccgccgccgaacaccccggtgccattcttgcggtgggcaacgcacccacggcgctgctgaccattgccgacctgattgaaaccgccgggctgcgccctgcgctggtcatcggcgtgccggtgggctttgtgaacgtggtggaaagcaaggagcggctgtttgaggtgtgcaccgcccacggcgtgcccgccattgtggccatggggcgtaagggcggcagcaatgttgccgctgccatctgcaacgcgctggtgtattccgccgccgggatgctggaccccaccgaccggggatggaaataatatttttattgttcgcgttcaaagtgctctgcggcgcactttgaacgctttttcagccaattctcccctagaggggtattctttcattggctggtatggtatactcggcttagttcaacaaatcgaaatttatatataaaggagaatattgatgaaactgtttttatgttcgcacttttcaagtgtaggaagtctgataaaggaagaaattgaaaataaaaaaatcgcatttattccaacagcttcgctgcgtgaaggctacaccggttatgtcggctcggctcgaaaatcattcaaaaagttgggagcaatcgtaactgaaattgatatttcaacggaggcttattcaacgatacagtctgtttttgaagatgc

SEQ ID NO: 13735 - DNA, 9211 bp, Unknown
  gut microbiota DNA sequence
aatacagccgcccatcggggtgcgatacaagcaagttgctatccgatgacctcaaaaacaaattgtactacgatggttttcaaaaagtgctgtatcactactcgcaccaaataatgaaaatccgaaccttttctcaataggagaagggttcggattttttgtttcttcggaaagcaaaatgccgcggttgcgcagcaacaaaagccccagtggggcttttgagcgaccgaacggtcttgcgttagcaagatggaggggcctccgccccgacaagtgaccataaaagaaaaataccgcccacgcagcgtagcgatgattttgtcgggtgaagtaagcggcaaaatgaatcgggtgtgttgcgggacggtaagttctttcgtggacttttcctcacggaagtggtgggtctcacggtgataaccaaccactttctgtgcctgtgttcaaaatgaacacgaccacattttgtggatggcttcaaaccaatccacaagagcagtgggatttacaagaaaaataccactgtatgtgaaattcgtcaagagggttttggaaaacccctattctcacactcatccaccctatcatgtggggaaccacgggcatgatcttgtgatcatgagttctcccaaaatgctgaccccaaatgaatacgatgtgtttttcagctttctggaaaacacggtgatgaaaaacgcatactgacagtaaaaccgctccgagcgttctgcccggagcggttttgcgtcagcagtatttatgcagaagggtcatagacggagggagaagtcatgcgtccttgcacagcttggtcaattcttcgatggcggcatcctcatccgcaccatcggcggcgatggtcacggtctcgccgcacttcacggccagacccattacggcaaagatcttcttcatgtcggcgactttgccgttcttagtcatagtgaccttgctctcaaagcctttggcagctttgctcaggataccggcgggacgggcgtgcagaccttctttgtcctgaatggtgatatcgatgctcttcataaaaatctctcctttttggaatcgttattgtaagtgctccagcacatagttcatatcggaagtggtcttgagctgttccagcgcatcctcgtcttcaaggatctcgcagacattgcccagcaggtcaagatggtcgttgccgacaccggcaatgccgaacacgaggtaggctttttcatcgccgaagtccacgccctgcggatattgcagcaggacaacgccggactttttaacggtgcccttcttctggctggtgccgtggggaatggctacgcccatgcccatgtaggtgctcaccagcttttcgcgctccaccatggcatcggcgtaactgtcatccacatagccccgctttgccagcagcgcaccggcggcacggatggcttcctccttggtgacggagggcagacccagctggatgtcctccgcctggatcttcatcacggaatcgttggctttggaagcctcggtcacggcagccgccagaggggctacggctgcattgcgcaggtcggatacgatctcctcattggcggcagcttcggccttggcatccagtgccggggaagtggaggtcagtgcgttgtacaatgcgtccagatgcggatctgcaaggaagttatccaatgtaacaagctgtgcctgcggggcgcacttggcggcgcggtcagccagaacgcgctggcagaccaccacgtccgcgtcggcggggatggtatccacgctggagttggtcacggtcaagtcggggcgctccgccttaatgcggttgtggaacttggtagcacccatggcgctggaacccataccggcatcgcaggcaaagacgatcttgcggatctggccgacattcacggcagtaggctcggggatctcgcccttggcctgtgccttcatctccttcatttcgttctgggcatcggtcaggctcttggtgtgaccggaggtcgctttcagaatgaccgaggacaggataaaggagactgcaccggcgatgacaacgcccagcagaacggtgagaatggaatcccggggagccattgccatgtaggcgatgatggaaccgggagaagcaggaccggacagacctgcaccggtcatagagtagaacaggatggcacagaagttgcccacgatgggggcgatgatgatcacggggttcatcaggatgtaggggaagtagatctcgtggatgccgcccagcaggtggatgatcacagcaccgggagcggactggcgggtggtgtcgtccttgcagaagaagcagtaggccagcaggacaccaagaccgggaccggggttggcttccagcatatacatgatggaacgaccggtctcagcagcctgacttgcaccgatggggctgaagatgccgtggttgatggcgttgttcaggaacaataccttggcaggctcaataaagatggacaccagcggcagcaggctgtgcgccacaaggaagtccacaccggcggtcagcacggtgaggatggcggtcatgaacgggccgatgacgtagtagccaaggatggccagcagcatacccagaatgccgacggagaagttgttgaccagcatctcgaaaccggcggggatatggccttccaccttcttatcgaattgcttgatgacccagccggccagagggcccatgaccatggcgcccatcagcatggtgtagtccgagccgcagatgcagcccaccacggcgatggcggcgatgacacggccgcggtcgcctgcaatcatcttgccgccctgccctgcaatgaggatgggcagcaggtaggtcagcatcggggagaccatgctggccagcttttcgttggggaaccagcccgcttcaatgaacagagcagtgaggaagccccacgcgatgaatgcgccgatattcggcatgaccatgccgctgaggaacttgccaaagcgggaaacagcgtttttcatttgtagctctcctttttcacttgaaaggcaggcggtgcagctcctgtggcatgggagctgcggcctgcggacggttgttcggaggagctttcgtttcgttctggcactattctagccgatactgcgccggatttcaatggtgacaagcggtggggttgtcaccggaggatggtgacaccagtgggctgatacggcaacatttccaatggatgcgcgggtgatttgtgcatatttgctgatgcgccgggatacaagacgggaacaaggaagcttttgtcaccgggcaatggtgacaaaaaacacacaacttcttttctgcgttgggggctggcagacggggtggcactatgctacaatagaagcaatgggtaacttttgggaaaaggagagaagcaacatgggtgcggtgtatcgtgaggaactgtcggcaaatgcacggaagctgatcgagcagctgctcagccttccgcagggctgggtgacggcggcggcgctggctgaaagcatcggggtcagccgccgcaccgtgctgcgggagctgcccgctgtggagcagtggatgcaggctgccggggcgcattttgtgcggaatcccggcaagggtctgctgctggatgaagcgccggagcggcgagacgcactgcgcacccagctgaacagcggcgacaggaaagaactttcccgcgcagagcggcggcagcagcttttgacaaggctgctcagcgagcaggagccctgcaaaacagcggtactggcacgggcgcttggcgtttcggaaagcacgctgtctgcagacttggatgaacttgagaccaagctacacccctaccgggtggagatgttccgccgccccggcgtgggggtctggctgcagggggatgcttcttcctaccggagggtggtgtctgccctgctgcgcagcagtatgccggaaaaggaactggcagaggtgctctgcggacggatgccggaaaacgagatcttctcgaccctgctggatacaaaaacggccgaaaaggtctgggcggctttgcagcagtttgaacaggaagaacagctccatctgccggatgcaggctttctggcgctggcgatccattgcaccctgaccattcagcagctgcggcagggcggcgacaagggcagcgcccccagagggctgcgcccggcgggcaatcatgctgcccggctggtggcggcgctgaaccgcgccttcgggctgaccctgccgtctgaggaagcgcagtatctggaactgtatctctccgcctatctgggcgcagaggacccttggggcagcgcacaggagatggagttgcggaatctggaagccgcccttatccgggaaatggaaaaggcgctgcacacagacctttccggttacacctccctgcgggatgacctgtactgccacctgcgccccatgctgctgcgggtggagcagaacattcgtaccgaaaacccccagctggacaccatccgcaccgactaccccggcctgtggaaagccacccgcgccgcctgtgatgcggtgcagcagcaattcgttctgcccgccatctcggacgacgaagcggcctaccttgccatgcactttggcgcagtgctggaacagaatgccatgttccggctgcggctgcgggtggtagtggcctgtccgctgggcatgggttccagccgctttctggcttcccggctgggaaacgagtttccctctttgcaggtagaggggtgctgctcggtgcgggagctgaacactgccgacctgcgtcggagaaaaatcgacttcattatctctaccgtgccgctggaactggattacccggcggtgtgcatcagcccttccctgctggagccagaccgtgccgtgctgaaggacgctatcacgcggtacagccagaaccgcgcagaaccggaaccggcggtgcagcctgtgcaggatgcaccgcacgcaggctccaagctgcagtattatgcacgcttgacccggtccatgaccgggctgctggaacatctgaccatccagcccgtcaaggctcccggcagccgcgctgccctcatccatgcagcggcgcagctgttctgcccgcaggaagcggacgcccggctggtggagcagcagcttcgccgccgtgaaacgctgggcgatacctacatcaaacccctgtatgccctgctgctccattgcaggacaagtgcggtaaaggactgccgcttgggctatctgcaggcacagccgccggtctatgagccggggcgcatcgtgctgggggcactggtgctgctggccccggatgacgggaacggcgtcccggtggaggtcatgcagaatgtcagcgggcagctgatcgaaacgccccggctgatggaggtactgcgcacaagcgtgtgcatccggatgtagccgagcaccccgccatcatgggccacgagttcgccggtgatatcgtcaaggtgggcaaggcgcatcaggataagtttaagcccggcatgaagttcaccctgcagcccgccctgaactacaagggcaccatgtggagccccggctactcctacgagttcttcggcggcgacgccacctactgcatcatccctgccgaggtcatggaactgggctgcctgctggagtacaagggccgtgcttactacgaggcttctctggccgagcctatgagctgctccatcggtgctttcaacgccgcctaccacaccaagatgggtgtgtaccatcacgatatgggcatcaagaagggtggcaagctggcgattctggccggtgcaggccccatgggtctgggtgctctgacctacgcactgcaccgtgatgtgcgccccggcatggtggtggtcaccgatatcaacgaggatcgtctggcccgtgcggagtccctcttccccccgaaggaggtcaaggagaaggacggcatcgacctgtacttcgtcaacaccgccaacatggcagaccccgctgccgagctgcgggagctgaccggcggtaccggctttgatgatgtgttctgctacgcccccatcgcgccggtggtggagctgtccagtgctgtgctgggtcgtgacggctgcctgaacttctttgcaggccccaccgacaagcagttcagcgccaagatgaacttctacgatgtgcactacaattctacccatgtcatgggcaccaccggcggtaataccgccgacatgatcgagtcgctggaactgaccgccgctaagcgcatcgacccggctgtgatggtcacccacatcggcggtctgaacgccgctgccgagaccaccctcaacctgcccaagatccccggcggcaaaaagctgatctatacccacctgaccatgcccctcatcgccctgaccgatctgcgtgccaagggcgaacaggacaacgacccccgctataccgcactggctgacatcgtggatgcccacaacggcctgtggtgcccggaagcagaggaatatctgctggcaaacttcaacccggaggactaagcggaacgtgccatgggacaggacaaacgcagacaggaggaatcccccatggaacaacgccgcaatcagatcgtggagctggtgaaccgcaaaggcagcattagctttgcccagctcaaggaagctttcccttccgtttcggaaatgaccctgcgcaccgacctgaaagcactggatgaagcccgccgtgtggtgcgggtgcatggcggtgtcaagtcggtggagcaggtggtaggcacagatgacctgctgagccgccgtgccgcccgcaatgccgaagcaaagcagatcattgccgaaaaagccgctgctctgctgcgtcccaacaccaccctgtttctggattccggcagcaccgccacagcagtggcccggtgcatcccggatcagcccatgctcatctacaccagcggcctgagctgcgccatggagctggcaaagctggaaaagccccatgtgtccctgccgggcggcagactgaaccggttcagcctgagcgtctgcggtgcacagagcatccagacgatggagggcatcaactttgatctgctgctgctgggcgtgaccagttacagcccggaaaccggttttacctgcggcgtggaggatgaagcacggctcaagcagaccgtgctccgccgctgtgactgtgagcagaaagccgtgctgctggattcctccaagatcggactgaaaagtacattccacatctgcgagctgtccgatattgatattgtgatctcggacggaaagctgcccgtagaatttttacaggcctgccggaacgcaggcgtaacagtactataaaaggagcgttattatgaagatcatccgcgcaaaagattatcaggatatgtcccgcaaagcggccaacatcatctccgcacaggtcatcatgaagccggactgtgtactgggtcttgccaccggcggcaccccggtgggcacttatgcccaactggtggactggtacaacaaaggcgatttggatttctccgaggtcactactgtcaatctggatgagtaccgcggcctgcccaaggagcacccccagagctactggtatttcatgaatgagaacctgttcagcaaggtgaatatcgacccggccaagaccaacctgccggacggtaccaatctggacactgccgccgagtgtgcccgttacaacggtatcatccacaagctgggcggcatcgacctgcagctgctgggcatcggccccaatggtcatatcggcttcaatgagccgggcgaagcctttgagctggagacccactgcatcgaccttgcgcccactaccatcgaagccaacaagcgtttctttgacggcaacgagaaccttgtccccaaacaggcatacaccatgggcatcaagaccatcatgcaggcacgcaaggtgctggtggtagccaacggtaaagccaaggcacaggccgtcaaggacgccgtgaccggccctgtgacccctgcctgccccggcagcatcctgcagctgcatccggactgcatccttgtggcagacgaggaagcactgagcctgctgtaaactcccaaagccaacttcttcatttaccataactttgcttaagatccaaccaaagcacagaaagagccggactcgttgcacgggttcggctctttctgtcagaaataagatttatcttgctatcttacgcaaagagcaactccaaaagagccgtcatggagatggtgggttcgcctgctgcgggatttacgctgaaaatacgctgaaaagaggtcaccccgatcggtggcctcttttttgctgccgcgaactgtctggctgcggcagcggataacagcaaggtccattgcgctttgttttgcccggatgcgcacccgcagaaagctctccctcgtcaaactgcccaaaatacgcccttaaaagtttacttgacgcaatttcaaaatcaatatataattgggtcagaaaccaatcatagaaaaggatgattcccaatggcgcgcagatacgacagcaaggaagcaaaacggcggatcctgaccgcctgtgtccggctttttctggaaaaaggctacacgaacaccaaggttgcagaaattttaaaggaagcagatgtttctgccgggtcgttccagaatattttccgcaccaaggacggtgtgctgaccgagctgatcggcatgatgttcagcaggcagttcggcgcggtaaggccgctggcggcaaacgccccctcgccggtgtacctctacgcggtggaaacggctttgcagctggcggtgaccgagctgagcgagaatctgcgggatatctatgtggaagcgtacaccttccccgccacggcggagatcatccaccgcagcaccacggcggagctgcaggcggcgttcagcgcgtatctgcccgggtgcgccgagtgcgatttctacgagatggagctgggcacggctggcatgatgcgcggctacatggcacggcggtgcgacccctactttacgctggagcgcaaaatacggcgctatctgagcatgagcctgagtgcgctgcaggtccccgcacaggagcgcgagcaggtcatcgcttttgtggcggagatcgatatgcttgcccaggcgcggaaggtggtagatgccgtgcttgcatcgctgtccgtgcagtttgatctgaaaggataacaaggtttgatgacaaggaggtaagtcatgaaaaagacgagagttgccattctct

SEQ ID NO: 13736 - DNA, 28162 bp, Unknown
  gut microbiota DNA sequence
aactcaattacatcttcccagaaattccccagatggacaacgcaaagtgcattgtgagagactctattgcgaaaaccgtaggaaaatttgtacaggaaagctgcgataagagcgagtcgaaagcagtgactgctacagaagacctgtataatgcttactcagactattgcaaggagaagaatatgtgggcgtgtagccaaaaggcattcacgaaagaactcacccaaatgaagatagagcatactcgtttccggtgtacaggagaggatatgattgcccgaaagaatccggtatctgctttcaaaggaatcaagctccgtccgtaacttctgattcttcgatgatacgttatacctctgactctaagcaccataagcgataaccaagggaggtatcacaatgctggaaattgacgaaaaggcgatggcctattgtctggtggaagctctctttgcagcaggagtaatcaacctgcccacttatcagaacttccttcggatgaagcgtgagcaggaggaagaaccgcctgcaaaggcttcgtaaacaacagagaaaggctctggtggaggattctgccagagcctttctttttatccgaaaaagcaagaaaatggaggtaaaaacatgcgagtagcagtatatgctcgtgtctcaacagagcatgaggcgcaaatcaatgcgctggaaaatcagttggagtggtataaaatcgaatgttcccggcattcggactgggaaatcgtggaggtctacgtagaccaaggcatcaccggaacacaagcacagaagaggccagagtttttgcgtatgatggaggatgcaaagaaaggtaaatttgaccttatcattacccgtgaggtgagccgatttgcacgaaatacggtggatgctttgtcctatacgcgccagatgaaggctatgggcgtggatgtgctttttatcaatgacggtatcaacacggctgccgatgatggcgaactccgactgtcgctcatgtcttccatggcacaggatgaaagccgcaaaatctcagaacgtgtgaaggcagggcagaaaatcagtcgggaaaggcacattctgtatggcaacggaaacatcttgggattccgcagggagaatggaacttatgttcccgaaccggaacaggctgaaacggtaaggttgattttccagatgtattcgagtggtgaagtcggcctacagaaaatagtcgcagagttatatcgtcttggacggttggatgcgggaggtcatgtttcgtgggacgcttccaaggtgagtcgtgtcctgcacaatgcaacatataagggatgcatttgctataataaatcccatagtgacggctacttgacgcagaagcgtatcaaaaatctggatgaaagcagctacatctatgtgaaaggggattttgagccattggtttcggaagaaatgtgggagagatgccagcagattttggcatcgagatcagcacgagtaatcgatgaaaacggaaaaaagcacaagtacatgagaaatacaccaaaatcggtctggacggcaaaattgcgttgcagctgtggtgcaggatttattcagttcaagtggcgtgtgaaccgggatggtgctgtaattcatggatttcagtgctaccgccgtacacgcaggccgagcatcagctacttgcaggagcatggccttgatttgagcatcagctgccaaatcaaggctatcagtgagtggaagctggacttgatggcggcaaaggtgtttgaacatctcacatttgacaagggaaagacagtcaaagaggtctataaaatcctgagccgctgcatggcagaggaaaagacggttcgtatttccagaaaggcaatgctggaaaagagcatcgctaagcagagagagcggctggacaagtatattgacctgtgtgcagacggcatcatcaccaaacaggaacttatggaacgtcgcaaaggcttagacaaccagatcgcagatctgcaatcccagtatgagagcgtagaacaggaggatgaacgcagtggagcgctggacatgaatctgatctcgcagaagctggatgaatggcagcgggcatcaaagaacgatgttgatcgggagcttatcaacagctgtgtggcgcaaatcacgcctttgacaaatgaagaatttcgctgggcactcgactttcagatgtcagaggtacgggcgagaaacgccgcagcatatacgatggatggctttgtagagatggcacgcttttcgatttcctttgaggaggcaaaggcttttaaggcatcccgaaatcagggaatccgcaaaaatgaatggcaggatctcacggtggttgtgggaatctggtcgaaaactcaaaagtaggaggctgtgtcggctgtgccggttgtgtcagagattttcaaaacaagttttattatatccttatatctccacccataaaacacctgaaagacacgaaaacataagactgattcgcaaaaacacggacacagcggacacacttggtacaagttaggcgtatctgaagcagatataatgatatattatacccttggatagaaagaccagtaagcaaccacatcagcttactggtctttgatttttacagaaaaacggaggaaaaatcaatggcagaaatctttgaaaaagtattggtggaggtgatgaaagcagtcggaaaaggtgctgcgaaaatcattgtctggacggctcatcaaatcgaaaagaaataagataatcaaaaattttggaggtaaagattatgtccgcaaatgttgaaacgatgttctctgtccgtgagaccccttggcacggccttggccgtatcgtgatggatgcccctgcaagccgtgaagccttggagctggccggtctgaattggcaggtagagagccgcaatatctattctggcacgggtgctatgatccccggctatcgtgccaatgtccgcagcaccgatgatgctgttctgggtgtggtgtctgaccgctaccgcattgtgcagaacgaagaagcattccaattcaccgatgacttgcttggtgagggtgtcacctatgaaaccgcaggctctttacagggcggcaagaaggtatggatgctggcgaagctgccggagaagtacatcatcgccggagatgaagtaaccccatatcttgtgctctttaacagtcacgatggcagttctggtgtaaaagtcgctatgaccccggttcgtgtggtctgccagaacaccctgaatctggctctgggtactgcaaagcgcatctggactgcccgccataccgaaaatgttctgctccgggtgcaggatgcccgtgagaccttacagcttgccaacagctacatgggggagctgggcaaaggtatccatgagctgaccaccatcaagctgtctgaccgcaaggtgcaggagtttatcaacgagttcttccccatcacggaagacttaaccgatggtcagcggaagaacaacctgcgcttgcaggaagatttgaaggctcgctattataatgcacccgatctggaatgggtcggcaaaaacggctggcggttcgtgaacgctgtttccgactttgctacccatgcagaccccatccgtaaaactcgcaactacaacgaaaatctgttcctgcgcaccgcagagggcaatcccatgatcgacaaggcttacaagatggtgctggcagcagcctaaaggagtgaactatgaatgatgtgagcaaccgggctgtccgggaattttctgagttccttgaccgcatcgaaatcaattttccaaaacctacctgcaccacagcatacgagatcacgatgaaaagcaccatcgtcagtgccctgattacgctggacaccgaaaagcagatggacgagcgtttctggaaccatctccgggtgcagcggaatattctggatttcctgtatgccctctggctggatgatgaccgtaccttggtagacgagttttccaccattatcaaagacttggtggaatatgatttctccattgtagaagaacagatgaaagagaggttgaacattgcatgaaaaggcttgtatctacattgaatttacccaaagaagattggctccgttaccgcaaatgcggcattaccggcacggatgccggagctatccttggcctgaatccctaccgttcggcatttcaggtttaccacgataaaatcagcgataccattgaaaatatcgacaacgaagccatgcggcagggtcgtgatttggaggattatgtggcgcagcggttctccgaagaaacgggttttaaggtgcgccgtgcaaacgctatctaccagagcgaggaacatccgctgcttctggcagactttgaccgcctgatcgttggacagaaggccgggctggagtgcaagacagtctcgccgttttctgcggacaaatgggcagatggcaaaatcccggctcactatctggcgcaggttgaccactacttagccgtcagcggtttcgactgctggtatgtggcggctctgattttcggcagagagctggtgatccacaaaatcgtgacggataagcaagtgctttctgatctcattgatgaggaagaacgtttctggacgaaccatgttgtgccccagattccccctgcacctaacggttgcgagtgtgacacccagcagatcaaccagatgtatgaggtggataaccgggataagaccgctgacctgagtgctctgcatggacttctggataagcggcaggagctttccgaccaaatcgagcagatggaacaggagaaaacggccatcgagcagcaggtcaagctgcaaatgcaggatgctgcctatggcacagcaccgggctataaggtatcgtgggtatcttccgaaagcaagcgtgtggattcccaacgcctgcggaaagagcagccggatattttcaaccagtacagcaaaaatgtaagcagtcgcaggttcaccatcattcatgcggcataattgtatggcggcagggagcaacttctctgccaccttttttcttggaggtttattatggctacggaaaatccattcgtaaaattatttgctatcgacttcaaagatcatctggaagtcaaaaagtccggcaacacggaactgaaatatgtaagctgggcgtatgcttgggcagaggtgaagaagttgtatcctgctgccagctatgaggtcaagaaattcaacggcctgccctatgtttatgaccccataaccggcttcatggtgtacaccactgtcgcgattgagggcgtttcgcacgaaatgtggctgcctgtactggatggcgcaaacaaagccatgaaagctgtgccttatacctataccactccgaaatgggactacaatcctcagacccgccgccgtgaaaagatcggcatggaagaacgcaccgtagaagcagcctccatgttcgatgtgaataaagccatcatgcggtgcttggtgaagaacctcgctatgtttggccttggcctctatgtctatgccggagaggatttaccggaagatgctgcaccgcagccggatgcagaaccgcaaaagcagccgaaaccgagatccgctaccccgaagcaggaacagccgccgatgccctgcatctgcgctcgctgcaatcagcctattaagagggttaagctgaaggatggttccatcatgcaggcggcagagtttgcagccacccatgatggaatgtgcgctgactgctataaggctacccgacttaatgtggcataaaggagaaatttatatgtcttgcaatgcgatgaccgaacactatgaagaaatcactgtctgcggaaagcctgcattattcactaacttccgcataaaaagagataccgtcccggatggtctatatgcctacgatgtgcggcatgatgatgactgccgggggattccctgtgagattgcaccatttatcatggtcaatcactggggaacgattattcttgcagagccgttggagctgcccaatgacggacggcggtacattgatgaagagacggactggaactatgatccgtttggaggagcagagaaaaatcaaaagccctgcgtgacggtggaagagtttatgaatcagtatctgaaccgttgataagagcgagccgtgtcgttccttataaagttcaaaagtcatcgcaggggacggacggtgcgaaccgttcgtcaacggagataatcttttgaagtttatgagggatgactaaggctcgcaggaaaaagtattaaaattgccgtgggtacagaaaagtatcaatcatagtgtgatgaagccgatttgtcttagcaaatcggtgacgctaaaatgacgttcggcatttttgatacggaaagaagaggctatgagcatttatggttattgcagaatttccactgcaaagcagatcattgaccgtcaggttcgcaatatcagggctgagtacccgactgctcacattgtgcaggaagcctatacgggaacttccatcctccgaccagaatggagcaagttgtaccgggttctaaaagatggtgatactgtggtgttcgattctgtctcccgaatgtccagaaacgcagaagagggattttcattgtatgaggatctctaccataagggcatccggctgatatttctgaaagagcatcacattgatactgaaacttacaaaaaagccctgtccggcagcattgccatgacagggacgaatgtggacttcatcttgaagggcatcaacgagtatctgatggtcttggctaaggagcagatcaagctggcctttgagcagtccgaaaaagaagttgccgatctgcaccagcgtacccgtgagggccttgtaacagcaaagctgaatggaaaacaggttggacgtaaaaaaggcactggatttgaaaccaagaagtctaaagcggccaaagagaaaatccgcatccattgtaaggcttttggtggtacattggacgatgtggagtgcatgaagctgacagggcttgcccggaatacctattataagtataagcggcagattcgggctggattggctgacgagggaaaaacttaagaaggaaaagttgttatgaagaacgaaaaatgtgtaaaagatgaatcccatagcgaatttacaaaagaggaacaagaggaatttttgaatttgctgggtcgaataaccccagagcagcgtgaagcgctgaaaaaagttctgaagtcctttacttaatgaagaaggatgccgggtgacacaatggttgctcgacatccttcttttttgtaaatgtgcgcattattcaggtaaaaatgcttgaatcaaatccaagatagcagttctttgtgatggagaaagtctatcccatgtggtcaaaagagatttctgctcttctgttagatgatgaatggcagcgtcctcttcaaaaaactgcgagagggtgatgccaaggccatgacaaattttttcaatcgaggtcacgttgggctgaaggtttcgtctgcgccacgttgataaggtggattgcgtcagaccagagttctcggcaagggtgtattcagaccatccacgagccaaccgctcccggtcgatccttcccagaatgtcaaagtttggcttctcgcgttccatgtcattgccctccttggataaatcgtagtgctacttacgattttaagtgtggatgccttgacaggtaattctataaatcgtataattttaacaagataaatcgcaataatgagcagcgattttgtcttttttgatatgaaatgctcacaaactgcaaaggagatcatgtagctatggcagatttttgctatttttgcaagaagaaaattggattttttgatacatcatcaaggacggcttttgcccagaccgtatgcggaaattgtgtaaacaaagttaatcgcgttgcaatcctatacaatagggaattttcggaatacacgctatattcactggaagatgccggaaagatcctagagaaagcaccgtcttttgaaatgtatataagtaggtatttgaaaattcgtgctgaatatgagccacaaattcaacattaccaagaattggctgaaaaagagaaaaagacactaaaggaaatcgaaaaaggcatggatgatgacagaagagaatacgaagctgaactgaaagaatgtgaaaaggaatggaaagcagagcgtgcatcgtctgactataaaaatgaacttaaggagtatgaaaaagcaagacgaagaggcgatgaagtagcagcacgcaccttgaagagacttatggatgctgttgatgacaactatcgagcggaggttgaaaaaaagcagaattcatataataggtttcaaagagaaccacttgagttatgtgaagagtggaaaagcattgttaaatgctacgaagcgatagttaatcgattgagaaattatcaggcggttaaagagtatgtttttcgtgtgacggaggttccatcggaaaagctagtcctaggacatgagatagaaagacggtcagaagaaaaaagcgaaggcagagaatatattctgttgtatttgaagaaaatccttaaggttgatgagtcgcgattgcaagaggcagcgaataatgatgtgattctcgcagaatttggaaaaagctggataaatagtggagttgaaaaactacttattaaggagcgactaaatgaaggaagcatagaaagacttcagcatgcaattgaatcacataaaattctgctaagtactgtaagcgatccggatattcttagacgagcggaagatgcgatggatgaatctgaaaaaactttagatgagtgtatgaaaacgcggggtgatttagataaagaatttaaccgtaaagatttagaattaaaagcggcatttaatcgattgacggaaccagatactcggaagctggcttcagaaaacaataccaatagtgcaaacatagtaaaagctacaactacaaagcaatcgaataacagtcaaacggtaacaatagcacagcctgccgcagtaaaaccgagtgaaaaacaggaaaaaggtgttacttgcggtaactgtgggaaggaaaacaaagatggagctaaattctgtcggtattgcggaacaccgcttgttgccaaatccatccggttttgcacggaatgtggacataaaataagaccggggggaaaattttgtcctgcgtgcggtacgaaagttgaagattaaaagaaatgggtgatgtaaaatgagcaaaaaatgtatttactgtggtgccgagttagaagacgatgaccttttttgtgatgtatgtggtcggaagcaagaagagaacacttcacacaaggcagtacagacgccatcacacgaagaaacttcagctgtagaagaaaagactaaggaagaggtcgttttagatgtttcccaagctacggagccagagcctcagcaagcatccgaggcaaaagatatagtagaagtgaagatgtcagaacctgaaaaggcagaagaaaagcctgaacagaaaagtgaaaaagtattaagagatgatgctgctaaaactgtgacaacgcaacctaaaagtggcatacgaaaagtcagggatattgtgctttggattttgaccgttgttatggttctttcggtggttgtagccgtaatatccgggatgggtgtaatgtcagtggcgtatattatcgcagctgttgttctttgtccaaagtttaaaccggaaatgggtttctggaaacgcattttgattatgtttggagcgtggattgcggtctcggtagtgcttgctatactttgattaacgtaaaaagagcattgcggaggaacagatgaaagattactataaaatcttacaagtagcatctgatgcgtcaccagaagtaattcagatggcatacaaggctcttgcaaaaaaatatcacccggacttaaatccgggacaggaagaagcaatgcaagagaaaatgaaagatctgaatgaagcttatgaaattttgtcggataaagataaaagatggcaatataatcagagcttttatcaaaatgaagaatcgtcacattactcggaatcggaaccgcaaagaaactcttggacagaatcatcgtatagagcacaagcggaaacagcatcacaaggcagtaaaactacttcaggaaaaggctgcgcaaggactggctgtggatgtttgactgtgtttattgtgatttttatgttcatgggtgttgtaggaagtttttcgttaacgaaagagaataaatcagcttctgcgtcagaagtaagcacagcggcatcaatgaacgatcagtcagagagtaggacggaagaaaccatgcccattagtaatgagacaaaggcttcctctgaaattcagaatggtccaatctataactccgttgatccgcctgattctactgattctaggcaagaaattctgctggaggcaaccgggagtaatgcaatgctgacgctctggacatatcgggatggtcaatgggtcgaggacatgagcactacagcagcgattggctcagatgggcttacaacgaataagacggaaggcgaccacatgacaccagagggaacgtttccaatctattttgctttctctacaaaagcaaaaaatacaaaaatcgcttttgaaacaattagtgaggatagcgtatgggtgtgtgatccagagtctgtctactataatacccttcaatctaagaataatcccgataaagattggacagataaaggcggagcagagaatatgtacccaaaattctcgaaaggttcttcaaatgcctgtatttgtttcggctttaatggagatggctggagtccatatggtgcagtagcttacggcggatcggcactcttcattgatggtgttggtgagaatggtaaaatgaactctggatatggtgatattaagatttccggtaaggatatgacaaagctgttgtcgtatctggactctgactataacccaacgattactattcgagcagcgcaataagctgcaaaaagaccaccgctttcatttatgatagaaagcggtggtctttcactatcggaaaaaacttataaatcactgatgagaataaaattttctaaaatgatagaataaaaactgaaaatgaggtatactaatagcgggaaggagttgaaagaatgctttgccagttttcttttcagaattttaagtcttataaggatgaaacaacatttgatttccgtgcaatggcgattccggagtttcaggatgccttgatccgacaggagaaagcagaagacttacttccggtcagtgcagtctacggccccaatggtggcggtaagacgaatctgcttcaggcattcttttgcctgattaaccttgttgtgaagccgattcatgcattggagaagaatcggcagccaatgattttccagcagggcagcagtgtggctccctttatgctggatgaaagttctgcgaatgaacctacgatttttcaggtgttcttccgtgtagacgagaaggaataccagtattacattgcgctcaaggaagaaattgtctttgagtctcttctgtggcgtacacttggtggtaagaagacaggactgatttttgaacgagacggccagaagattgaattgggtgcaagtatcaataaggcaagcatcaacttggacgtcaacccgaagatgccgtatctttcttttttggcgatcaactacaatatccctgtgattgcagaagtgcagaattggtttgaatcctgtattacacagagctacgcaaaccccagagcggaaaacattgtgctggtgtccaagagtgagacgactaaggaaagcctgattcatgcactgaatgatgtaggtattgatttgtccggttatcgctatgatgaggatagcaagcacctgtttacgcagagaacaatcaatggcaaagtctatgagcttccctttgaagcggaatcggatggaaccaagaagatgattgcagccttgccggttctgatggtagcattgcaggaaggccgcacagtggttgtggacgaattggatgccaagctgcatccgaagttgctccgatatgtgattcagatgttcaagaacccggaactgaacaagaagggcgcacaactgctattcagttctcacgacctgactacgatgaagaatacagttttccgtcgtgatgaaatttggtttgctgcgatgaatgataatcatgagagcgagatttattcgctttacgaattccggcaggaggacaatactcgcgtcaagagcacagcggcctttgacaagcagtatctggaaggccgatatggtgcagacccctacctttctaatatgctgacagggagggattgggcatgagtctgaaacctccgaaaaagagtgaccttggaaaaagctggatgaagaatcgccgtgataaagcgaggatgattcagccggaataccacttgattgcgtctgaaggtacagaaaccgagccgcagtattttggcgcaattcagaaaatcatcaatgctaagtaccgtgatagaatccagctaaaggtagagggcgttggcgacaatacggtaaatttgttgatgaaagctcgtcaatacgttcagaataacggcattgtgtttaagcacgtctggattgtctatgacacagatgattttccggcagaaaatatcgacatggtagcacagctgtgcgaagaatacaatgcacaaggtgagacgatttaccatgctgtatggtcgaaccagtgcgtagaactgtggtatttgctgcattttatgtatatggatactgatattgatagatctcgttattggccgaagctaagcgattggctgaaaaacattggcgcagggagttacgagaagaaccgcccggatatgtatgaagtgctgcgaccttacatggacattgcgattgccaatgcaaagcggttggacaaacaaaatgaaggacggaaaccctctgagtcagcacccggaacgaaagtctacgaactggttgagatgctgaagccttatctttcggacacattattatagtagaagggtgattatgccttctcaaaagtaagttcctaaatgcctatagattccattagaatccataggcattttttctgtaaaagatggaagcttcttgttttatgagtggcgggacggtataattaagttacagctatgaatatgaaaggcaggacttttgtgaagaagatattcgtaaaatataaatggctgctgattgcgctgcttatgatttcaataatcgctattccaatggtggttaatatcctctttaagttttccagtgcttttccggctgaatggtcggcaggagatgcactttcctatgtttctggattgcaagctttgctgggtaccattatacttggcattatcactgttgagcagggacaagacgcacaagaagttaataggcgcttaagcgaagaaaataatagactccaaaaaataatgtcacaaaaacttttaccagctgtgaagctgacaaatccatcatgcaaaccgacaatgcttcatcgcggagcactgtcctatgtgccacagtccaaacagttcagaattattcggtcttattatggagattccgtacaacatgaaaccagtgagattcgagtgaatattgattccttggttgaagaaataaagtatattaaaacaatagaattttccttgcaaaatatttctgaatcaattattcggcatattcaagtggatagcgttgatattgttggattccaaggcaaaacagagttagtggcgtgtcgaaattttggacaaggcggaataggaacgctactcgcaacgggcgattctgtggatgtgagtctgaaattgtattccaataatgctatttataaggaactttgggatgacgatttggctggagtggctgttgtgatgcatttgactaatactacgatttctgggacaacattttcggaatatattgaattcggaatgcagaataacggccattaccatatcaactatggagaacccctcaagcagacagggcgagtgaaggtggattgactcgaacgctctgtaattttggcacccgctcaggctgcgattaagtctccccggaaataaaatctgataggacaaagaagaaaaaagctcttggcttctgtaatggaggccaagagcttttttgcatcttgttttgtaagcggaaagaggttccaataatagaaaagaaagcgtacatcggtcgaataaggtggtggatttatgaatggtttaaagttaaaagaagaagtatttatgcacaaaaaatgatcgataaaattgtacaaaaggcgaatggaatctctatgaattttatgttaacatcttattacaacacgtgattcctcggaagcgtcagttgtacttgtgaacaaaggatagtgctcggtagagtgtctatacctgcaggtataattatgactgcagtccgaggctttttctttatccgaaacggagagggtgggtgctatgcgaattgttcggaaaatcaataacagtgccgctgttgctcaggactcccgcgggaaggaactgatcgtgattggtaagggcatcgggtttccggcggttccatacgaactgacggatatgtcgcggatagaccgcacgttttacgatatcgacccgcgttattttgagatgatcagtactcttccgcaggagattcttctggcgagtgccgacattacagaagatgcgcaggtcgtactgaatacgacccttaactccaacctgccgctgacactggccgaccacctgaactttgcggtggagcgttttcgcagcgggttgaacctgacgatccccattgcctatgatatccgtcatctgtatcccaatgagtttgatctgggcgtaaaagcattggatatcctgaaggaatacacgggggtctcgcttccggattccgaagcggtcagcattgcaatgcatttgatcaatgctgaaatcgaaaacagcgagatccattccctcgtaaaggcgttggagattcaggaaggcgtggagtccattgtggagcgggaaatgaacctgaaactggataaggacagctacagttactaccggttcacgatgcatatccgctatctcatccaacggctgatgagcggtactcagagcgaaacggggagtggcagcatggtaaagatgctggccaatgattaccctaaaacatatatctgtgctaaaaagattgcggctttcttgcaaaagcaggagaattggtgctgtaatgatgaggaacttctctatttgatgttgcatatcaaccgcgtctgccagaaaaatacataaacagcttccgttgcttggagcggcactcgccatttgcgggacgtgatccggggacagagcgcatcctacctgaaaacgcttgcgttttcaggtagtttgaaggcgctttgtgcccggatcttttattacatattgaatgaacagcggtgcagggcccgcatcgttttcagataaaaaatcaggaggattagccatgaaacaggatgcattctttcaaactatcatacatcacatcggtggtgaaggcaatgttgcacgaaaacgttttgacggagagcacctgtatgtcactgtgaaagacagcggtatggcagatctagaagaactgaaccgtttggatggggtttccggtacggaactgaaccggaacattctgtccgttaccatccaggaagattttttggaggatgttacaatggcaaaaaatttcaaacagctggcgcagaatatcatgacgttggctggagcaaaggaaaatgttacttccgtatttcactgcatgacccgtctgcgtatgacggtcaaggacgtcaagaaggtagaccagaaagctatcaatgatctggacggcgtgttgggcgtcacctatcagggcggtcagctgcaggtcatcatcggcaaggatctgctgaaggtttatgaagaggtgctgaagctgggttacagcgatggcggtgctgtggacgaaaaactggacggtgacctgaaaggcgaaaagatttcagttgggcaggcagtgattggttacatttccgctgccgtacagcctatggttccggcactgatcggcggcggtatgatcaaggtgttcctgctgctgatctccaaggtttatgctccctttgcggacagttctacttatacgctgctgagcatcgtgggcaatgcggtattttatttcatgcccattctggtcgcttatggagcggccaagaaactgggtgcgacccccacgtattccatggtcgtggccggtgcactggtcgctcctgaatggacggctattgtaagtgctggcgatccagtcaccatgtttggtatcaatgttgccctgaaaggatacggcagttctctgcttcctgcgctgctgctggcaatcgttgcgtattatgtggaaaaattcctgaacaaagtgatccccggcgtgttcaagcctatctttgtcggtacgttgacaatggccgccacctatgccgtctcgatccttgcactggcgcctctgggtcagctggcaggtacctatgtcaccgccgcgatcctgtggttgtataacattgcaggccccatcacggttgctctgtttacggctctgttcccctacatggtcatgaccggtatgcacatgaccttgggagctcccatgatccagctgctgtcggaaactggttttgatcccctgttccgccccggtatgctgctgtccaacatggcagaaggcggcgcttctctgggcatcgccatcaaggcaaaggacaaggcaatcaaatccgaagcactgtccgttgcagtgggctgcatctttgctagtgtgaccgaaccggccatttacggttttaacctgccgctgaagaaacctatgtgggctgtttccctcggcggcgccatcggtggtgtcgtggctgctctgctgggtgcccataactacgagtatggttcttcttccctgtttgccctgccgatctttgaggataccatcgtggctatggttattgcaatcatcgtgacgatcgtagcatcctgtgtacttacgattctctttggctttgacgaggaaatcttgaagaaacactgatctcaaaattttgttcgccccggggagcgcatgcgtcccggggcgttggaggtattatgaaacttaagtccgattttttgtggggtggagcacttgcggctaaccagtgcgagggtgcctggcaggaagacggcaggctgcctgcgtctgctgactttctgccggatgcagcccacggcagatggaatgccatgctgcatccgggaaacattctggaaacgcggtacgattattatcctagtcgggaagcaattgatttttatcatcgatacaaagaggatatccgccttcttgcagagagcgggatcaaggcgctgcgtttgtccatttcatggacgcggatctatccgaccggggaagagaacgccccgaacgaagatggcctgcgtttttacgaggagctgtttacggagtgtcgtaggtacgggatagagccggtggtcaccctgtgccactttgatgtgccggaagccctgatccggaaatatggtgcctgggcagaccgcaggctgattgcactgtatgaaaaatatgctgccaccgtgtttgaccgctaccggaatctggtaaaatactggatgaccttcaatgagatcaacatgatcacccacatcccttatctgggcggtggcctgctggtggacaaggacgacccggagttcaaccagatcgtgtacaatgccgcgcataaccagctggtggcaagtgcctgcgcggtgcggatcggtaaaaaaatcaacccgaatttccgaattggatgcatgatggcggccggaagcttttatccctattcctgtaaccccaatgatgtgatggaagcacgtatcagtaacaacaaaaattatatttttccggatgtccaattgaacggctgttactccggattcgcccggaattactttgcaaaattgggcatcacgctggacgaacagccgggtgatgacgaacttctggctcagaacacctgcgattttctgggattcagttactattcctccaggctgatctccacggatccggagcatctgaaaaatgtggcggatggcaacgccattactaccctgcgcaacccgtatctgcagatcacgaaatggggacgtcagatcgacccggtcggcctgcgcgtgaccatgaatgatctgtatgatcgctatcacaagccgctgttcattgtggaaaacggtttgggcgtggaggatactctggaagtggacggttccgtccatgacccctaccgggtggagtatctcgatgctcatatcacccagatgaaaaaagccgttctggaggacggcattccctgcatgggatatctggtctggggcatcatcgatctggtcagcgcgggcggcggtgaaatggataagcggtacggactggtctatgtaaataaacataacgacggcaccggagacctcgcccgctacaaaaaagattcttttggttggtatgcacagaagattcaggaagagtgctatgaataaagcatataagcagtattttgatctgatatttggctccatactactgactttgggtatctacctgtttgtcacccccaatggtatcaactttggcggtgtgataggcctggctcagattatagagatttttctgcgtaggttcattgcaatccgcagtgatgcaaaccttgttggtatgatcaatttcctcatcaatgtaccgctgttcctgataggataccgggtcatgagccgcaggttctgcatcaaaaccatgctctcggtagcagtgcagacgttgcttctctcagtacttccgccgctcaaagcaccccttgtggaggatgtgctgctaaacagtatcttcggcgctattctctgtggtgtaggtgtcggctatgcgctgcggggcagtgggtgctgcggcggcatggacattgcatgcatgtgtctggtaaagaaatacccagattttaaaagcggacggctttctatttatgtcaatgcggttctcttttcggtctgcctattcctttttgatttggaaactacgatgtactccatcatctttgtggcaatcctgtatacggtggcagataggtttcacgaccagaacatcaatgtggcggccctgatatttacggatgtttccactgtgcagactgaaatcctgcagaagatgggacgcggcgtcaccttctggaacggatacggtgcgtacaccaaccaccctaagaagatccttttctgtgccgtgaacaagtatgaaatcggggagctgcaggaaattattcacgagcaggatcccaatgccttcgtcacattctttgtaggtcctctgatccatggcggatttgaaaaaaggctatgagattgagggtaatcgcatagaacaaatgaagcgaggaacgctctgtaattttggcacctgctcaggctgcgattaagtctccccggaaataaaatctgataggacaaagaagaaaaaagctcttggcttctgtaatggaggccaagagctttttgcatcttgttttgtaagaggaaagaggttacaataatagaaaagaaagcgtatatcagtcgaataaggtggtaggcctatgaagttttttgaagcggttccaagcgaacttttctcgccgctggcttcgcccaaccgtattttatatgcggatgcactggacgtactgtacgcagcataccaagaaaacctgaaaatacgggaagatgtcttgtattccatgctgcgcggcaggctggagcaggaactggcggatgctacgtttgaagatgaagacattgacgaagaggaactgagggatatctctggccgcgctcgttttttgatccgcaagctgtgtagtaaggggtggtttgagaaagaacgcggggacgactttgaagagtacatcacgattcctaattacagcagtcgcctgctggaactatttcatcaactcagggatgatagtccggctcgtggatattcctatgtgttcggaactttctcagtcttaaagaccgccgacgacagcaacaatgcttacgataaaatgacggctctctatagtgcctacgataacacaacggcgctgattagcttgttgcaaatggtctatcataatgtgaagcattattttcagacgcagatcgatatgcaggatgtcaaccaagtgctggctgcacactttaacgacttcggacaaaaggttgtggaggcatatatccgtccgctgaaaatcaaagattcagtgccgaagtatcgtgtgcccattcagtctgtgcttaggcgctgggaagaggatgataccttgctgatggcgatggcaaatgaagcattgcgtgataagcggggcaagacattggaagactgccgtgccgatctgctgaggaaaattttctggatcgaagaacgctatgacaatttagaaaaggactatcttgaggaaattgatacgcaggtccggcgctataccagggcagcaacacagaaaatcgagaacctgacgaaccgagatcaaagcgtgcgcggcaatttgaatgttttgctgacggcactgtccagaaaccgcagggcggctgagctggtggaccagatacaaccggcatttcaattgtatgagcagtcttttttgtcagaaaaaagtctgtggtaccgtaagcgccccgaaaaacggacaaaaaccgcgtcggtgctgatacaagatgatcaggcaccgaatacggaagaacaggtcagagcggcacagttactgcaatcgaaatatggccgggcagcagtaaatgcttacgtgcagggatggctgggagacgctgacattcgttgctcggaggagctctcgcttgaagaggacaaggattatatcatgagtttgctggcaatccttggaagcaaagatgcatctgccggttatgtggtccaggaactcgatggcattttttgcaaaaatggctattcgatcccgcaaatgcagatccggaggaaggagaagaagccgtgaattttgattttgttaccaatgcaacggcaaaagaactggaacagttcaaatctgtctgcaatcagctgctcagccgcacatacattgtgcgaaccatctaccagccgggaaaaggcagggtggataacccagactatctttttctatcacggcactatgaggctgtacaggagtacctgagcctgctggactgggatttgcgcagggatgaactgaacggatacttttatgtgttgaacacagacgaggctaaccgttgcaacctcaataaaaaagaaacggcgattttgctggcattacggctgatctacgaagaaaatatggagcgtttgggtttggagcaggatgccgtgtgtactgtgcgggatgtgctggaaaaagtggtgaccgactatcccgtttttccggctaagccgaatatggaagaggtcaaacgcgcgtttacggtattggaaaaccattctgtgattcaaagactggaaggaaaattcaaccagggcagctgcaggatcgcaatattgcccaccattctctctgcggtctccagcgaaaagctgaacttggtggtgtctgttttgaaaaaggaggaaacagatgaaaaagctgaagaagatcctgctgatcaactggctctatttcagtaaggaactgattgaagtgggcgacatcaattttctgacaggcaagaatggcgccggaaagtcaacggtcatcgatgcactgcagatcgtactgctgggcgagaccaacgcccgcaactttaatcaggcggccaacgaaaaatcgcagcgcacactggaaggctatctgcgcgccgacatggatgataacagcccgtattcccgtcgtggtaaggacttttccacctatattgtctgcgaatttcaggatgagatggagggcagcagctttgtgacgggcgttacctttgactgccgcagcgatggaagttaccgtgatacattctttatttacacggggacactgccggaaaattgctttattgagcagggtgaggcaatggagacttctgcacttcgccgttttttgaagcagaactatgcacgggcagaattttacgatactcaaaaagagtatcgccgcaacatgcttgcaaagtggaacgtccacaacgagcaggtcttacggatgatgaagaaggctgtttcgttccggccaattgtggatatccaaaaatttattacggagaacatctgcgatattccggataaacccaatattgagctgatgcagcaaaacatccgggattataaacggcacgaattgctggcgcagcttcagcaggaaaagctggatgcgctgcagcaaatcagcaggctgtatcaggagatgaaccaagccatagaccgctgccagatccagaagtttctggtacggtgggccgaaaaagaagctgcgcagacagagatcgaccagaggaaattggaacgaactgaatgcaaggagaaccttgcaaatgtgaatgagcaactggaggagcttgagcggcagatcgaacagaaagaaacgcgccgcagtgagctggagctggcctgtaggcagagcaacgttttccaggaggaagagcgtctgctcaacacggaaaaggctctgagagatgagcagaaaaagctggaacagggtctgcaaaatcttgaagtggagattaagcgggaagcacggcatttgcagagattctgtggggagatacaagaactggaaccggaagaacttctcataccggtgcaggaagcggcgaacactgtgcagaaagcatatgctgtatttactggggacgagaagggattgtttgcccggcctgtggagttgtttgaaacggggcagcaggcagcggccgaattgtcggatgctgtccgcagtgcggctcataaaacagaggatcgtattgtagagctgaagaagcaagccgaccagaaaagtgcggtgcttgcaaatctgcgcaggaacatcaaagattatccccatgggcttctgctgttcaaagaccggctggaaaaggatctggcggataaaacggggcatgcggttcccgtttatattctggctgatgtgctggaaatggcagatgagcgctggcgtggagcggtagaaggctacctaaataaccagaaatattatctgctggtggagccgggacgttatcaggatgcacttaacatttacgaccggctgaagcaggaagcagagtaccgtgcgtttggtctggtagatatcggaaaactgcgggaaaaagaaacacttcgcccgctgcccggcagtctggcagaaaaggtggagacagaaaacaagctggcacgcagctatgtggactatcttcttggtcgggtgatatgctgcgacacggcagaacagttgcgctgctataagacggcaattacggcagagggaatgctgtatcagggctatgtggcccgcgcacttcggaagggctggatggaagacgccttcatcgggcggcgtgcggtgcagctccgcatcgaccatctggaaaaggaactggcctgtctgcaggaagagctgcggcattggcagccgctccagaagcagctgaccggcctgcaggagccgctttttacccaaagattcgtccgaatcgatgtggcgcaaaaacaggaggactaccagcgcgtccagacgatcatcaaggaaatcgcaaaagtcaaaaatcagctttcccagctaaatctgttctggttggatgagcagcggcgcatcattgaacagttgaaagaagagatccttgcattcaataaggaaaaagatgcgaaaaatgtgcaaaaagggaagttggaagaccgcatccatcagctggaatatgagatcttgccggaaaaataccaacggtatgaggccatcgaagatgttttgaacgaggagttcacgaaggaataccgagaaaccatcggcgttccccgctatcggcaggagcttgtccgcttgaaaaaggcagatgtcatccgcaagaactttggcgacagtttggcgcagagcacaaaggcgatggacggggctcagaagaaactgtttgcagcacgcagagaatatgcagaacggttcaaaccctgtgcattccagatcgaggtgatggataacaccgaatacgaggaagaacggcgtactctgcaggaaagcgagctgccccgatacaaagaaaagatccgggcggcacgggaaagcgcaatggagcaattccagaacgatttccttgccaaactgaaatccagcatcgaccaggtgcaagaacaggtgcacaatctgaacaaggccctgcgccaggcacaatttggcacagacaagtaccaattccgcgtagggccaaacccggattatctggattactataacatgatcacggcagatgaactgatggaaggcgaatccggtctatttgcactgccctttcagcaaaaatacggcccattgatcgaaaaactgttcagccagatcacaatggcagacgatacgcagctcaatgcccgcaaacagagcgaactgcaggagaatatcgtccgctatacagacttccggacgtatctgaagtttgatttggaaacgaccgatcagaacggttccaagcagctgctttctcaaacactgaatatgaagtccggtggcgaaacacaaacgccattctatattgcggtgctggcctcgtttgcccagctgtaccgcgtcaacgatgctacccgttttggtaatacggtgcgtctggtggtgttcgatgaagctttcaataaaatggatagtgaccggatcacggagagtgtactccttctccgaaagatggggctgcaggcgatcatctgtacgccgccggataaggtctcggacattatgcccattgcagaccgtacattattagtggacaaatccggataccggatgcatatcattccatttggaaaggagatgcagaatgaaggaagcacaggtgatcctgaatcgtctgctggataagtttgaaaacagtaagcatctttctgaacccaacacatccagacgtcgggtaatgctgcgcattgataaaagggagctgccggagtatcaatacgaagatgcggtggttcgggatgcttacaatattgcagcgcgggagctggagcagcaggctttggtgcgtctggaatgggcgagaaagcagagtgttctctcctgcattgtgctggatctggaacgggtcgcacagtgctatgaatgcgccgacagagtgcatccgcgaaaaaaggcagaagaggttgcaaatatcatcatgcagaagctggcagacaatcccgttccatggatcgcggcatggagggatgctgtatgtgctcaggtgcggaacagcatgaaagtgccgatgtattgcagagaaaacgacggtctgctgcaggagcttttgctcacgtttcaacggtatgcggagctgtccggcagtgtgacgatgcgtgcattcagcagccagtgttttcacgataccaagtattttgagcgaaatgtacgggaactgtttcttaccattgcacgaaagtacaatacccaactggcggcggcctgtacagaagcggaacttggtgagcgggatcagcttgcatttctgggaatctatgcccgcccggagctttacgaactctcgggcgattgcgcaatctgcttgaagaagggaaaactacggctcagcgcagcagaaccttatggattggctttgcccagtacacttgtgtcagagattgtggacattgaactgaaaaacatctgctgcattacctttatcgaaaataaaacgaactatgatgaatatttgctggcggaaaaacagccggaagaacttgttgtttatcacggcggctttctgagcccgcggaagaaaaaactttttgaaaaactggctgctgcggcaggggaaaccatgcaaattcgattctgggcagatattgatctgggcggtttttgcatgtttgaaaacctgcaaacggtgttcccacagcttgaacccatgcgtatggaagggcgctttgtggaacagtaccacaaaaatggcctgaagcggccggagcagtatctgaagaagctgaaggaagagcggaatgcgggaagacatacgctgtttgttgatgcaattgataagattttgcaatatggggtcacaatcgaacaagaaacatttctggagtagaattcatgcgaagataaaaacgcttgttgacctataaaaacgtactattattcttttcaacgccctgcaattttggaacccgcccagactgcaattaagtctccccggaaataaaatctggtaggacaaagaagataaaagctcttggcttctgtaatggaggccaagagctttttgcatcttgttttgtaagcggaaagagggtacaatgatagcagaagtacgcacatcaatgaggtgatactatgctgaacattttttacggtgatatgaaggaagcggtgtacaatacggcttcttatttcaaatacgattacgaggaagactggatcgttgacccgatggtcaaggaaatgattcaggacgtggataagtctaccgttatcgacagtggtgtaattgacagcccggtcttgggtaaaattccaccgattggtttgtctggtggcgtaaagacactgattttggtaaagtttgagccggagaaagtgttcaacgcatcgacttgtggcgacaactgtgcaaagtggctgctcaaaattgcagagcaggaggatcgcacagtgaatttgcgtcacctgatggattttggcaaaaagccgtttacaataaaagtgctgaatacgaatcaaatcgttcacagtatggaagaactgatcttatccgcaggtgagtttgtgtaaaggggctgacagaaatgaaaggcattcataaagtggtcgttggcacaaagtacctgaaatatgaatttgaactgcgacgcaacctgaccatcattcgcggggatagcgcaacgggtaaaacgaccctcgtggatatgattcgtacccatatgaacgatggagaaagtgggccggtcactctaaattgtgataaaggttgctatgtggtagaaggaaatctttggaagggacagctcaacaacattcaggacagcattgtttttatcgacgaaggaaacgagtttgtcaagaccaaagattttgcgcgtgcgattcagcagacggataactattatgttatcgtgatcagagagggtttgccagccttgccatacagtgtggaagaagtgtatggtatccgaacctctggaaagtatggggcattgaaacagagttatcattcgttctatcgaatttacccggatagtacgactgagaatattaagccggagaaaattctgaccgaggatagcaattcgggttatcagttttttgacgcggtctgtgcagagcatcaaatacagtgtgatactgcaaatggaaagtcaaatgtgttttcctatttgaaggcgcataaggatgaaaagattctggtgattgcagatggtgccgcctttggcccggaaatggacagggtgttgcagttggtgcagacaagaaaaaatctggcactatatctgccggaatcttttgaatggctgatactttcctctggaattttgaaagatgcagagaccacacagattttgcaaacaccgtctggctacatcgatagtaaggaatattttagctgggagcgctactttacggcacttttgatagagaaagcggctgggacatatctgaattatactaagaaaacgctaaacaaggcctatttgagtgatagcacgaagaatgcgattctgggtcagatgatgaaagggaaaccggagtaaattggaagatgcacatgaaaaaggtgcgaggcaaaatatgaaacttataacgaaagaagtttcaaatcctgagaaaaattctggatttgggatgaaaaaatcacaaataaacaagatgggcgaatttaccctcataatacaacgaacgtaggatccgggaaaagcgttgcggtataccaactaagcgagagtggcaaggaagaacagattgcacaactagaaattccagattataaaaaattggaggagtattat

SEQ ID NO: 13737 - DNA, 49495 bp, Unknown
  gut microbiota DNA sequence
agcacaataaaaaatgaaaccaatttgaaacttttttcaaattatgcatcccaaacgacagattgtgcaaagaacggttcgttttgcggtttatatgataaaatgacatcaagcaaaggagtggacgcactccggagaacagccatgaaccgggtcgtgtacccaaaagagaaggagttaacagttatggcacagaaaaagaaggacggtaagatgatgggcaagatcatcaaaactgccgtttcgggtgtgttgtgtgtcgcattggcgggcggtatagttgcggccaatgtgctgatcccgcccaacgccagcagcgtgcagagcattttgggcctgaagagcggaggcatcgacaacagcaaggcaaagaccgaaggcattaatatggaatacggcaagcccggctttgacacagaggatgcgctggttgaggatgagatcgccctgaacaagcagattgcagcagagggcatcgtcctgctgaagaacgatgaaggcagaatgccgtacagcacggataccaccttcagttttgtcagccattcggcagtcagctacatcggcggcaacaaagtcgatatgaaaacggcctttgaagatgccgggttcggtgtcaacgaggacctctggaaattctattccgaaggcaacggcaaggattacggtctgggcgttggttccgtttcctacggtgatgacgaggacttttccatcaacgaatgccccttgtctgttatgaaagcagagccgggtctgaccgattccatgaagaatacggttcctgtttttgtgttcagccgtgtggcgggcgaaggccgtgatatgccccgctccatgtacaaccacaccgatgtggaagaggacaagaccaagacttatctggagccggattctacggaactggagatcctgcagtatctgaacgacaactttgacgatgtggtgctgctgctcaactccagtgcagcggtcgatctgagctgggtggaggattatcccagcatccacacggtcatctcggctcctgccatgggcgactacggcctgtgctctctggctgagatcttctccggcaaggtcaatccttccggccgcaccgtggatacctatgaagtggatgccatgaacagcccggcggcgcagaacttcggcgactttgcctactacgatgagaatggcaacctcaccaagtacaactacgtcagctacaaagagggcatctatgttggctaccgctactacgagacccgttacgaggataaagtcctcggtcagggcaatgcgggcgattacaactacgacgatgctgtgatgtaccccttcggctacggcctgtcctacaccacctttgactggtcggattacaacaccagctgggatggcgatacctgcaccgtgacggtcaaggtcaccaacaccggttctgttgcaggcaaggacgttgtggaagtctacgcacagagcccttacaccgattatgacaaggccaacaaggtggaaaaggctgccgttgaactggtcggttacgccaagacctcggagctggctcccggtgcaagcgaaacggtgaaaatcacctttgatcaggagcagctgaagtcttacgactacgtcaatgccaagacctacattctggacgcaggtgattactatatcactgcggctaaaaacgcacacgaagcggtcaacaacatcctctctgccaagggcaagaccgtggcagacggcatgaccgccgacggcgacactgcttttgttgcaacctacaccccggcaaacggcaccgtggataccacgacctataagaacgacaccaccaccggcgtggaggtcaccaaccagctggatcatgcaaacggcgggctgcagtatctctcccgcagtgactggaccggcacctggccgaccgttgacggcgaggtcagcgaccagatcagcacttggggcaaccccatcaacggcaccgatgcaaacggcaaccccgcttcctatacttactataagaccatcagcagcgaggatctggcaaagctggattccttcgattccctgaaccccaccgatccttctaccctgaccgatgagcttgtctacggcaaggacaacggcctcggcctgatcgatatgcgtggtctggattacaacgaccccaagtggaacgacctgctcgaccagctgacccccagcgattaccagaccctgatcacccagtccggctatggtacggcagccatcaagtcggtggataagccctccgcgaccgaccgagatactgccaccggcctgatcaacttcggtttcgatgcaagcggcaacctctacttcaagggcaacatcacgcactgcggcgtgatcgttctggcacagacctacaacgatgatctggccactcactacggcgagaacattggcgacgagtcctactatctggatgtcgatggctggtatgcaccggcagtcaacatgcaccgcactgcattctccggccgcaacagcgagtattactccgaggatccgttcatcggcggtcacattgcttccctcgagtgtgagggtgtcgcctcccgcggtatgtatgtctttgtcaagcattacgccatcaacgatcaggaggaccaccgcggcgaccgtgaaggccagtacagcattgcgaccttcctgaacgagcaggcggcccgcgagatctacctcaagccctttgagatgtgcgtcaagtctgataaggtcgagatgaactatgcaaaggacaacggcgacggcacttacagcaatgccaccaccgagatcccgtccgtcaccggcatcatgacctccttcaaccgcgttggctatacctgggccggcggcaactacaacatgatcaccggcctgctgcgcaacgagtggggcttccacggctttatcatcaccgacaacgcaaacaccggtgtctttatggacgctggccagatgatccaggccggtgcagacggcaagctgaccaacctgcccaccggcgcacggtacacctttaacaaggatgacgttgcagattaccactacggtcgtgaagcaatccataacatcctgtacaccattgcaaactccaaggcaatgaacggcggtatgccgggcagccgttatctggcaaaggtcgagccttaccagaaggtcatctacgcagtggatggtgtctgcggcggtctgatcgcagttctggtcgttctgacgatcctccgcttccgtaaaaagaaagaggacgtaaaaaccgtctgatcaacacataggaacagaaggggcggcgggcaaacgcccgccccctttttttgattgtcaggagagacccatgaaacacacagatatcatcaagagcttgtctctggaacaaaaatgcgccctgctgagcggcggcacggtgttcaccacccgggcgctgccgggcaagggcatcccggccattaccctgtcggacggccccaacggcgtgcgcaagcaggcgggcgcggcggaccatctgggcctgaaccccagtgtgcccgccacctgcttccccacctcggccaccgttgccaacagctgggacccggagcttggcgaggctgtgggcgcagccatgggcgaagaagcagcggcacagggcgtgtcggtgctgctgggccccggcctgaacatcaagcgcagccccctgtgcggccgcaacttcgagtatttctcggaggacccctaccttgccggtaagatggcggcggcctacgtccgcggcatccagaaaaatggcattgccgcctgccccaagcactttgccgtgaacagtcaggagctgcgccgtatggcctcggattccatcgtggacgagcgcaccctgcgggagatctacctgaccagcttcgagatggtggtcaaggaggcgcagccaaagaccatcatgtccgcctataaccttgtcaacggcacctacgccaacgagaacgcccacctgctcatggagatcctgcgcagggactggggctttgacggcgcggtggtcaccgactggggcggcagcaacgaccacgcccttggcgtaaagaacggctctacgctggaaatgcccgcccccggcggggatgccatccgggagctgatgaaggcagtgcagaccggcaagatcaccgaagcggacgtggacgcccggctggaggagctgctggaactggtgttcaccaccaaggcggcggtggacgccgcacccggcaagttcgatgccgacgcccaccacgcactggcacgccgggctgctgcccagagcatcgtgctgctgaagaacgaaaacagcctgctgccccttgcaaaaggggaaaaggtggcggtcatcggcgactttgcccagacgccccgctatcagggtgcaggttccagcgccgtcaactccatcaaggtggattccttcttggactgccttgccgagagcggcctgaacagcgtcggctacgccaagggctttgaccggcagggcaagcccgacgaggcactgaaggccgaggcggtgctgctggcaaagaacgccgatgtggtgctgctgtgcatgggtctggacgagatcaaggagagcgagggcatcgaccgcgccgacatgaagctggcagagaaccagctggaactgctggccgctgtggcggcagcgaaccccaacgtggtgctgctgctgagtgcaggctcctcgctggaaagcgattgggtcaaggactgcaaggcactggtctacggctgcttgggcggtcaggccggtgcgggcgcactggtcgaggtgctcaccggtgcgcagaacccctgcggtaagctggcggagacttgggcgcgcagctacgccgacacccccgcaaaggcgcatttcggcggcgacggccccactgtggagtaccgcgagggtctgtatgtgggctaccgctactacgacaccgccggtgtgcccaccgccttccccttcggctacggcctgagctataccagctttgcgtacagtgacctgaaagcagacgaaaccggcgtgaccctgactgtcaccaacaccggcagctgtgccggtgccgaggtggtgcagctctatgtggcaaagccggatgcaaaagttttccgccccgtcaaggagctgaagggctttaccaaggtgcagctggaagccggagagagcaagaccgtcaccatcccgctggacgacaaggcgttccgctactggaatgtcaagaccgaccgctgggaggtggagggcggcagctatcagctgctggtgggcgcttccagcgtcgatatccgcttgactgctgccgttacggtggcgggcaccggcgcacccgacccctacgcgggcaaaaatctggagcattaccgcaccgcacaggtgcagaacgtgccggacgcggagtttgaggcgctgctggggcatgccatcccggagaacaaggtgcacatcgaccgcaacatgacgctgggcgagatggggcacggacgcagccccatcggctggctggcggcggcggtactgggcaccctgctgcgccgcagcatcaaaaagggcaagcccgacctgaacatcctgttccagtacaatatgcctctgcgtgcgctggccaaaatgaccaacggcgccatcagcatgggcatggtggacggcatcgtgatggagctgcagggcttctggatcatcggccttgtgcgggtgatttttgaggccgtgaagaacctcgtgctgaacagccgcatggaagagcgcttgaaaaacagctgaaaggaagcaggctatgaatttctggaataacttcgcggcaaagcaccccgccgctgccaagtgggtgcgcgagggcggcctgtttgtcatcgtgtccaacctcatcacggtgttcaagtacctgctgctgcaatttctgcccaaggcctttgccagcctgccggtggtggatttcggctggccgggcatcgacattaccctgttcggcgagaccttcaaatggaacatcctcggctacgatgccgcccacggcggtctgccctacttctgcgcctacatgatcgccatggtcatcggcgagtgcatcaacttccccatccagcgcaactttgtgttccgcagcaagggcaatctggcaaaacagatcggctggtatgtgctggccttctgcatcatcacctgcatcgtcaactccatcaactgcatctgggtggcggtggccggtctgctggtaccggacttcatctacaacatcggcaccaccgtcctcaacggcggcatctccatggtcatcttcttctttgtgaataagatcatcttcccggagggcgaaaaagccgccaaataataagctattctctttcattttcttcttttcatcataaaccagaagggctgctccgttctccggggcagcctttttggtttgaaggagagaaccccctcagtcatcgcgcagcgatgactgagggggttcctgccgcagccatcttatttttgtttttctgcacaaaatgttctgcgggcagggttttcctcttgacaagcgggcaaatgtttcgtactatatttagtagtatggaatcaaagacgctgtacgcaggtttcagtgtgaccctgtacccgtttcaggcaaagcgtgcctgtttgatataaaatggaaccgtaaagagaaaagccgtatgcttttgcccgtgccgccggttttgggtggtgcgtatggttttggtgtcactttttgcattgaaagctctttctatatcattgcccgtgtcctgcggcgcagcgtctcctgcttttaattttgcattgaattgaaacaaaggagagtgaacgcaatgaccgcgatcggagtgatcgtggccttgatcgttgctgttgtcggcgtggctgcgggctattttattggttacaacaaccgtaaaaagactgccgaagcccagatcggcagcgccgaggccgaggctacccggctggtgaacgaggcgatcaagaccgctgaccagaagcgcaaggaagcggttctggaagcaaaggacgaggctttccgtctgaaagccgaggtcgatgcccagaaggcagaggccgacaaggagatcaagcagcgccgtgcggagatcagccgtcaggagaaccgcatcgaccagaaggagacagcgctggaccgcaagaccgaggcgctggaaaagaaggaagaagagctgaaaaagcgcgctgctgaggccgaggagcgtctggcagagatcgacgctctgcgcgccaaggagatggagcgtctggaaacgctggccggtctgagccaggaggacgcccgcgaggtgctgctgcataaggtggacgaggagctgacccacgaaaaggccgtgcgcgttgccgcctacgagaccgacctgaaggaaaactgcgataacatcgcccgcaacctcatcggacaggccgtcagccgctgcgctgccgaccattgcagcgagaccaccgtcagtgtggtgccgctgcccagcgatgagatgaagggccgcatcatcggccgcgagggccgcaatatccgcgcactggagaccgctaccggcgtggatctgatcatcgacgataccccggaggccattaccctgtcctccttcgaccagacccgccgcgaggtggcccgcatgacgctggagcgcctgatcggtgatggccgtatccaccccgcccgcatcgaggagacggtggaaaagtgccgccacgatctggaactgcagatgaagcgcgagggcgagcgtgcagtgatggagctgggcatccacggcctgcaccccgacctgatcaagctgatcggccggctgaagtaccgcaccagctttggccagaacgccctgacccacagcatggaagtggcttgggtggccggtctgctggcaggcgagatgggcgtgaacgttaccatggcgcgccgcgccggtctgctgcatgatatcggcaaggcactggatcatgagatcgagggcagccacgtccagatcggcgtggacatctgccgcaagtacaaggagaacacccagatcatccacgccattgaggcacaccacggcgatgtggagcccaagaccccgctggccttcatcattcaggctgccgacgccatcagcgccgcccgcccgggtgcccgccgcgagaacgtggaaagctacgtcaagcgtctggaaaatctggaggagatctcctccagcttcgagggcgtggagcaggcctttgccgtacaggcaggccgcgaggtgcgcattctggtcaagcccgacgttatcagcgatgatcaggtcatcctgctggcacgcgctatcgccaaaaagatcgaggatacgctggattaccccggccagatcaaggtcaacgtcatccgcgagagccgcgctgtggagtacgcaaaataaagctttttccgcaggctgccgtgttttttgcacggcagcctgtttttttgcgccaaaacgattgcatttcctgttaaaaaaaggtatcatggatgcagaagaaagcaaaaagaactgcgtccgtgcggatgcagacccgcaacgacctcagaacagaaaggagcatcgttttatgaaaaaatggaagaaattactggcctgcctgctggtcggcttgatggcactgaccgtgttcaccgcctgcgatgccagcgtaggcgcaccgatgagccccaagcgctcgaacgccgaaagtaaaagcgtaaaggcgctgcgcgataaattcaaaatgatatacaacgtggaaatgacttacaacgaggacctgagcgaaaaagcttactatgttgcctactgggtcgccggcacctcgccgtcctgctctgtcaataaggaaaagacggagctttcccggaagaacagtgtagacaacgttgcaaaaacctacctgaaccagggttactacgcttctgcctttgacagcatgggcattggcaagggcatcggcggcggtatgggcgcagatgactttacgccgggctttgacatcaagccggaccccaacagcacttcggacatcatctttgttttgccgaaggacggcacttaccccgaagccatgaccaaagccgcaaagggcaagaccaaactgggcgttgcctatgtggtagacaaaggcgtaagctacgccgtggtgctgtttgggtaaatttcattacaacaaacaaagcagccgctgcactttctcgtgcagcggctgctttgtttgtgctgggatacgatcagcccttcaggaaagccggcagaggcttgccctccttgagccactggtgatactcggcggtggcggcaaactccacgtcaccggcagagttcagcgcggtctctaccgagtcctgcaccacgccgatgatgaagcctacgcctaccatctgcatggcgatgtcgttggagatgccgaacagcgagcaggccatggggatcagcagcagggagccgccggccacgccggaagcgccgcaggcacccagagcgctcatggcgctcagcacgatggcggcgggcaaagacacctgaatgcccaaggtgttagctgctgccagcgtcatgatggtaatggtgatggcggcaccgtccatgttgatggtagcgcccaacgggatggacacggagtacatatccttgtccagacccagcttttcacacagggacatattcacagggatgttggcggcagaactgcgggtgaaaaaggcggtcaggccggactccttcaggcagcggaataccagcgggtacgggttgcagcgcaggtagatgaacatgatgaagggggaaacgatcagcgccatgaacagcatggtgcccaccagcagcgccagcagcttgccgtactgggtaaagatggccagaccgttgccggaaacgttggtgtacaccagacccatgatgccgaagggggccagattgatgatccagcgcacgatctgggaaacagcatcggcggtgtttgccagaaagaccttggtgctctctgcgccgatgttcttcatggcaatgccgaacatacaggcccagaacagaatgccgatgtagttgccgttcatcagggcgctgacggggttggccacaaagttggtcagcagggtgctcagcacctcacccaagccctgcgggatcacatcggactgtgccgcatcggccagtaccaccttgaccgggaacataaagctggtgatgaccgcaatggctgccgccagaaaggtggtgagcatatacagccagatcacggtgccaaagcggcggtccagcttggacgagccctgtgccagtgcgcttgccacaatgacgaacaccagcaccggggcaatgcccttcagcgcaccgacgaacaggctgcccagctcgccgacccaacccgcgcccggcgcaacaagcgccagcaccgaaccgactgccaggccgatcaggatgcgcaggatcaggctggtctggttgtattttgctacaaccgctttcaaggttttcatatcgtaacactcctcttacactgtacgcctagtgcgtacattttcctgtttcttgtgcgagaacagttgtcattatagcatatacggcaaaaaagaggaagtgttttcaggcattttgcagctcaaaacggcgttttttgtaagcttttgcaaaattgccctgaaaactgtacttgtagaaaatacagttttgcggttttgacgaggaacagaaccctctcagggaagtaccccttcggtctgcatccccggctcccctgccataccgaatttacatataatgcaacttttacttgccaaactattgtcttttactggaaagtattgtatacttatcacgttggaagcaagtattacttgccaaaatgttcacatatttgaaaagaaacacttgtcaatacagacgagaaagagaggacacccctatgaacgagaccgtaaccaagcgcttcctgctttacttccgcctgatgctgctggtctggatcctgatcgcaaacgccgtcatccacctgaccggcatggagtacagctggctgatcttcctgagcaatatcatgatgttcacgctggagggcgatgtgaaggatcgccttgtcactgtggagctgggcggccttgtgggtctggtgctcactgtggcggcgctgctgtccatcagtgccctgacccctgttctgggcgatttcctcggctttatcctgccgctggccgtggtgctgttcatcctcatcatcctgcacccctacgcacccaaggtgctgaacaacgtgggctttgcctacctgaccgtggcctgcattgatatccctgccctgactacccatctgccgcagttctttatcaccttcatcgtgggctctgtgctctttaacggtgtctgcgtgctgctgatgaagcccgctaaggcgctggctgtgcgcagcgcggagaagcagggtgcataaaaaagtatatttccgccgttatctcttgatttttttgctctggcgtgctacaatcagcgtagtttcatcctgtccaaaacattgatgcggacaaactgaagccccgcttttcatgccgcagagagggctgccccgggtttccgggtgctgcaagcagcctgccatgaccccggcttctaccaccgcagagtgcagaggcgaacctctgccgggcgtgcccgttacagcactgcgaggggcgcgtttccccgccggggagcgcgcaattcgggtggaaccgtggaacgcagacatttgatcggcgcttcatcccgtgagttttacggggtgaagcgctttttatttttgttcaaaaccacattgtcaaaggagaatctgctatgaagatcatctacaaggacggtcatgtggacgagtgcccgcaggatcaggagctgcacgttatccgtcacaccgctgctcacgttatggcacaggccatcaagcgcctgtatccgcaggctgattttgccttcggccctgccaccgagaacggcttctactacgatgtcgatctgggcgaccagaagctgagcgacgaggatctggccaacatcgaaaaagagatgcgcaagatcgtcaaggagaacctgcccatcaagcccttcatcctgccccgcgccgaggctgagaagctgatggaggagcgtcaggagcactacaaggtcgagcacatggcagatctggctgacgagactgagttcagcttcttccagcagggcgagtacgtggatatgtgcatcggaccccacctgacctacaccaaggcactgaaggccttcaagatcacccagcagtccggcgcatactggaagaacgacaaggaaaacaagatgctgacccgtatcaacggcgtggctttccgcaatcaggaggagctggacgcatgggagaaggagcagcaggaggcccgcgagcgcgatcaccgcaagatcggcaaggagatgggcctgttcatgaccgatgatctggtgggccgcggcctgcccatgttcctgcccgcaggctacaccgtctggcaggagctggagaactatatcaaggagaaggagcgtgcacgcggctacctgcacgttatgactccctgcatcggcactgtgaacctgtataagacctccggtcactgggatcactaccgcgagaatatgttccccgccatggagatggagggtgaaagctatgtgctgcgcccgatgaactgcccccatcacatgatgatctacgcaaaccgtccccattcttaccgtgacctgcccatgcgcatcggtgagatcgcccacgatttccgttacgagtcctccggcaccctgaagggcatcgagcgcggccgtcacttctgccagaacgatgctcacctgttctgcaccccggagcagatcaagagcgaggtcgcaaacgtgtgcgacctgatctttgaggtgtacaaggacttcaacattaccgattaccgctgcgtgctgagcctgcgtgatcccgccgataagaagaagtaccacgacgatgatgccatgtggaaccatgcagagcaggccctgcgcgaggtgctgaccgagctgggcatccacttcaccgaggagatcggcgaggctgccttctacggcccgaagctggacgtgaacgtgaagcccgctgtgggtgccgagtacaccctgtccacctgccagctggacttctgcctgcccgcaaagttccacctgacctatgtggacaaggacggctctgaaaagacccctgtggtgctgcaccgcgccatcctgggctctctggaccgcttcatggcctacctgatcgaggagaccaagggcaagttccccacctggctggctcccacgcaggtcaaggtgctgcccgtgtccgaaaagacgctggagtacgcacaggacgtgaccgagaagctgtctgacgccggtatccgcgttgtgctggatgacgacaaccagaagatcggctacaagatccgtgccgcacagcaggtggaccgcgtgccctatatgctggtgctgggcgccaaggaagccgaggccggcaacatctccgtgcgcgaccgcaagggcgagaccaccgagatgagccttgaggacttcatcgccaaggtcaccaccgagatccgcacccgcagcctgtaaggtataaatgataagtgccccggaaacgccgacaggcgtttccggggcactttttttcacagcaaaagccccgctcccttgtgcgcaggagcggggctttcgacttacggttgactcgaacaaaaaaggaaaaaggaaaaaggaaaaaggagaacgatctatctgtcacgccgggcggaggggactgtgtcggagcagccgggctgccgccgcagcgggaacagcagagaattttgtggagcgttactccacatcctgcagagcggcgtaatcttcctcgccggtgcggatcttgaccacgcgggtcacattgtagacaaagatcttgccatcgccgatatggccggtgtacagcgccttcttggcggcttccaccacagcgtccacgctgatgcgggagacgatgacctccaccttgatcttgggcagcagggtggtatccaccggcacaccacggtacttttcaggggtgcccttctggatgccgcagcccatgacctgcgtcacggtcatgccggtgacgcccagatcattcaaggctgtcttgagctggtcgaacttagccagctttgcaatgatggacaccttgtgcataccggtgtcgtagacgccatcgtggatcacgggctcgcgcaccaccggcacggcagcatccatctgctttgccgaagccttggtgacatcgtcctcgcccagatcggtgttctcgttgggggtcatggcagcggagtttgcatccgagatggcaaagcctgcataagcggaagccagaccgtgctcgtggatgtccagaccgtcgatctccacctcggcgggcacacgcaggccaagggtcttatcaatgatcttgaagatgatgaacatcaccaccacaacgtagacatccacgcagaccagacccagcagctgggtgcccagctgtgccagaccgccgccgtagaacagaccggcatgggcggtgttggagccggtggagaacagacccaccgcaatggtgccccagacgccgtttgcaaagtggacggaaacagcacctacggggtcatccaccttggcgatcttatcgaagaattccacgctcagcaccacaaggataccggccacaaagccgatgaagaaagcgccgaagggagaaacggtatcgcagcctgcggtaatggccacaaggcctgccagagagccgttcagggtcatggagacatccggcttgccgtagcgcagccaagtgaagatcatggtcacgcaggtagcaacggctgcggcaaggttggtgttgaagcagaccagaccggtcagggtcatagtggcatcggtggacaggctcagggaagagccgccgttgaagccgaaccagcagaaccacaggatgaacacacccagtgcaccggcggtcaggttgtggccggggatggcgtgggggttgccgtccttgtcgtacttgccaatacggggacccagcatccatgcgcccagcagagcgatgacgccgcccacgttatgcacggctgcggagcctgcaaaatcgtggaagcccatgctctgcagccagccgccgccccacatccagtggccgcagatggggtacaccaccagcgagatggcggcggagtacacgcagtaggccttgaagttggtgcgttcggccatggagccggagacgatggtggctgccgtagcgcagaacacggtctggaacacgatgtacacccacagggggatatccagacccaagtggctgtaatcgccctgaatgaagggatcgaaaccgccgatcagtgcgccggtaccgccgaacatcaggccgaagccgatgagccagtaacagggcgtgccgatgcagaaatccatcatgtttttcatcaggatgttgccggtattctttgcccgggtgaagccggcctcgcacagggcgaatccggcctgcatgaagtacactagaaacgctcctacgagcgtccagcaggtgttgacggagctaaacatactttcctacctcctacggtcgtttttttgcacagggagccctctattctctccgtgcggcagtatccccgaaaacacaaaaggcgctggcggaattgcttccgtcagcgcctttgctttcgatggcacgagtatagtctctttgtgcaaacctgtcaagtattcatctcaaggttttacgtttttcacaacacggtgaaactctgccgtgctaaagtttggcaaatcttttgcctgtcagccgtttttgccgtccttcggagcgccggacttgtccttttccttggcgttggccgggcggtggccgccctccatctcccagtgcagcagcatactcatcaaagcgcgcagcgcaaaggtagccgccagcggcaccacggactccagattctgcagcaaaaaggtcttggcgatctctgccgacatcagaaattccagcgcggtggtcaggccgctgctcatttcatggtggaagtcccggtggtcgttgaagaaagtggcgcggacatagtaaaaagtggccttggccagactggtgatgataatgaacagacccactacctcggcaagaccggcgatcatgggcactgcagtttccagaaaagcatccagcaggtgggtgaggttcaggttgaacagggtcagtccttgcatgatctcctccgcagcttacagcagggtcttgacgtaagcggccagttcctcgtccttgcaggaggcaaagaacagctcagagaactttgcacccgccacagcgcccttcagcagatcctgatcgatgctcttcaggcactcgatgaggggcttgaaggtggcagcgcgcacgccgtcaaggatcttcttgttgcgctgctcgggcacaacgcgctccttggggtagccctgaccgtggccgaagccgaacagcttctcgaagcagtactcgaggttcagctcaccgccccagccgaagcccttggcaaagggcatggcaacggcgttgccgtcgttgacgtgggcaaaggtgtaggcatccacggggtcctcaacgtggccgcagatgacgccggggaagctgttcagtgccagcatggcaccctcaccggtgccgcagccggtaacgacgtagtccgcagcgccgctgttcagcaggatagcagccagaatgccgcactgcacataggtcagctgtgcagcatcgtcggcggcgtacatgccgtagttgaccacctcgtggcccatgggctccaccaccttcttcagggcggcttcaatgatgccgttcttggcggcctgactgttctcgttgataagtgcgatcttcataacaatggttctccttcttatttttccctgcggtgcgcaggtgttatacaaagtcctcccgcatgggggtaaagaaatccagcatcacgccgccctccagacagacgcagccgtgcatgacgccgttctgcttgagcagggtgtcgccggggcctacctcccgggtctcgtccccgatggtaaagcggtaccgcccggagacgatataggtgatctgggtgtgggggtggcagtgcatggcacccacgccgccggtctcaaaggtgttttccacgcacatggcgtccttgctgtaagccagcacgcggctctgcaccccggggccgcagggctccggggaaatttcggcatggggcacccaagggatatcctgatgtgctttttccattatagcataacatcctttcccgtacaaacaaaaggggactgccacacaacgctgtgcggcagtccccggggtcagaactgcggagtgccctcagcgtttactggggctgcttgccgatgtaggccagaatgccgccgtccacatacaggatcaggccgttgacaaagtcagaagcctcagatgccaggaacacagcgggtccgcccagatcctcggcctcgccccagcggcctgcgggggtcttggcaacgatgaactggtcgaaggggtgacggctgccgtcgggctggatctcgcgcagcggtgcggtctgcggggtagcgatgtagccggggccgatgccgttgcactggatgttgtaagcgccgtactcggaagcgatgttcttggtcagcatcttcaggccgccctttgctgctgcataagcagaaacggtctcacggcccagctcgctcatcatggagcagatgttgatgatcttgccgccgccctgtgcgatcatatcggggatgatggcctttgccacgatgaagggagcgttcaggtcgacgtcgatgacctgacggaactgggcagcgctcatctcggtcatggggatgcgcttgatgataccggcgttgttgaccagaatgttgatgtggccgacttcctcggtgatctttgccaccattgcattgacggcatcctcgtcggtgacgtcgcagacgtagccgtgcgccttgatgcctgcctctgcataggaagccagacccttgtccaccagctcctgcttgatatcattgaacacgatggtagcgccgttggctgccatagcctttgcaattgccatgccgatgccgtaggatgcgccggtgatcagcgccaccttgccggtcaggtcaaaagatttgggagtgcactgtgccataataaagtcctcctgtcaaaaatcgtattctacacggcgcaaattgcagccgtgctactttgcaaagcgcgtcgtatccggccgtgccggagtgcgcccttacttgtataccagtctagcatcctttgcaggaagtgtcaaggcacattcttgtgaagttttgttgtactttctttagatttttgcttttctgccaaaaaacaatacgcagaaccgttgctttttagcgcaatagtttgcgcagactgacgcgccttgtcacggtgcacaagatattccgactatctttgggcttgttgacaagtttggacgacctttgtcttttaccccagctttttcttctgctggcgtgccacgatgggcatcagcagggggatgggcacaagacgctgggcgctggtgcacagccgcataaaggcagagggcacaatgatggtcttgcggtgcatcatgcccagcagagcttcctccacacacagctccggcgtgatgccccgcagggcaaacaccacaccggcgtggtcgttgaactcggtgtctaccgggccggggcagagggcgcagacgtagacggggctgtgcatctcccgcagctcctcagccacgccgcgggtcatgctgaccacataggctttgctggcgtagtagcccgccatataaggcccgccgggcagcagccccgcagaggatgccacattcaggatggtgccgccgccctgtgcgtgcatcttgcgcaccacagcgcggaacagccgcgccatggcggcaacattcacttggatcatctcttcctcgcgggcttcctccgtttccagaatgctgccgcagacgccgaaaccggcgttgttgatgaagatgtcgatgtgctcctcggccagaacctcgcacaggcggctgcactcctcggcgcgggagaggtcggcggtctcgatgcggcagtcggtgccgtgggctgcgtgcagctccttggcaagagcctgcaaacggtcggcgcggcgggcagtcaagatgagccgacagcccatagcggcataccggcgggcgaactcccggccgatgccggaacttgctccggtgatccagatggtcttttgcatggtggttctcctttttttcgcccccagaacggggttttctgtacttgttgcccttattttagcatagtttgcccgtgctttctatgcaattttcgtaaacgatgcaaaagagaacccgaaacgcctgcggcgtttcgggctctctcatagatcttatttcagcaggttatcgttctcgaagtagtcgatgcgcatggccttgcgcacctcgtccagcgtggcggcagcggtcttttcggcgtaggcgctgccctccttcagaatctccaccacctcgggcaggcgctgctcccactccttgcggcgggtgcggatgggctccagctcagcctgcatgacgctgttcaggaactttttcaccttcatatcgccaagaccgccgcgctgatagtgcgccttgacctcgtccagattctggtactccggccagaactcggcaaagtgctccgggcggcagaaggcgtccagatagatgaacaccgggttgccctccaccttgccggggtcctgcacgcgcaggtggttggggtcggtaaacatggacttgaccttcttctcgatgtcctccggctcctcggacaggtagatgcagttgccaaggctcttgctcatcttggccttgccgtcaatgccgggcagacgcaggcaggcggcgttctggggcagaacgatctcgggctccaccagcgtttcgccgtagacggagttgaacttgtgcacgatctcgcagcactgctcgatcatgggtttctgatcctcaccggcgggcacggtggtagccttaaaggcggtgatatcggcagcctgactgatggggtagcagaagaagcccaccgggatgctggcttcgaagttgcgcatctggatctcgctcttcacggtggggttgcgctgcagacggctgacggtgaccagattctggtagtagaagctcagctcggtcagctggggtaccatggactggatgaagatgtgcaccttgttggggtccagaccgcaggccagatagtccagcgccacctgcaggatgttctggcgcaccttctccgggttgtcggcgttgtcggtcagcgcctgcgcgtcggcgatcatgataaagatctcgtcatattcgccggtattctgcagccgcacccgctccttcagagagccgacatagtggccaacgtgcaggcggccggtgggacggtcgccggtcagaataacttttttcatgatgttctccttttgacaggaaactccctcagtctgcgcactttgttcgcagccagctccctcggggagggcgcctttggcagtacggcaaggcgtctgaccctgccggaaggaggtttttccgtattctttactataatgctaagtatagccccccggggcggtgctgtcaacaaggccgccggaaaaagaaaaaagcgatggaaaatttccatcgctttgctggcgcctcttgcctgactcgaacaggcgacaccctgattaacagtcaggtgctctaaccgactgagctaaagaggcatctatataaaacggcatgcagccgttttactactataaaatggtgacccgtaccggaatcgaaccgatgttaaaggcgtgagaggcctctgtcttaaccgcttgaccaacgggccatacgtccattttgcatcaggtgttcgcacccgacttggctattttagcataccgggtgccctttgtcaacagcaaattttgattttattgaaaaaataaaaattcccgccgccccggaacggcggcagacgccgcgcccgctgccgttctatgcggccttttataaaggaacgataaaatggtgaaacctgaattcggatagttgacaatgtggtaaaatgtggtactcttagggtgcaaaaaagcttttgaggagggcttataatatggctatgaaaatagatcgtcgtgcgtttttaaagacttctgccgcaatggcagtggcagtatccatgaccgggctgctgggcggctgcagtgatggtgacattggcactgatctgggtggctttacggttgctgtgggtaaatggagcgccgtccctcatgatcagggcattggcaccgggaaatcctggtatgccgatttcacggtgacagtgtgcgttcacaatctggatagcgtcaacggcttcagcttcccggcaaaatccgtatttgtgcttaagatcaacggtcaaaaggtcgcgctgcagggcggagatctgctgagcaatatcacgctggtcatgaaaaagggcgagcgcaaaacgggtgtgctgaccttccggctggatgagagccagaagatgctctatcaggcaatggaagcacataccgcagatatcaagcttagggttggcgtagaccccaccgagacctataccggtgtttatgaaggctatacctttaagaaggattcaaaacttgcataattgaacccaaacagcctaatacaggaggtgcattgctatgatcgaccgcagaacatttctcaagctcagtgccggggcgctggtgctgaccgccgcaggggctttgaccggctgcggagggatgaatgaccgtccgaaggtgacgatcgacggagtggtgtttatgtgcgaagctccagttataaccggtggcagcggctatgttatgcgctattgtccgctgttcgcgattcagaatgataccggcgagcgggtaatattggagccggaagatattactggcacctttacggatatggaaaataatatgtatccactggaatttgtttgcaaaaaactgacagtggagccgcatagttatgaggaatatggcaattcgttgaagttctgtctggaaagtgaaaatcgggttcctgcagaatacagcaatggtacgttcatcctacgggtgacctatcataatcaaactgccgtattccgttacgatggaaaaactgttacccccagcaaaggataagattcggacaacattttgccgccgggcacttctggaaacaggagtgtccggcggctttttgttttgtgccgcgttaccggttctttacattggggctggcagtatgcacaaagttttacgcactttttgcacgtccatggtcgcggcaagggggacaaagcggtagaataaggccgttcccaaggaaaacacaaaaagacagtgccgggcgggcgcccgggtttttaatggaggaaattctatcatgaaaaagatctctcgtcgttcattcctgaccgtttgcggtgcagctgctgcggctgctgccctgactgcctgcggcggctctgcttcttctgcatccggcaccgctgcttctgcttccgccaccgcttcttccgctgccgggcaggcagccggcaccctgagcggcaacgttgcgaccggcggttctacttccatgaagaacgtcattgcagccctgaccgagggctttgccgaggttgagccgggcgtcaccgtcagctacgaccccaccggttccggcgcaggcatcaccggcgctaccgacaagacgctggacatcggcctgtcctcccgcgccctgaaggaggacgagaagtccgctgtggacggcaccaccgtggcactggacggtattgccatcatcgtgaacaaggacagcaaggtcgctgacctgaccgtggagcagctcaagaagatgttcaccggcgagatcaccaactggaaggatgtcggcggcgacgacggcgagatcgttctggtgggccgtgaggccggttccggcacccgcgatggctttgagagcatcgtggacgtgaaggacagctgcaagtacgcacaggaactgaccgctaccggcgctgtcatcagcgctgtggaggcaaacccgctggccatcggctacgcttccctgtccgctgtgggcgacaccgttgccatggtcaccgtggagggtgtggagtgcagcgaggacaccgtgaaggacggcagctacaagatccagcgtcccttcgtgttcgtcaccaacaagagcgctgccctgtctgagcaggcacaggcctttgtggactttgccaccagcaaggacgctgccgacctcatccgcaccgcaggcgctgtgcccgtgaacgagtaattgccgggtggtttgccggggagtttccccagcgaatgatccgagggtgggaccctgttgccgcaggcaatagggcgggagctggaagccccgaatttcgcggggaaagctccccggtgaaccgcctgccctgcatctgaacaagagaactgccgcgtcggcctgccctaaaaggctgggctggtgcggctttttataggatcgcgttatgaaaaatacaacctcttctctgcgccgggtacgcctgccccgcacccccgccgactggctggaagcggtgatgaatttcatcttcttcctgtgcggaatgctggcggtgtgctgtgtggtgctcatctcggtgtacatggtggtctccggcgtgccggctatccataagatcggtattttcaaattcctgttcggcacaaaatgggcgtccactgcggcagagccgctgttcggcattctgcccttcatcctgtccagcgtctacggcacgctgggtgctgccatcctcggcgtgcccatcggcctgctgacggcagtgttcctctccaaggccgcaaatcccaaactgcgcaccgtggtggtcaccgccatcgagctgctgtccggcatccccagcgtagtgttcggccttttggggatgcaggtgctggtgcccgccgtggcaaagaccttcggcaaggcctccggtgcctgcctgctcagcgccatcgtggtgctttccatcatgatcctgcccagtatcgtgtccgtgtcggtgacggcgctcaacgccgtgccgccggagtatgagcagggcagtctggcgctgggtgccaccgacaccgaaacatggttcaagatcagcctcccggcagcccaaagcggcattgccgcaggcgttgtgctgggcatcggccgcgccatcggcgaggctatggctgtgatgatggtggcgggcaacagccccaatatgccggacagcctgttccgcagtgtcactttgctgaccaccgccattgccaaggaaatgagctacgccggcggcctgcagcggcaggcactgttcagcatcgcgctggtgctgttcgtgttcatcatgctcatcaacgtggtgctgaacgtggtactgaagggaggcaaccgcgatgaataacggcttttcgccctcccgccgggcatggaaccgggtgatgaccgtgctggtctgggcaagcgcagtgctggtgatggtgctggtggccgggatcatcggcatggtgctggtgcggggcatcccccacatcagctggaacttcctttccactaccgccagtgtgctgaaaaagacggacggcattctgcccgccatcctcaacaccttgtatgtcattgtgctgacattactcatcgtattgccgctgggcgtgggtgcggcggtctacctgaccgaatacgcctccaaccggcggctcatcgaggtcatcgagttcaccaacgaaacgctggccggtatccccagcatcatctacggtctggtaggtatgctggtgttcagtcaggcgctgggcttccagacctgtctgctgtccggcagtctgacgctggtggtgatgaacctgcccaccatcatccgcaccacacaggaatccctcaaaacggtgccgcagggctaccgcgagggtgccatgggtctgggtgcgggcaagtggcacatcatccgcaccatcgtgctgccttgcagcattgacggcatcgtcaccggctgcattctggcggtgggacgcatcgtgggcgaaagcgctgcgctgctgttcaccgccggtgcggcagaggtgatcgccaagagcgtgttcaaagcctacacctccaacggcgctaccctgtcagtgctgctgtacctgcgcgcctttgaggacggcgatttcacctccgcatggggcatcggcgcagtgctgctggtgctggtgctgctcatcaatctggcagcacgtctggcgaaaaccaaactgaaacagaagcagtaaaaataaagaggtactctatggaaaacacgaatgtgccggtgatatcggcaaaggatctgaacctctggtacggcgacttcaaggcgctgaagagcatttcgctggacgtgggcgagcgggagatcaccgcactgatcggcccctccggctgcggcaagtccacctttttaaagaccctgaaccgcatgaacgaccttgtgccgggcgtgcgcatcgagggggatgtgcggctgaagggcgaggatatctttgcccgcgagatggagctgaccgacctgcgccgccgcgtgggtatggtgttccagaaggcaaaccccttccccatgagcatctacgacaacatcacctacggccccaagctgcacggcgtgcgcaataaggccgagctggacgagctggtggaaagttcgctgcggggcgcagccctgtgggacgaggtgaaggatcgcctgaaaaagagcgcccttggcctgtccggcgggcagcagcagcgtctttgcatcgcccgggcattggcggtcaagcccgaggtgctgctgatggacgagcccaccagcgcactggaccccggctctaccatgaaggtggaggagctgatgaacgagctgaaaaagaactacaccgtggtcatcgtcacccacaatatgcagcaggcggcccgtatcagcgaccgcaccgccttcttcctgctgggggagctggtggaggttggccccacgaaccagatcttcagcacaccccgggacaagcgcaccgaggactacatctccggccggttcggttaatgcagggaggaacaaagcaatgagcattcgcaaacaatacgacagcgatctggaagccctcagagtagcgctggtggagatggggcagaacgccgccgaggccgtggagaacgcgctggaagcgctgtgcaccgccgacaccgtagccgcccagaagatcgtgcagggggatgaccgcatcaacaacatggagcgggacatcgagcaccgctgcatgaccttgctgctgcgccagcagccggtagcgggcgacctgcgccacatttccaccgccatgaaggtggtcaccgatatcgagcgcatgggcgaccacgcctcggatatcgccgagatcatcccacatctcgtcaccgtgcgcaaggagggcgaccccgccgtcagtcaggccatcgccatgggacgcaaggcctaccagatgatccttgacgccatggctgccctgaccgccgaggacgagatcgccgcccgccgcgtcatcgccgcagacgacgccgtggactacgacttcaacgccatcaagcacacactggcacaggagatcgccgccgaccccgccaaggtggacgccgcgctggatctgctcatggtcatcaagtatctggagagcatcggcgaccacgccgtgaacgtagccgagtgggtgcagttcgtgcgcaccgggcgctacaaggacgaaagtatgttctgatactcactctgcccctttgggcgcgtgttttccttattttcttctggaaaaggctgtctgccgtttggcaggcagcctttttctgcgtgagggagttcgttccaacccctcccgtgaaaatgcgtttggagcgctccgcagagcgcgacaaacgcgaaatttaaaataattcttccgctgaagatgcgcagagcaacgcggagcgcattcaaaatcgtcctcttcccctctacaacgaaaattgactaaaaaatttttatcttttctgcaatgtttgcggcgggtcattcgtattcagggtataagagcccggaaggggctccgcagttatcgtgcggcgggtggtccggcttcccccagtcccccgcctgccgcaccgttacggaggacagatacaatgatggcaaagcttgaacgctccccgcagcaagcccgcatggaggccgtgagccgcgatgcactggtgcaggcggcgctgcaggagatcacccaaaattatcgtgaggccagcctttccaatgtggcaagggcttatggtgtttcgctggcgtatgtcagcgagtgcgtgcgcgctcagaccgggcgcacctacaaggagctgctgcaaaagcaccgcatggagaccgccgcgcggctgctgcgccgcagcgatctgaacattcagcagatcattgcacaggtgggctacgagaacaccagctacttctaccgcctgttccacgagcgctacggcctgagcccacgggagtaccggctggtgcgcaacggcgccgctccccgccgccccaccgcatgaagccctcttttgttttgcttcccccgaccgtcgtgctgctgccccgcgcacggcggtctgtttttgccgcgaaatggagaaaaatctggtactttatggaatattgtgttatactaaaataaatgtaccccgcgcggcagggcgcgggcaagagaggatgagtggatatgtttcgcggagcggtaagagcagatatggcacggattttggatatctatgcccgtgcgcgggaattcatggcgaaaaacggcaactctacccagtggggggacaattacccaagcccggagctgctggaagaggatatcgacaccaaccggctgttcgtgtacatggtgaacggccggatgcaggcggtgtttgcctttgtccttggcgaggaccccacttacaaggtcattgaggacggacagtggctcaacgacactttgccctacggtacgctgcaccggctggcttcggcgggcgagagcaagggcatcggcaaagcagtggtggagtggtgtctggagcactgcgagagcctgcgcgccgacacccacgccgacaacaaggtgatgcagcacctgctggaaagcgagggctttacccgctgcggcatcatccatgtggaggacggcaccccgcgcatcgcctaccagcggttgtccttgacccagagccagctggggtgagcggaaaaacagtttgatttgggagatcggaaacgcctgcgggcgtttccgatctcctttttcatagatggagctgccctgccgcgccctctcccgtgaaaatgcaatgccggagcgtccgcagacgctccggcattgcgctattaaaaaagaatttttccgctgaatatgcgcaaagcgcacgcggcgcgcatttctgatcctctccccccttctgtgccttgccaccggcggcgaagcagtgtataatagcctcagaacactacaatgccggaaaccccggcagatacaggaggaattgcagatgaataaaccggtactggtcgtcatggctgccggcatgggcagccgttacggcggcatgaagcagatcgacccggtgggccccaacggacaggtcattatggactattccctttacgacgcccgccgcgccggctttgagaccgtgatctttgtcatcaagcacgagatcgaggacgccttcaaggcagccatcggcgaccgcgtggccaaggcgatgaaggtgaagtatgccttccagcagctggaagagctgcccgcaggctttgccgtgccggagggacgtgtaaagccctggggcacctgccatgccgtgctggctgcaaagcccctgattgacggcccctttgcggtcatcaatgcggacgactactacggtccggaggcgtttcaggtgatgtacgattacctgtccacccacgccgatgatgatttctaccgctactgcatggtcagctatctgctgaagaacaccctgtctgagaacggcagcgtggcacgcggcgtgtgcatcaagaacgaggacggcaccctgcaaagcgtgaccgagcgcacccgcatcgagccctgcgacggcggcgcacattacaccgaggacggcggcgagagctgggtggacctgcccggcgacacccctgtgagcatgaacctgtggggcttcggcaagagctttctggacgaggccgagcagcgctttgcgggctggctgaccgagaacctgccggtgaaccccctgaagtgcgagtatttcctgccgctggtggtgaccgagctgatcgaggagaacaaggcaaaaattcaggtgctgcgcagcacggataagtggttcggcgtcacctaccgggaggataagcctttggtggtggaggccattgcccgcaagaccgccgagggccagtaccccgaaaagctgtgggagtaagtgcccgcagggcgggacgatttagaatgccctccgctgcgctctgggcattttcagcggaaagaatattttaaatttcggggttcagaaacgcctgcgggcgtttctgaaccccattttcacgagaggaatcgtaaaggaaaacggtagcgcgtccaacccttcctgtgaaaatgcaacatcgggcagcccgcaggctgcccgatgttgctctaattcaaataattcttccgctattgatgcgcaaagcaaacgcggagcgcatttaaatcgttctgccattgccgcgcagcagcaaatattatttataaaaaccgttccagctggatgcggttatcctcttcaaaatcctgcagccgctgggcaaggcgctttgcgcccggggcggcgttggggtagtccttgcagctttttacacagtccaccacccccatgccgctgccctgtgtgagcatctcggccagattgcgggtggatttgtccgtaagggtcttgagcccgatgcccattttcgtgttcagctttgccatggtgctctgcccctgcgcgctgccgccgcaggcttctatggcggtgtgcgcctcctgattcagctggtggtagatgttgcgctggcgcagcagttcggccttgaactgcacatcgttggtcatgggtaagatctgctccagggtgttcttgcccatctcggtgttctgcaccaccgcttccagcaggttgaggttatcgtttttctggttttccatacaaaaaaatccccctttggcacctagtatgtgcccgaagggggattttatacgttgtttctcagcagatcttattgccgccggagatctggatgccgcgcagccgctcgtcacagatggcgtacaggcgctgccagcagttggcggcgctgtccagctcgtccagccctgccactgcgacgctcagggtaaagggcacccgtttcatcatgcccatggaggtgatgcactcgtggggcatttcggcgtagatgttccgcatctgctcggccagctggccgccgtccaagtccagacagcctaccacaaaggtggtgccggtcaggcggcagacgatctgactgcccgggatgtcgaaatactttttccactggtttgccacaaagcagatcagctgatccatcaccggctgaccgtaggtgtcccgcagctgtgcgccgtgatccagcgatatcagcgccacagcggccttgcgcccctgctctgcccagcgatccagctcggcggcgatcacggtctcaaggtagcggcggttgtacacgccggaaagaaaatcgtggttcaggtcctcgcggcatagttcccgctcgcgggcgctcatgcgctcctccggcagcaggttgcctgccagcggggcagacatggtgatccgccacagcttgccgtctgcccgcaccgtgcggcgcagtacgcagcttacccggccgttgcacaggctataactcacctgcaggccttcgtcctgccagccggtgtcctgtggcagctcgtccagcaataccgtttcaaacgcagcctgtgcgccctcggcaaaggtacgcagatcctgctctgtccattctctgtccatctgtaatttccccatcatcagtacgcgccgccgcttccgacgggcgaaattccaattttcccacaaatccgggaacttacggctattataccattgaaatacagatttttccagcaaaacgcacaaatttttacggcagtttttacaattctgtcaaattgctaattctttcacgttttgaacgtctgcattgcagcggcagtacacggcgcactcggctttgatctgtgcggcaagggctttggagtcaaaaccggccttggcacgccatgcccagttgccgcccagcttgcccggggtgttcaggtgcgcctcggcacccagccccagccagtcgtacatgggaatgatggctctgtccgccaccgagcccagcgccgcccgcagcagcgcagtgcgcgcggcggcagtctttaccgctgccacctccttggcggtgggcttgcagggggtcaggtgcagataggccgcagcggtggccttttccttttcggaagcgccgttctcccaccagtcggtcagggtggtgttgtcgtgggtgccggggtagaccacgccgtttttgacgtggttatggggcagatactcgttgtccccgccgccgaaggcaaactgcagcaccttcatgcccgggaaggtactgtcggccagcagcttgcgcacgctggggaacagctcgcccaagtcctcggcgatgatgggcagcttgcccagtgcggcctccagtgcatcgaacagctccatgccggggccgttctcccacttaccggtgcgggcggtggtgctgtctgccgggatggcccaataggtgtcgaagccacggaagtggtcgatgcgcagcagatcgtagatgcccagtgcgtggcgcacccgctggatccaccatgcgtagccggtctttttgtggtacgcccagtcgtacagggggttgccccacagctggccgtctgcggagaagtagtccggcgggcagcctgccacccgggcaaagcggccgtcggcgtccagctcaaacagcttgccgcccacccatgcgtccaccgagtccgcagagacgtagatggggatgtcgcccaggatctgcacgcccttcttgttggcataggtcttgactgcctgccactgggcgctgaacttgtactgcacaaacttccagaagccgatctcctcctcgtttgcggcagcaaaggcagccagtacggccttgtcgcggcggcggtagggggcgtcccactccacccagttcttcatcttgttggctaccttcagcgccatgtacagggcgtagtcctccagccagtcctcgttggcaagggtaaaggcgtagtagtcgtcggggtagtagtaggcacagccgtgcagcccggcgcactggctgcgccatgcggcgtaggccttgcgcagcaccgcaaagcggctgacgtacaaggtgccgtagtccacttccagcgggtctttgccccagctttccgccttgagatctgcggcggtcagcaggccctctttttccagtgcttcaagatccacaaaataggggttgcccgcaaaggcagagcagctctggtaggggctgtcaccgtagccggtggggctgagcggcagcagctgccagatcgtttgccctgccgcagacaggaaatccacaaattgaaatgccgccttgccaaagcagccgatcccgtaagggccgggcagactggataccggcatcagaataccactttcacgcatgatccgttaccttcctcgctgtcaattttcgggaatattcgttgtttcctatcataacataactgtaaactattttccacaggcaaaaatcgtggtatactggtttttatggggtaccccctcagcttcgctgcgctcagcagctcccccaagggggagcctttggcatggttggaaagtttgtggtttgaccggaaagttcctgcctgctttcagcgtgcaaagacgctccgctgggccagaggtagggaggggtgttccgactcccccctccctacctctggactccacccaccccgcaacgggtcaagggctacacgcccttaacaatcctaaagaagaagtcgaagcacaaaaaagctagcgctgcgccagtcggcgctatcgctttaacgcttttttcgcttctccattaaaagcccctcagtcgctgcgcgacagattcccctttttgtcacctgcggtgacatcttcccccggccgggggaagtcggccctctcgggggagcaagcgcttgcccgcagcgccgcgctttcgtagaaagcggcgctgcaaatgcagtttggggttacgacccctctccgtgaaaatagcgtttggagcgctccgcagagcgcgacaaacgcgaaataaaaaataattttccgctgaatatgcccagagcgcaagcggagggcattttcaatcgttctatatacaggaggtactcgcgcgatgcagcgcacagaaaaatactttgagcaggacgctttccgcaccgaatgcgaaagcgtcatccttgccgcagagccggacgaaaagaccggcggcgggcgcatcgcgctggacggcacggtgttctacccggagggcggcggtcagcccgccgaccggggcactctgaccctgccggacggcacggtgctgcgggtgtcggacgtccacgagcaggcgggcatcatctggcatacggtggatgtcctgcccgctgccgccgcgcccggcgcagccgttgccggctgcatcgactgggactggcgctttgacaaaatgcagcagcacaccggcgagcatatcctttccggcattttgcaccagatgttcggggcggagaacgtgggcttccatgtgggcaccgaggtggtgcgcatggacaccagtgtgcccatcagccccgaggggctgcggcaggcggagcttgccgccaaccgcatcgtgtggcaggatgtgccggtgctcatcagctaccccacccgggaggagcttgccgcccttgtttaccgctctaaaaaagagatcgaggggcaggtgcgcatcgtgaccatcccgggcgcggacgtctgcgcctgctgcggcacccacacccgcaccaccggtcaggtggggcagatcaagatccttgccagcgagaactacaagggcggtgtgcggctgagcgtggtgtgcggtgcccgtgcgctggcggcggcgcaggccatgcgcgcccggcaggcggagatcggcgcgctgctttctgccaaggccgaccagaccgctgtggcggtgcaccgggtctacgatgagtatactgcactcaagtttacacactttggactgtgcagccagctgtttgacgcccttgcgcagctgaccgcacccgatgcggatgctatccgcaccctgccggggctggacccggacgggctgcaccggctggctgtccgtctgaccgaggccaccaccggcctgtgcgccgctctgacccccaccgaaaagggcaccggttactgccttgcccggcgggacggcgatgtgcgcgccctgaccaaagcactgaacgccgccctgaacggacgcggcggcggcaagcccggcatctgtcagggcagctgcgccgccaccccggagcaggtggagagatttttgaaggagaacaacaaactatgagaatgcgtttcaaaccctatgcccacgacgaactgatggccgcggatttccatgtgcacgagcccctcatctggggcggcaaatggcacggccagtatgcccgcccggagcagccctttattctggagctgggctgcggcaagggcggcttcatctctcagctggcctgtgcccacccggaaaataactatctgggcatcgacatcaccgacaaggtgctcatccttgccaagcgcaagatcgaagccgcctatcaggcagccggacgccctatcgacaacgtcaagatcatgagcaccgatatcgagcgcatcaagggcgtcatcaccccggaggatgaagtcagccgcatctatatcaacttctgcaacccgtggagcaagaacgactcctcccacaagcaccgccttacctacccgcgccagctgatcgcttaccgcgagtttttgaaggacggcggcgagatctacttcaagaccgacgacgatgatctgttccgggacagcgtagagtacttccccgcttccggctacgacatcgagtggatcacctacgacctccacgagaacgagccggaatggaacatccgcaccgagcacgagggcatgttcaccgaaatgggcatcaagatcaaggcactcattgcccgcaagaagcccggtgccgacagcgtgacatgggtagaccccaaggtgctcaagcggatggcacgcgaagctgccgctgccgaagccgccacgcaggaaggcgaaggaaatgtctgacccctgtgagctgtgcctgaataatgttcaggacgaatacggcagctattactgcgcgcagggcgctgcgctggacgaggacgagatggcacgctatcttgcgcacaataccgctgcctgtcccttttttgagccgggggacgaatataagatcgtatccaaacagaactgaagaacggaggtgcctatggtaagctttcttaccgataccgtggtatgcggcttttcgctgtaccatattctggcctatttcctgatctattcctgcataggctggtgtctggaggtcatctatgccgccgccaccaccggtcagctggtgaaccggggtttcctcaacggcccggtctgccccatctacggctttggcatgatcatcgtgctgtttgcccttacgcccttgcagcacagcatcctgctgctgtatataggcggcgtcatcctgcccagtgcgctggagctggtgggcggctgggcgctgtacaagctctaccacacccgctggtgggattacagcgacttcccctttaacatcgggggctatatctgtctggaattctgcctgctgtggggcgtgggcacgctggtggtcatgcgcatcgtgcacccggtggtggctgaccttgtagacctgatcccgccctttgtgggggtcatcctcatgtgctttttgtacgccgtatatgcggtggacgtggtggctaccgccattgccgcctctgcgctggccgatacgctggacaccatggagcagctgggcgacagcatccacgccgtcagcgatgccatgacccagctgctgggtaccaccaccctgaatgccgaccagaaactggacgagggacggctgcaattcaagcttgccgccgccgaggcgcgggacgccgccggaaagcgcccctctgcccgtgagacgctggctgccatccgcgccaaggccgctgaggccagcgaagctgcccgccgcgccagcgaggacgcccgcctgaacgctgccgaagctgccaacgccgcccgccttgccgccaagggcaccgccgagcgcgccgccgagctgctgcaattggaacagctggcagcagagctgcaacagcgcagcgaggagatgcaggcacagctgctgcgcacgccccgcatcgtgggcccgcgccgtatgctgcgcgcctacccgaagctccggcacggcaaaaagctgcgcaccctgcccacattgcgggagatgctgcgccgcgccgagcaggaaaacaaggacgacaacaagaataccaaatgaccccgaatgccgcaccggctccgccgtgtgtggcatttttgttgcacttcgctcgaataatgttgttaaaaagtgtgaaaaaactatttcaaaacggcttaaaccgtgttatactgattataaagtatacaaaccgaccgcaatcggcttatccgtattgaaactatccaaattgtgaggaatcgttatgtcagaggaacgaaagaccaaaacagatgccgccgcaccggcatctgctgcgttggggcggatcgaccgcaaggacgcatttttacaggccctgcatacattcctgaccgcgcatcagggaacagaatgggctgttgccgctgtggatatccagcacttcaagctttataacgagctttacggcaccgaaaagggcgatgctctgctggaaactgtggcaaactgtctgctgggttacagcaggcagaccggctatcctgtgggctattttggaaacgatgactttttcctgtgcctgccggacgaaaaggccgagcagaccgccgtgcttgccacgctgcaggcctgcatggctgccggaaggcaggatgtcaccttctttatggtaatgggcgtgtgccctgtgcaggcaaaccccggtgcagatgccgccaccctgtgcaactacgcgcagattgccggtgtgacgaccgacagcggctacctgcaccgctttgagcccaccatgctcaacgagctgaaagaacagcagcagctgctgggcgagctggagcgcgcactggacaaccacgaattctgcttctttttgcagcccaagtgcaacagcatcacccgcgccatcgtgggcatggaggcactggtgcgctggaaccatcccacccggggctgtgttccccctgccgagttcatgccgctgctggagcgcaccggccttgtaacgaggctggaccagtacatctgggaatccgtctgccagactttgcagaagtggcaggagagcggcagcaaccttgtgccggtatcggtaaacgtttcggtgcaggatatcctcaatctggatgtgccgcagatctttgcggatctggtggaaaaatataagctggagccaaagctcctgctggccgagatcaccgagaccatggtagccgaggacacccagatggtggaaagcgccattcagggcctgcaccgcaagggcttctcggtgatgatggacgacttcggcagcgggtattcctcgctgaatatgctcaaggataccaacgtcgatgccatcaagctggacatgaagctcatcgacatgaatcaggagaaccgcagcaagggcgtgcagatcgtggagtcggtggtggatatggcacaccggctgaacctgcccatcatcgccgagggtgtggagaccccggagcaggtgtccatgctgcaagccgcagactgcctgtactcgcagggctactacttcttcaagcccatgccggtggaaaacgccgaaaaactgctggcagatcccaccaatcaggattactgggatctgcgccgcgacctgatgcgccgcgaccgccgggtggagaacccgggcaccgaaaagaccgcgctggccttgcaggcctaccagatctttaccgacaacgtgctggagatctcgctgctgaaccttgccaccggtgcgtaccgggtgatcaagcgggacgcccgcctgctgggggcagatctggaaaaggaagaggattttgtcaactactgcgaccgtttggtgaacgagaagatcgtgcacgaagaggacgcagacctgttcttggagcagaccgatctggaggccttgcgctctgtgctgtaccacgccaccgcgccggagttctaccgctaccgcgagaatgtgtccggccagtatatctgggtcaccacagaggtgctgccctgccgtggctgctgtgcccagaacccgtgggcgactgtgctggtgcgcaacgacgcacaggccgaccagctcagcgaggagctggacttctcttacagccacgacaccctgaccggccttgccaaccgcagccggtacgaagccgacctgcgggagctgcccaacagcgggtacgaatccgtggtgtgcacctacattgatgtggtcgggatgcacgaggtaaacgagcatctgggccaccgcagcggcgacaccctgctgtgctgcttggccaacgccgcccgcaagttctttgccaccagccgggtgtaccgcatcggcagcgatgaatttgtcatcctgacccccaacgagccgccttacagcgtgtggagcactgcggaccggatgcgcgcctttttgaaggaaaaggactatgttatttccgtaggcatccagcagaccgccgacctgcgccatctggacgaagctgtcgccaaggccgaggctgccatgcggcaggaccggcaggcttactacgaccacaacggccgcgcccgccagctggaaggcctgaatgaaaagatggagcgcaccctgcaggaaaagcgggatgccgagcactttttaaaggtgcttgcccccaagtacaagactgtaatcgtggtggacttgcaggaggacaccgtgcgccccgttattgtgccggacgacttccagtccgttctggacacctgcggcggctctttccgcgctgcgttgaccaactaccgcgacaagctggtagcgcccgaggacagagaaaactttgcaaagttgttcgatttcggccttgtgcgcagcaccgtgttcagcagcaacctgctggagcaccgctaccgcaagacggatggccgcagcttctgcatccgtgtgaccccctactcccgcagcggctcccacatcaacgaggtgctgtggatcttcgcagatgaagatgtagagtaaaagattcttgtatgctataaaagcagccagaccgcccggtctggctgcttttgcgtttgacgctcgcaggagcgcccgggaattaccccttccgtcttgccgcttcgcgtcaagccaccttccccaaggggacggcttttggtggcggcggcaaggtttccggcatagcacaaaggcgtccccttgggggagctggctgcgaacgtagtgagcagactgagggggtgcccgccgcgcggctgtttccgcaggaaacaagcgcggtagctgccgtttccctccacgaccccacccgtgaaaatgcgtttggagcggccagcaggccgcgacaaacgcgaaatataaaatattctttccgctgattatggccagagcgcagcggaggtcattttaaatcgtcccggcagcaagaagtcgccgccttgcaaaagcgccgggatgtgctataatagaaatcacttatttcatacaatatatgtgggtatatgggcgcgccgcccgctgaacctgcaaagcaaggagcttttctatgcagcatctgtcccgaaccgtttctcccgccctgccgcacccctgcctgcgggcgctgcgggcggcttttccgcagaccatcccggtgctggcaggttattttgtgctggggctgggctacggcatctatgtgcagtccttgggtctgccggtgtggatgcccatgctcatgggcactgtcgtgtacggcggctcgctggagttcgtgctggcaagtttgctgctgggcgcgttctcgccgctgtcggcctttctgatggcgctgatgatccaggcgcggcaccttttctacggccttgccatgctggagcgctataagggctacggctggcgcagcttttacatgatctttgccatgagcgacgagaccttttccatcacctgctcggcaacgccgccggaaggggtggacaagggctggtttatgttcttcatcaccctgctggatcagctttactgggtgggcagcgccgggcttggggctgcgctgggcaccgtactgccctttagcaccgagggtgtggattttgtcatgaccgcaatgttcacggtcatcttcctgaaccagtgggaaaaagatcagcagcacggcagtgccctgatcgggcttgccgtgccgctggtgtgtctgattgtatttggttccggcagctttctgctgccgtccatggctggcattctggtgctgctgctggctttgcgccgtccgatggaaaaagcagccggggaggtagaagaatgacagcagttcagatggggcttaccattgcggtgtgcaccgccgccaccatgcttacccgttttttgccgtttctgatcttttccagcaaggagcagcagccgccggaggtggtgcggtatctggggcgggtgctgcccgccgccatcttcgggatgctcatcgtttattgcctgaagggcgttaccccgttctccggcagccacggcatcccggaagcccttgcgctgctggctaccatcgcgctgcacaagtggaagcaccagaccctgctcagcgtggcggggggcactttttgctatgtactgctggtgcagctggtattctgaaaaatggctcagtgatagaaggtgtcaaagttcacctgacggtagaaccgctgctgcagctggtcaaagctttcgcagttctgcgccagcagccacatacttttggtcaccacggcctcgatggtcatatcgtgggcctctaaaaagcggaaacggttgcgcacccgcttgcccacttcgtacacgcccacgtcgctgccctcgtaggtgacttgcgtggtcatgatgagcactttgtgggtggtctcgtaatcgcccagcccggcggcaaaggcgtccatcagctgctgcgggatgccgcccacgccgaaactttccacgatgacgcagtcgtacaggtggaagatctccgggatgagcgccggggacatgcccggggtcagcttgagcaggaacacccggctgtccaacgtgcggctgaactccaccgggccggtgggccacggcgaggggatgtaccgcaccagccggtcgccctgcaccagcgccaattccgggaagttgaccgaggcaaaggcgtcgtagctgatggtcttgttcttcttggcgcgggtgcccgcgatgacgtgcccgccaaacaccaccatcacgccccggctgcccgggtcgatggcgcagaccacgctgtcccgcaggtttttcttggcatccgtgatctcgttggagatgggctgctgcgcgccggtgaggatgatgggcttatccgcgttctggatgagataagagagcgccgccgcagagtacgccagcgtatccgtgccgtggcagatgataaagccgtcgtacagggcgtagttttcctgaatggcgcgtgccatcatgagccagtgctcctgcccgaggtcggtgctgtcgatgctgcacagcgccagcgtttccgggcagcacagctcctttagttccggcagatgggcaagcagctcgtcgctggtaagcacgggttttaacccctgctgggtgcgcacgctggcaatggtgccgccggtggtgatgaaaagcagacgttgtttggacataaagcaaaagccccctgtggcagaaattttaacatgacaacagtatagcacacgccccggagcttgaacagtgcccgccgcccaaaaagtttttgcgacccggtcacagaaaactgcgcggctctggtgtataataagggcaaaagaaccatgcaaaggagcaacaccatgtccaacatcgtcatcgtaggttccggcccggcgggggtgtccgctgccctgtacgccgtgcgcgccggggtgcagaccaccgtgctgaccaagggctccggggcgctggcgcgcgccgaaacaatcgaaaactattacggcttcgcccagccggtctccgggccggagctggaacgccgcagcatcgagaacgcccggcggctgggggtgcaattcgtgcagaccgaggccgtggggctgacatggaccgaccgtttgaccgtggaaacgctggcaggcgcgtacccggcagacgcggtcattctggcaacgggtgcttcccgcgcggtgccccgcatcccggggctgaccgggctggaaggccacggcgtaagctggtgcgccgcctgcgacgcctttttctaccgcggaaaggatgtggcggtgctgggcagcggcgagtacgccctgcatgaggtgcaggcgcttttgccggtggtaaaaagcgtcactctgctgacgaacggcgcagccctgaccgcagacttcccgcccgaggtgaccgtctgcacccagaaggtggaagccattctgggcgagcagaccgtcaccggcgtgcagctggcggacggcgcggtgcgggaagtatccggcgtatttgtggcgctgggcgtggcgggcagtaccgcactggcccgaaagctgggcgctgccgtagagggcagccgcatcgtggtggacgacaaaatgcagaccaccgtgcccggcctgtacgccgccggggattgcaccggcgggctgttgcaggtggcaaaggccgtttacgagggcgcactggcgggcacggaagccgccaaggcgctgcgaaaggggtgagccgtatggccgaaacatctccgcacgcccggtgcttggcctgtgcgtttccgttctgggagcagctgaccccggaagaacaggagcggctgtgccgctttacccgcccggtgcactacgccaagggcgcccgggtgcacagcccgctggaaagctgtgtgggcatccttttgctgcgcagcgggcagctgcgctcctatctgctatccgaggacggcagggacgtgacactgtaccgcctgttcggcggggaggtgtgcattctgtccgcctcctgcgtgatggacgcggtgaacatcgacctctacatcgatgccgaggaggacaccgaagcgctgtgcatcagcgcgggcatcttccggcagctgatgcaggaaaacgtctatgtgcgctgctacgcctaccagatgacggcagagcgcttttccgataccatgtggacgatgcagcagattttgttcatgagcgctgatcggcggcttgccatttttctgaccgacgagcttgccaagaccggcggcgcggacctccgcatgacccatgaccagatggcaaagtacatgggctctgcccgcgaggtggtgagccggatgctcaaatactttgcgcaggagggctgggtgcggctgtatcgcggcggcgtgcaggtgctggataagaaaaagctgcaggcgctggcaagaggagaataagagataaaaaacaacaccggagcgtccaaagatgctccggtgttgtttggtttatcctcaggagatcgcgtccacgtcccacttcatgcggacggcgtcggcaccgtccagcttgatgtgcagcgcaccggcgttgtccagtacctgctccggcttgcgggcaccgcacagaacgtgcagtcccgggatcatgcgggcggtcatggcgatgaccagctgcgccatggtgcagtcgtacttctcggtcagatcgccccactttgccagcagttccagcgcctgtgcccggcgggtgggctggaagcaggggttcgtgttgcgggtgctgccctccgggtaggtggtgtccatggtcaccttgccggtcagaagcccctgctccagcggggagtaggcctgtaccgagacgcccagctccttgcaggtgggcagcagctgcttttcaatgcggcgggtcagcaggctgtacttttcctgaatgacgtccagctggccgtacttgcagtagccccggatgatatcggaggtgacgttggaagcaccgatggcgcggatcttgccctgctccttcagcttcatcatggcttccatggtctcttccagcgggtacacgccgaagtccgggctctgccagtgggtgtacagcacgtccagatggtcggtgtgcagacggcgcaggctgtcctccacgtcctcgatgatgctcttggcggagaggtcgcggtacacctgtaccccgtccaccaccttgtgcaggatgggggtctcgtgccgccactccaggccgcacttggtggaaagcaccaccttgtcgcggtcgatgtgcttcatggcttcgcccaccacttcctcgctgtggtacagcccgtagatgggcgcagtgtcgatccactggatgccctgctctacggcagtctggatggcctttacggacagtgcatcgtcgttatcgccccaccatgcaccgccgccgatggcccatgtacccatgcccagaaagggcacggcaatgccgcttttgccaatgttgatattctgcatatactttaccctccatgccagcagtgttccccgcaatgggaaccctcattccaatgtctggcatactttgttgtgttttttattctataaaaaagaactgcggagcgcaggtgcactccgcagcgctcttttatcagatgttgccgaactcgctcagctgcaagctctcgttgtgggtctccgcccagcgcaccgcccagtcggaggtgaacagcagcagacggttgcccttcatgtcctccacagccttggtgtcgctggtcaggtcaagatcccgcaggttgtaggtgtcggggtcgttctgcacccagcgcagctgctcaaagggcagctgctgcatgcgaatttccacgttgtactcggtgttcagacggtactccagcacttccagctgcagcacgccgaccacgccgaccaccacttcttccatgccgccgcccacttcgcggaagatctggatggcgccttcctgcgcgatctgctccatacccttcacgaactgcttgcgcttcatggtgtccttctgctcaatgcgggcaaagtgctccggggagaaggtggggatgcccgcgaactggaccttctttttgccggtgcacagggtgtcgccgatggagaagatgcccgggtcaaacaggccgatgatgtcgccggcgtaggcctcgtccacgatggcgcggtcctgcgccatcagctgggtgccggtggccagcttgatgttcttgccctcctgcacatggtaggcctccatgccgcgctcgaacttgccggagcagatgcgcataaaggcaatacggtcgcggtgggccttgttcatgttggcctgaattttaaagatgaaagcggagaactcgtcccggcaggggtccaccggctcgccggtcaggctgtccacgcgggccagcggggcggaggtgagccgcaggaagttttcaaggaagggctccacgccgaagttggtcaatgcagagccgaagaacacggggctctgctcaccgcgcagcaccttgtccagatcaaactcctcggcagcgccgtccagcagctcgatctcgtccaccagctgctggtgcaggtagggggtcagcagctcgtccagtgcggggtcgcccagctcggcctcggtctcgctgaccttcttcacgccgttggcgcggccgtcgctggaaaaagccagcaccttgcgtgcgttgcggtcgaacacgcccttgaactccttgccgcagccgatgggccagttcatggggtaggtcttgatgcccagaatttcttcaatgttctccatcagctcaaaggggtcgcgggcttcgcggtccatcttgttgatgaaggtaaaaatggggatatggcgcagggtgcacaccttgaacagcttgatggtctgcgcctcaacgccctttgcggcgtcgatgaccatgacggcagagtctgccgccatcagggtgcggtaggtatcctccgagaagtcctgatggccgggggtgtccagaatgttcacgcacttgccggcgtagttgaactgcagcaccgaagaggtgaccgagataccacgctgcttttcaatgtccatccagtcggacacggcgtgcttggcgctctgcttgcccttgacggaaccagcttgattgatggctccaccgtacagcagcagcttctcggtaagggtggtcttacctgcgtcggggtggctgatgatggcgaacgtcctgcggcgttcgatctcttcacgatttgtcatagatgatatttctcctgaaatggatggaacttcttccggcatcgctgcgcgatgccggaagaagcatttttacacatacgcactttattctatacgaaaacgcgtgataatgcaagggttttcgttattttttcaggatcaggcagggcagaggggcagtttcggcccaattggcaaaatcacacaccagaacggtgaaacttttcagtggaagtgcacgcagaaaacgcagcaccgcctgtttttcgtccgagccgatgactgccccgctgtacaggatggcgctcacgatgccgccggggcgcaccgcctgcagcgccgcctgcaaggcggggatgctgctctgcgcggtggagaataccgcatggtccgcccccggcagccagccaaagttgaacatgactgcatcggcagtgccgggctgcacatactgtaataagtcggcgtggctgccgcagataaggctgtaccgctcggcgggcacatttgcctgttccaaccgggtgcgggtggagcggatggcttcgggctgcacgtcaaaggccagcacccgcccggcgggggcggtcagcccgcacagaaaggtggtgtcgccgccgttgccgcaggtggcgtccacgcacagctgcgggtgcaccagccgggcggctaaaaagtcctgcacgaacttgaccgctgttaagtccggggtgcggcggcgcaccagctgcccgccctcggcggcaaagccgaatttgccccagaaagcaagctcagcggcgttttccggcagcggggcggtaaacacggtggcggcttcccggtcatagccgccaaagctgcgcaatacttcttttaacaggtaggagccgtagcccttgcgccgccaccggggcaggatgcacagggcggcaagctgtgcgcccttgggggcgggagaaaggcagcactctccgatgcagtccttttctttatacagggcaaacccctgctcagtgcggtgcagttccataaaaagctcctccttgacgggtcgatgttcttcccttacaatagcaagcggaaacgctgctgtcaagggcagaaaacaggaccgcatttcacatattcttcacggcgcaagcgattcattttcacatttgacagttacaatagggacagttcaaaggaacagatgtccctgcggaccggcctttgagggaaggatgtagtaacatggaaaacgagaacaagtgggaatacgattattccgcttccaataacgagaccggctaccccaacgtgggcagcagcggcatgaacacggcgaaccagtataacgagccggaagcgcagcccgcgcgtccggccgataccgccccggcagatggcggcagcgtgccgcccaccccgccggagcagccgcagtacagcgccccggagcagccggaaaagccccgccgcaagaaaaagttcaacggcggaaaactggcacgcagcgccgtggcactggtgctggcagccgccatgggctttgcgggcggctttgtgggcgcaaaatacggcggcggcagcaaggtggtcatccagcaggtggagcgccctgccagctctgacagcagcaccgacagcaccggcaattccatcagcgccaccagcggcaccggcctgagcaccgcacaggtagccgagatggtcagccccagtgtggtggtcatcaccactgagcaggtggtctactcccagtggtcgtggtacggccagagccaggtggagagcggcgcgggcagcggcgtcatcatcagctcggacggctatatcctcacctgcgcccatgtggtgagcggcgcttccaacatcaccgtgagcatcggcgacaaggattaccccgctacgctggtgggcgaggataccaccagtgatatcgccgtggtcaaggtcgatgccaccggcctgacccccgccaccgtgggcaacagcgacagcctgaaggtgggcgaaagcgtcatggccgtgggtaaccccttgggtgagctgggcggcaccgtgaccagcggcatcgtcagcgcactgaaccgcagcgtcagcattcagggctccagctctgtcaacaccatgtccctgatccagatggatgcctccgtcagccccggcaactccggcggcggcctgttcaacatgaacggcgagctggtgggcatcgtcaatgcaaagtcctccgacagcgatgccgagggtctgggctttgccatcccggtgaatgacgccgtcaaggtggcacaggagctgctggaaaacggctatgtgaccggccgtccctatctgggcatcagctactatgccgtgaccgatgctcagaccgccgcccagctgggcgtgaacgcctatggtgtctacatcgtggaggtagtcaagggcggccctgccgacaaggcgggcttgcaggccggtgaccgcatcgtgagcgtagacggcagcgaggttgccacccagagcgaccttggcaccctgatgcagaaccacaaggccggtgacgccatcgagatcaccgtcgcacgcggcggtcagatgcagaccgttaacgtcacccttggcgaaaagggcgcagagaataactgaaaatagtaaaaaggctgttgcacggaatgtgcagcagccttttttgttgtgaaaataccccttccgtctgctcactacgttcgcagtcaccttccccaaggggacggcttttgtgctgacggggaactttgcggcatcgccataaggcgtccccttgggggagctgtcaaagccgtcaggctttgactgagggggttccctccacgacccctcccgtgaaaaa

SEQ ID NO: 13738 - DNA, 10392 bp, Unknown
  gut microbiota DNA sequence
cccgatttacaaattacaaataatttttccgctgatgatgcgcagagcaacgcggcgcgcattcaaatcgtcttacaccgcaccaaaaatagtggcgctgtacggcgcaagggtggttttgtttgtaaaaacgcggcttgccccccgccacaggctggaagaggtgccatcgctcagcagcttccactgcccggcgggcagtgagacggtgcaggcggtgtcggtgggattataaaagacgcacaaagcgctccatgctgcgccgtcgccccagacggcgggcagcatccagcccaccagcggctgctccagcgcaaagaactgcaaagcctccggggcgtgacggtcggtgctgcccagccggggaaaggctgcccgcagcgccagaagcccccggtagtagtccacgagggcgtggtactgctcggcgcggttccagtccagccggttcagggcgggagaagagcggtaactgttgcctaccccctttttggtgcgggcgaactcctcgcccgcctgcatgaagggcaggccgaagctggtcaggtagatgcccgccgccagccggttctgcgccagtgccacggtgtcccgggcggtgaactccggtttttcgtagcggacgcagagcagcttgtcccacagggtaaagttgtcgtgggcggaaacatagctcacgatctggctgggcgcgtggggcggcagacggtcgctgcggcaccatgccgccaccgctgcgccgatatcccagaagctgccgggcttgccctccacatagcccggctcgcgggcatcgaagcagccgcccttgatggcgtcccgggtgtcatcgcagaagatgcccacccgctcgttgagcatggcaaggttcgccttgttggcctcgtaccggtgcagctggctggcaccgccctgccacggctcgccgtacagcaggatgtcccgcccgccgggcaggctgtccagcgcagtgcgcaccgcgttgatgctctcggcatcgtacaggcccatcaggtcgaaccggaagccgtcgatgtggtactcctttgcccagtagaggatggagtcgatgaggtaccgccgcgccatggggcgctcgctggcaaactcgttgccgcagccgctgccgttggaaaagctgccgtccgggttttgccggaaaaagtagtacggcacggtgctgttcagaggattttcggtgcggtaggtgtggttatacaccacgtccatcaccaccccgatgcccgccgcatggagggcggcgatcatctcccggcactcccgggtgcgcacctcgccccgggtggggtcggtggagtagctgccctccggtacgttgaagttggtggggtcgtagccccagttatattgccgcagcaggggttttgcctcgtccacgctgccaaaatcaaaaatgggcatcagctggacgtattttacccccaaccgcttgaggtagttcaggcaggtggggtggatgccatcgccgtgcaatgtggtgccctgctgggtaaaggccatatatttaccccgccacgccgggcgcactccgctggcggcatcctgcgagaagtcccgcacgctcacctcccacacggcgcgctgcgccggggggatattggggcgcacatcccgctcccacccggagggcgcggtgcgggcaaggtctacgatcatgctgcggacgccgtttacccccgccgcccgggcgtaggggtcgccggtctcgcgggtgacgccgtccacggtgacggcaaaggtgtaatagcggccgtgctgctccccgggcagccagatgctccacaccccctgcgctccgcgcacaaggggctttgtgcccagcacagcaccgccgtctcccttgtggtataaggtcacagtgaccgcctcggcggtgggtgcccacagccgcagacaggtgccgccgggggtgtagtccggcccaagggggccggtataatagttttcgcggtggaagggtacgttttcaaacagtgttttccactgggcaggcgtttttgcagccatggtcagtttcattccttcttataagattcgttatattcagtgtatcggacaacaggctctttttcaagagggaatcgacttttaccatggaaatcaattttcctaataaaggcttcccccgccgcgcggctgtttccgcaggaaaccagcgcggcagctgccgtttgccgttgcaacccctccccgtgaaaatggggttcagaaacgcccgcaggcgtttctgaaccccgaaatttaaaattatttttccgctgaacatggccagagcaatgcggcgggcattccaaatcgtctcactccagatacatccgccgcagccgcatcaggcgggcgggggtcaggccgtattcggcttccagatagctctcggcgctgccgtagtcctgccggatggtgcgcagcacaaagggcgcagtctccgggtctaccccggcggaagtctgccagcgcatccgctgcgccgggttggcggcgatctccgccgcatggtcagccatggccttttcgatctcggcggcgcggcagaggttggtgcgggcgtaatctgcgcagatggtctcgtccgaggcacccagcgccagcaggatcagcatggcggctacgccggtgcggtccttgcccgccgtgcagtggaacaggatgggcgtctcgccggcttccaacgcacggaacagctccttgaaggccttgttgccggtgagcatctgccggtacatcagctgggtgaggttcgtcccggcaggggcgctctgcaccagccgctggatgtcgttgggagaaaaatcgatctcctgcccggtggcatcccgcaggccgcagatctgcaccagccgtgcgccgtccggcacatagtccggcagctttgcggcttctgcgccgctgcgcaggtcaaggatgagccgcagccccagcccgtccagccgggcgcggtcggcttcggtggtcagccgcccggtggggaagccccggtagatctgcccccactttacggtcttgccctcgtcggcgcggtaaccgcccagctcccggaagttgttgccgcctgcaaagggcagctgggtgcccgggacgggatgctccggggcagcctttgcggcggcgctggaaagcaccggcgcggtgtagaagggctttgcgggccgtccccggcggggcggcaggctggcggtgctgcccagaacctccaacaggtagctgcgcagcaggtcgatataggcagagctggtgtcccgccgctgcaccagcgagacgcacagcgggggcatatcttccagcagcacgtcccgcacccggtccagctcccgccgggcgccgggctcgtagcgggtcaggcaggtgcacagctgctcctgcaccagatagtaggcctgataaaagctggggccgatctcggcgttgggggcgaagcccgcccgggcacaggccgcccacagcgggctgaacagatcctgccgcaggctgggcagcagcacccgctgcccgcgcagttctgccagcgggatgcgctccttttcccagaagggatgtccccggggcaccagcaggcaggcggggtccgcccgcagggtggtgcgcgccagcaccggcgcggcgcagccaaggtcgatgaccagacccgcgtccagctcgccctgctctactccatcggccacggcgtcgttgtccagcaggcggaaccgcatctccacatgggggtactgctgccggaacttgtccagctgcgtttccagcccgggcagatagtccggcaccagcgccacgctgatgccgatgcgcaccggctgggcagactggatctctgcccgcagcgcggcctgcatctgctggaactgctccaccaccggggcggcgtggcgctgtaagctcatgccccggtcggtgagcgccagtttgtggtgggcgctgataaacagcggcccgcacatttcggcttccagcgcagagatgctctggcgcagcgcctgccgcgacaggaacagccgctgtgcggcgcgggtataattcatttcttcgcacagggtcaaaaagtagtgcagctggcggatatccatggtctcctcccgggaaagtttgttctggaaaaagaataccgctttttcgtcggaatgtaaagagaggacagcaaaatgggttcaaccctctcagtctgctcccccaaagggaattttattagtgctgaccgacagatgcgtaaaagctccccctgagaggaacgacttcccccgctccgggggaagatgtcaccgcaggtgacaaaagggggaatctggcatcgcgtagcgatgactgagagggttcttccccttcaaaaaaggaacaccggaacgcccgcaggtgttccggtgccccgaagtttaaataaggaaaatcagatcaggctcagagcctcttcgtcagccaccagaatgaagtccgggtgcagctgcaggatgcttgcgggcacctccggggtgacggggccgaagaaagccttcttgacgatctcggccttgcctgcgccgttgaccaccatcagcaccttgcgtgcctgcatgatggtgcggatgcccatggtataagcctgcttgggcaccagatccacgttgccgtcaaagaagcgcttgttggcctcgatggtctcctgggccaagtccacgcagtgggtgcccagatcaaaggcatcgtggggctcgttgaagccgatgtgaccgtcatgaccgatgcccagcagctgcagatccacgccgcccacgctgcggatgacctcgtcatagcgcttgcactcggcttcggcgtccatgttggtgccgtccggcaggttgatgtgggcggggtcgatgttcacatggtcgaacaggttgcggtgcataaagctccagtagctttccgggtgctccttgggcaggccgcggtactcgtccagattgacggaggtgacctcagaaaaatccagatctccctcgttgtaccgctccaccagcttctcataggtgccaacgggggtgccgccggtagccagacccagcacgcagtcgggcttcatgatgacctgcgcagaaatgatgtttgctgccttgcgggacatatcggcgtagtcctttgtacgaatgatcttcacgataaacgacctctcttcttcatttactctttgtgggcggtgcacagcggcacacgcccgcatctagtccaagtttatcacatttgccaacagaaagccacaaaacggcacaatttttccggttttccgtttcttttggaaaaagtgccttaaaaaccggttgaagtatcgtttttttgcacaaaaggtgcgtgcagggggtcagtccgcaaagccggccttctgcagggcggtgagcagcagcgggatgagcaccagctgcgccacgatgcccggcacggcggtaaacagcgccccggacaaaaaggcgctgaagggaaagctgccgccggtcagcccggccagcacaaaccgcacgatgccccagacgatgcgcccggacaccatagcggtcagcagtacggcgtacagcgcgggcaggttgtgctttgccctgtgccgcagcagcccggacaccagcccgtaggtggccagctcaaaggccatggagatggccaccgggaacatggggggcatgccgaacagcaccgagcgcagcagcggggcggcaaagcccacagccagcccccacgggccgcccagcacaaagccgcacagcagcaccgggaagtgcatcgggcagagcatattgcccaccttgggcacctgtccggtgagcaggggcagcacaaaggccagcgctaaaaacagggcggccagcaccagctgccgcataggcgaagcgtttttggttttcataagggtccctccatttgccgccgcaaaataaaaaggagcctgccccggcattccatgccaaaggcagaccccttcgtggcgtctgtttcaaaaaaatattgcttgcggggataagcggcaggctgctgcccgcccgtgtccggcttcctgccggaacgatggtcaaaagtataacaaaccattttgcccctgtcaagcggggcgggatgtctgcaaaatagacaaaaatcggtctattcgcaaaaaaatttccccggggctgtacattttgctggaagaagcttgacctttttgcacagaatggataatataaaattgaaaaaaagcgcgctgcggcaatcttgacgccggggcgctgacgagaggcttttttgagcgcatgaattctgaggttcatacgggaggaccatcatgacaaatgctgaaaaacttaccctgaaaaagcacgcctgccacatccgcatgggcgtgatcgaagggacccacagtgcaggctgtggtcacccgggcggcagtctgagcatcgcagacgtgctgtcttatctgtactttaaggaactgaacgtagaccctgcccagcctaagatggctgaccgcgatcgtctggtgctgtccaagggtcatgccgccccggcgctgtacgcagcgctggcagagcggggcttcttcccggtggaagagctcaagaccctgcgtaagatcggcagccgcctgcagggccaccccaacatgaacagcgtgcccggcgtggatatgtccaccggcagtctgggtcagggcatctccgccgcctgcggcatggcactgggcgcaaagcatgccggctctgccgtgaacgtttacgccattctgggcgacggcgaggtggaagagggcgaatgctgggaggcctttatgtttgccgcccactacggcctttcgaacctgtgcgtgatgctggaccgcaaccatctgcagatcgacggcaccaccgagactgtcatgaacagcgccccactggaagataagctccgcgccttcaacttcaatgtggtcaccatcaacggccacgacttcgaccagatcgagagcgccgtgcaggctttccacgccgagaccgaaaagccaacctgcatcattctggatacggtcaagggcaccggcgtttcctatatgaccaattccgttgcatggcacggcaagggccccaacgatgaagagtatcaggtggccatgaacgagctgaacgccgcctatgccgcgctggaacaggaggagaactgagatggcagacgtgaaaaagatcgcgacccgcgacagctacggcaacaccctgaaggaactggctgcggaaggccacgatgatctggtggtgctggacgccgatctggccgccgctaccaagaccggtatgttccagaaggcatacccggatcgtcactttgactgcggcatcgccgagggcaacatggtaggcgtggccgcaggtctggccgctatgggctatgtgccctttgtttccagctttgccatgtttgcagccggccgcgcctttgagcaggtgcgcaactctgtgggctacccccacctgaacgtgaagatcggcgccacccacggcggcatctccgtgggcgaggacggcgcttcccaccagtgctgcgaggactttgccctgatgcgcagcatccccggcatgaccgtcatctgccccgccgacgatatcgaggcacgcgccgctgtgcgcgccgcctacgccatggagggccccgtctacctgcgcttcggccgtctggctgtgccggtgttccacgatgaggccaactaccactttgagctgggcaagggcgagcagctgaccgagggcaacgatattgccatcatcgccaccggcctgatggtcaacgaggcacgcatggccgccgagcagctggctgccgagggcatccacgcccgggtcatcaacatccacaccatcaagcccctggacgaggaaatcgtcatcaaggctgctaaggagtgcggcaaggtcatcactgccgaggagcacaacattatcggcggtctgggcgaagccgtctgcgctgtcctgagcgagaagctgcccactcccgtgcgccgcgtgggcgtgcaggacgtgttcggctgctccggccccgcatgggacctgctgaagaagtacggtctggacgctgccaccatctgcaagactgcccacgagatgctgggcaagtaagcgctttttacagcagtacgaattcgatttttaaagccgccgcacaaaacactgtgcggcggcttctttttgcctctataactgtcctccgcacaaggacaacggcgaaatgaaagcctgcgttttgcctgcgctttacatcgaaaagaaaaatgtgcgactgaatttataaaataaatagaactgttcaaaagcaagagataaaaaagaaataacacgattgttcaagtgtatttgtttaaaagtgaaatatgttcatggactgaaattgtacaaaaatcatgggatttctggggcgttacgttagacaaactgcagaaatgaacgcacgacgcggacaaattttgcaaaaccccttttcttttgcggaaaggagcggtataatgccgtcatagcacaagggagtgcatcgttccggaaggaggaacggacatcccttgtgtatttttagaacgtgacgctttagcagagtataaagctaaagcagtaaagagaggggaatatctatgagattcgatcgtcgtatttcgcgccgcagcttcctggcagctgccggtgctacctctgctgtgctggctctgacagcctgcggcggctcttccagctccgtggcggcttcttccgcttccggcactgcttcctctgcagctggcactgcacagggcggcaccctgaacattatgctggagaccgaggttcagtcgctggacccgcagatcgccaccgacggcacctcctttgaggtcatcgccgattacaccgacggcctgatgcagatggatgccgacggcgcagcagttcccgccattgcagagacctacgacatcagcgaggacggcaagacctataccttccacctgcgggatgtcaagtggtccaacggcgatgccgttaccgctgccgatttcgtgtttggctggcagcgtgccgtagaccccgccaacgcttccgagtattcctatatgctttctgatatcggtcaggtggtcaacgctgccgagatcattgccggcgaaaagcctgtcaccgatctgggcgtcaccgcagtggacgacaagacgctggaggtccagctgaatgttcccgtcagctactttttgagcctgatgtatttccccaccttctatccggtcaacgaggctttcttcaacacctgcaaggacaccttcggcaccagccccgacacggtgctgtccaacggcgctttcaagctgacggattaccagccggctgctactgcctttacactggaaaagaaccccgattactacgatgctgctaaggtcgcactggacggtctggcctatcaggtcatcaaggacagccagcaggcactgatgagctaccagaccggtgctctggatatgaccctgctgaacggcgagcaggtggatcaggtcaaggatgaccccgaatttaccagcgtgggtgccggttacctgtggtacatcagccccaacatcggcggtgtgccggagcttgccaacgagaacctgcgcaaggccatcacctttgcactggatcgtgacgccattaccggggacgtgctgaaggatggctctgcaccctgctacaccgcggttccgccgcagtttgccaccggccccgacggcagcgatttcagcgccgaccagaccaagtttgcagagttctgcgcttatgatgccgacaaggccaaggagtactacgagcaggccaagagcgagctgggcaaggactccttcaccttcaacatggtggtggatgccgacgacgcaccccagaaggtggcacaggtcgtcaaggagcagctggagaccacgctggcaggctttaccctgaacctgaccgtggagcccaagaagcagcgcgtgcaggatatgcaggacggcaactttgagatcggcctgacccgctggggccccgactacgccgaccccatgacctatctgggtatgtgggtgaccggcaattccaacaactacggtctgtggagcgatgccgactacgatgccatcattgacgagtgcaccaccggcgatctgtgcaccgaccccgagggccgctgggctgctttgtacgaggcagagcagatcattctggagcaggcagtcatcttcccgctgtacggccagtgcaacgccgagatggtctcttctgctgttaccggcgtagagttccaccctgtggcactgaaccgtgtgtacaagaacgccgctaagagcgtgtaaaacaaaagcatactgaataaggccgcacagtggcccgcaaaaagccactgtgcgcctttttgccatttgacctgtacgcggcaggcgaacgattgaccacgaaaaac

SEQ ID NO: 13739 - DNA, 12762 bp, Unknown
  gut microbiota DNA sequence
ctgacatcgctgttcacgctgctggcaattttgctggtgctgttcatcctgatgcagctgatgcccggctcgcccttcaatgatgaaaagctgacgcccgatatgcgggcagccctgtatgcaaagtacggccttgaccagcccatctatatccagttcttccgctatgtgggcaatatgctccggggcgatctgggtgtcagctacaatatctccaaaaatacgcccatctcccagctcatccagtcccgtctgcccatctccattcaggtgggcggcatggcggtcacgctgggtgccatcgcaggtctggtgctgggcattcttgccgctttgaagcgggataccgtggtggactccatcgccaccatcatctcggtcatcggcgtatcggtgccgtcctatgtgttcgcgctggcgctgagctacaccttcggctttaagttccgctggttccccatgctgttttccgccaaggacatctttggctccagcgtgctgcccagtatctcgctttccatgttcaccatggcgtccattgcccgctttacccgcagtgagatgatcgaggtgctggattcggattatatgctgctggccgagagtaagggcatttccggcccggcgctgatcttccgccacgcgctgcgcaacgccctgatccccatcatcacggtgctggcaccgctgatcgtggatttgatgaccggctcgctggtggtggaaaagatctttgccatccccggcgtgggcagcctgctggtgacagccatccagtccaacgattacaacgtggtcattggtctgagctttatttacagcgccatgtacattggcatcatgctggtcgttgacctgctgtacggtatcatcgacccgcgcattcgtttggcaaagggggacgactaaatggcagaaaaagcgatccggctgggcggcgaatccaccgccgatgccattgtcagcgccgtggatgcaatgtacacggagcacacctttgcggaaaaggattttgccctcaagcacaacgaggacgagatcagcgtggataccaactttgcggcgcagaacttctggaaggaagcgctcatccgctttttcaataagaagagcgccgtgctggggcttgtcctcatcgtgatcatcgtactgctggccgttttgggcccgggcatgaacagctacacctactccgggcaggatctgagccagaaaaactttgcgccccgcgtgccgggcattgagcagttcggcattctggacggcagcgagaagatgagcaccaccaccggcaccaaggtgaccaacgcttatcaggaaaaagacaagctggacgtctactactggttcggcagcgacctgtacggccgcgacatctggacccgtacatgggaaggtgcccgggtctccctgatcatcgcggtggcggcggcgatcattgatatggtcatcggcatgagctacggcctgatctccggctacttcggcggcagagtggatatggtgatgcagcgctttctggaggtagccaacggcatcccccggctggtcatcgtcacgttgctgctgctggtgctgcagcccggcatggtgaccatcatctttgccctgatgctgaccgaatgggtgggcatgagccgcattgcccgcgcggagatgctcaagctgaaggatcaggagttcgttctggcctcccgcacgctgggcgccggcagcttcttcatcatcttcaaggaagtgctgcccaacatcatcggacccatcatcacgcaggtcatgttcagtatcccgaccgctatcttcaccgaggcgttcctctccttcgtgggtctgggcatcccggtgccgcagtgttcgctgggttctctgatcagtgagctgtacaacagcttcaccacccacccctatcagatcatcccgcccattgtggtcatgagcctgctgatgctcagcttcaacctcgtggcggatggtctgcgcgaggcgctggaccccaagatgaagagtatgtaaggaggaacaccccatgcctgaagcaaaaaaagaacaggtcttgtcggtgcgagaccttgatatcacctttaagaccaccgcaggcccggtgcacgccatccgcggtgtgaacatcgacctgtacaagggcgagacggtcgcgctggtgggcgagtccggttccggcaagtccgtcaccatgaaagccgccatgggcattctggccaagaatgccactgtgaacagcggcagcatccggttcagctaccaccacgccgacggcagcccggagagcgtagacctgctgcaaaaggataaaaagtggatccgccgccacatcaacggcaagcgcatcgccatggtgttccaggaccccatgaccagccttgaccccaccatgaccatcggcaagcagatcatggagggcatgctctggcacttcaaaatgcccaaggcggaagcctacaaaaaggcgctggaactgctggaagaggtgggcatcaccgatgcggaaaagcggatgaaaaactacccgcaccagctgtccggcggtatgcgccagcgcgtggtcattgccattgcgctctcctgcgaccccgacctgctcatctgcgacgagcccaccaccgcgctggatgtgaccattcaggccaaaattctggagctgatccgccgcatccaaaaggagcgcggcatctcggtcatctacattacccacgaccttggcgttgtggcaaaggtggcagactatgtggacgtgatgtacgccggcaagatcgtggagaccggcaccatcgacgagatcttctacgaccccaagcacccctatacatggggcctgctgtcggccatgcccgaccttgacaccgccgacgaccgtctgtataccattcccggctcgccgccgaacctgctgcacgagaagcccggcgatgcctttgcaccccgcaaccgctttgcgctgaacatcgacgacgagatcgacccgcccatgttcaagatcagcgatacccactatgcggcaacatggctgctggacccccgggcccccaaggtggagatgccgccggagctcaaggagcgcattgcccgcatgaaagcagaagcaaaaaagatcgaggaggcggaataaatggcagcacagagcacgaccccgctgctgaaggtcgaagggctgaagcagtatttccgcgtcaataagaatttcacggtcaaggcggtggacgatgtcagttttgagatctaccccggcgagacctacggtctggtgggcgagtccggctcgggcaaatccaccatcggccgcagcatcatccgcctgtacgaccccactgcgggcaagatcacctttgacgggcaggatatcagcggccgtctgagccatgcgcagaacaacaccctgcgcacccagatgcagatgatctttcaggaccctatggcgtccctgaacccccgcaaaaaagtggaggacatcatcggcgagggtctggatatccaccatctgtgcaaaacgcaggcagagcgccgcgaaaaggtggaaaagatccttgctaaggtcggcctttccccggagcacgccgagcgctacccccaccagttctccggcggtcagcgtcagcgcgtgggcattgcccgcgccctcatcatgaaccccaagctcatcatcgcggacgagtgcatctcggcgctggatgtgtccattcaggcacaggtagtcaacctgatgaaggatatccagcaggagaccggcacggcttatctgttcatcgcccacgacctgtccatggtcaagtacatctccgaccgcatcggtgtgctgcatctggggcatctgctggagaccggcaccaccgaggagatcttcgagcaccccatccacccctacacccggagcctgctgtcggccattccgctgccgaacccggtggtggaaaagcgccgcgtggctgagacttatgactatgccacttccggcatcgactattccaagggcacccgccaccatgtggagggcagccactacgtcaagtgcacggatgaagaatttgccaagtggtgtaaataagaccgaatccaagacgagcgctgcaggcggccttttatagtgccgccgtgcagcgcaccgccaaggagcaaaagaatgcccgcccaccgggccgttctggagagtgaaaactccagtaaggcagacaatgcaaggaaaaacacggctttcccgccggtgtgcaaaaagtgtgcaaaaatgtgcagacgggcaaaacaaagcccaatggacaaatcaaccaccggttttatggcagggtttaggacatccgaacagacaccgtttgatatagaaatgaggttcaccatgaacaaactgctttcctgccgcctcaatatggacaccaaccgggtggaagcccggttcgaggatggcaccacgcttgccatcgactgcatcgccgtggaggacgagtatggcaacaccccggcacagcgggcagagctggactggctgctctacaataagcccttggagtatgcacagcttgtgctgggtggtgagatagagcatcatctttcccttggctgcgagcatggcagactggaagattaagccccccataaagaacacgatgcccaccgacctatggttttcgccataagctggtgggcatctttggttatattgttttcttatactccgggaatctattcaagctgtgattttcactcgttgcagattttttctatcgactcttgaaattctgtttgtcgaagctctggcactccgccatattcacagttgagatacttattccggatattattggccgcatacgttcgcttgcggtaatccgatatgcatcgtatttttttatctgacggattatcaggatccacactcaaaatataggttgcctctcgtgcaaaactcgcttccatcaacattgtattatgcgttgtcataatcacttgacctttgagaatcggccgaatctcttccaataatttctggaacagcaaatcgtgaatgttggcttctgcctcatccaaaataactactcctcccatgcaggctgttaacaaatagcacgatatattcaacaattgacagttaccggcagattctctttcaaagtcaatccgacgataattgcctgcaatatatttttcctcaatcagtttatagtagatttcgtcatcatgaaattcttttttataaaatatcttgcgaacgctaagatcaacactcgtaaatagttgtgtaaaaaaatcgcttgcataatctaactctgtctctcttcgaagagacagatgaccttgcagtggccgctttaaaacttgcagcttagaacttagtccttcccagcttttgttgcccatcgaaacagcacaagacaaacctcgaaattctcttagcacagtattgaaattctctgttacattatcccgtccaaatgcattggatttatctttcatctcataaagtaaaattgctaaaagagaatgctttccccaataacgttttgctgtttcctttacgtctaccaaaaaatccttcccattggttccttgaataactgtatcattaatcagaataccatcagaactacagtcaaaataaagtcctctgcgccgattaagaacatattctaaacgctcatgcacaatttcatcctgtccaaattctacccgatagcagccgttgttaccgttaatgttgaactcatactctgcaactatcggatcttcacagtcaatcattcgatagtcttttatgatggcagacatatcccttaaactatgtcgcatttgctcgcgcatcactttttccatcttttcatcttgaaagatagcatctcgagttagaagcctttcataggcatcacgtacatccatggtgcgagtcaactccggtagcaaaacaaaagcagacattagattagacttgcccgcaccgttttctccgtagagtaccgcaagatgctttgggacgtttcctttttctgtcaagtcaaatacgatatggtcaaacgaacggaagttttccagtgttatctttgtaaacattgcagttccctccttaaatcttagtatctcacatttcagccggcttttcaagacttaaaccaacccaattgcagaaacaatttcaatattagagaggataattatcgaatttttgaaatatttccaaaaagcccttgacaaaagcgtagtttgacgcttcaatagcattcagagatggcagtcgagctagccgagtgctatctttcgggcatgaaaaaagacgcccggcaaggcgtcttcttctccgactcttccacaaagattgtcggcttggtagtgacataccagtgatattatatcacaaaaaaagcctccacgcaatcggaatccgtcgaaaagaacgtgccattcaaaggtgcactatctatgatgcacacttttgtgctgggccatgtttcttcattgttcagccctttgtttgccgtatcctctctgtttatacagatggtacgtttttctataccaacttgggtgcatgcttaggttggtatccgattggcataaaggaggttgattttatgtcaaaaaagctttcattaatgtttgttggctattttagggatttggataaggatgaccttcccaaaaaatctggtgtttatctggtctatgctggaaagccagtatcagataagatcgtgtctctacgtaaactcttttacatcggtgagtctagtaatatccatgaccgcattgtggaacataaccgggacaaagattggaaggatgggctaaaagaaggggagcttctatattatgcatatgccctcgcaccgaaggacgagcgtttattggaagaggccgctctcatttactattacaaaccgccatataatacagagtatgtagacaactatccctttgaaagggtcgaactcaatctttctggtcctgggaaatcaaagacaccgtttgaaatggattcatcaattaaagtcagctaatgtaagtcgatatttaaaatagtcacaagaaaaagggctatcgcacgaattttgttcgatgagatagccctttttctttaccggcatctctatttatttcggaaaaggcagctactgtttgttactcgggattctttggcaggcggtcgtacagcactaccgtgtcagaggtttcaatctgtacccgctctttcttgagcaaggcgcgggaacgctggtttgtgcggtagtcgcggtcacccttctcaaaggcagaacaacacaggaagtcacacatagcatcacccacagaggattctttgataataaaaacgaacgctgttggttcgttttgactggaaattatataatccgccttaattttggtgacgaatgggtaaagatttggcacgtatgagaatagttcaaagtcttgttccaatacttcttttagccgtaccagtgccaaaagccgtggttcgaccatctcacgatactgcatacccttttgtatagctttataagtaattttaccagacagaatcatgtctactatcttccgagaattatatcgcggaagtgaaatatctttcaagtattgaaatcctgcaagatgcgaaaattcatctgctgaaaacgtcaggttaatctcatatgatttatttcgacaaccatatgtgaggatataccgataattcatcaggtccttccaaacagcggctgcttgatacaaaacattttgctgttcgtcctgcaccttttcaccttccctcaaaaaaatagaagccctgccgaaaggcaaggctcctattaagcgttttctttcgattcatcgaatctattcggcttgtggtttccgctcaacccacggtcgggctccacagtcggctgataccgaaccagtctactgtttcatcgccaacgatagctggtcaatgccgctatcctctaaccttattatatcacaaaagcggccaaacgcaagtacttgttctcaaaaatttcacgtcccaagccgttacacgcaaacaatttcaaagaacctatttaaattattttctttatttatgattactcaagatgatctatagcatattgtgcttgtgacgaagtaaactgttcgccgtaactagaagttagttggtcatagatagcctttttcgacatatccatcttataataatactgttttgctttttcaagagcattcgcattccaatcaacatctgtcatatggtcgatggcatactgcgccgcatcttcagaaaatccttcaccataagaagaagtcaactgatcataaactgcttgtttggacataaatagctgattagcatactttaatccctttgtcaacgcattttgatattcctgcgatccactgtcagaaaccgagtcttcatccgaatttttcgtactcggtccccctgtagtccacccagagggagaatgtggcacaggattttcagctgctgtaacattcgcttttactcgttcctgttgttcactttctgaatatacctcaacataatcgttttttccaaaactatcgtcaatatgaatatcataccatttcccagcacaataaaagtctccgattgtagtatttccaaagctgctactcaagctcccatacggatcgaacgttcgatgatatatctctctaaattctttgaacgtttttataatttgtttatcggagagttcattaagattaaccccatttataccatcgcatctcaaacaccacgcctgtcttccccgcatatcctcggtttgaattgcttctggattttgaatttcacactgtgttgctaagcattcaataattttccgtgaaaaatcctcatattttacattatcgccagataatttatatgctttttgagcagtgttgaaggcatcttgatatttctgttgttcaaatagctcttcagcctgcgccatcaatacttgcgcctgttcattgttttgtttttgaatagcttccatatatccttttgctgtctcataattgacgtcagtttctatcacaccggaaaaactattataagccgatattgtatctcccgctgtttgaaactcaatgcctttttcaaagttcttctttgaagtttctaattccagcaagcatttttccgcatcaacaaatgttgccgtttcccctatcatagatctgtaaatatcgaactgttgattcacataatcctttgtcacgtcacctgtattatattgttcaagaatggtttccaacaccggagccaatccatcctctaccattttttcagcagaagaatcaccagaaacctttttctcatagatttgctgtgcctttgcagcatcaccagtctcaatttctttaagaacttcttctgccggatttccacatcctgtaagcataatcatacaaaaagcaatgagaccgcaatcacaagcacttttgaactcatcaattttctccttttagcatttctttaacatctcttacaagcatactgtaagactatttccatcattttatcacagaagcatttcattctcaatatttttgttcatttgccacaaaatttgtttttgcactctgcatttattcgtcagcagcaagaatttacctccgatatggcttttcataagtcctactatcaccgctttaccgcaataaatttcgcaaaaccatcttgacgcaccttgcaaaccatgatactctctgtcacaaatcccactgaatccgcaataaaatgcgacgcagtgagggtttgttccccatgaagatttttaccgccccgcaacacacccgatctattttgccgccgtttcacccgacaaaatcatcgctgcgctgcgtgggcggtatttttctttttcacaaataaaatcttatgtagttgtttaatcttctaaaaattgtttttagttgttgactgtacaactgaaaagtgttattcttgtgcttgaaagaagcaggctgtagtgtctgcactgcgcccggctttcttcatactgaaccttgaatcttacataagccgtctgaacgagatactgcgccatgacctcacgctttctgtgggcgagccggacaacgccgctgcaaaacaggggcaggaactgcgttcggtgtgaacggtgaccatgagcaggggctttgccttttcacacgttttgctctgcaaaattttcaacgtgcattgcggttcgaattctgaaattttcagtgttgcacggaaagggcaaaagcaagtatcgacctgtggccacaaattttcaatgcttgaaaaattgctgtccactcagtcatccttgttggggcaagcgcttgtcggggcaaagcccctccatctgctgtcgcagaccgcgctgccacttgaaagccccaatggggctttcattgcttcgcaaccgtggcccttccccaaaccctgctccagcattgcgctggtttcagcgcaaaagcggcgtgtcgcattacatagccctctccatcccggagcgggcatttatcattttcacaggaggtcgaatatgactgaaatgaaaagtccgaatgtacacgcacgaaagaaccgcaatgacacgccgcgaaaacgaaagacacacatcatcaaagtccgagtgaccgcagaagaaaaactgcggatcgcatacgcctgcaaagaactccacctcacccaatccgaactcgtccgccgcgtcctgtacggcgtgaacgtcaagcacaccgttgtggtggcgcagggcggcgaggatgcactggcggcgcttgccgccttgtctgcccagtgcagcaaggtaggcagcaacctcaaccagcttgcacggcacttcaactccggcggcaaagacaccgagcagctccgggcgcaaattctggaggaactgtccgcattcacgaactttcggctgaaagccgaagaaacggttggtgaactgtatggcaaccatcaagcaataatccggctgcgccgaattggctgtaaaaaatcacttccgcgattttttctaatgtaagcagcctgcggctgcaatcagcatgacctcgaaaaactctaactatgccgccgccgaaagctatctcacctttcagcacaacgagtacaccggcctgcccattctggacgagaagggcagacccaagctgcgggattcgtacctgctcgacacccttgagtgcggcgaatcctcgtttgctatggcctgcctgattgccaaccgcaagtacggcaagaacggcgggcgggaggacgtgaagacccaccatatatggcgacatccgccaaagcggatgctaatatattcgtgcatagcacgcaccgctggccatacgaagtatatcatcagcttcgacccgaaggacgcagtagagaacgacctgaccatggagcgggcgcaagcccttggcttgcagttctgcaaggacaacttccccggtcatcccgccatcgtctgcacccacccggacggtcacaacagtgcgggaaacatccacgtccacatcgtcatcggcagcttgcgtgtccgcaccgtggaacggcagcccttcatggacaagccgtgcgactgggaagcgggcaagaagcaccgctgcacttctgccatgctccggcacctccgtgtcgcagtcatggagatgtgcgagcaagccgacctgaaccagatcaacctgctggaagcccaagacgaccatgtttcggagcgcaagtattgggcgcagcggcacggacaacgccgcctcgaccatgccaacgccaaacttgccgccgaagggcagcagcccacccagaccgtctaccagaccgagctggacaagctgcgaaagcagatctacgcttgcattaaaaacgaactctgcgataactttttaagaaaacttcgtttgctttcaatagcttttcatagtattcacgataagaactgctcaatcgccgcatagcagggataaaaacatcattgtacccgttttctcgatttaactgtgcgaatagttcttgaagtctgtaacccggagtgtttttgtacgcgtcagatgctttgacttccttataccgctcaaacatctccctattatctttcagatattgttcagggtcttgtattgcagcagcaacacttgcagcagctttttttgacacgtcaacaagatcaatcgttttcgcagcatcgtcgagatattctttcaaatcatccgggataacaatattcacaccgtctaaaaaatcaattatcgtttcaaatgcatcttgctgttcgtctgttgcaaccctctcattcaggtacggtgcaaaatggagactgataaatttcccgaaatatcccggaaaacggtcaagcaatcttgaaagaatagagcgcttcgtttcgagctggctcaattgcgcccgggcatcctcccaattctggtttctcgcaagcatgtggagtaattgttgtttcgcttgtatatccgaaatttccagttctttcttgtcgcatatagtttgaaaggataaatagtcattctctgccaaaaccgttttaatgtccgatactgatattccaagcccgcgtaaaactgcgattttgtttaattggatgacatcatcctctgaaaacaccctgtaaccattttccataatttgagggcgagttaagccttgttcctcataatactcaatcgcctttttggtaaggccacatctcttgcagacttcattgataagcatattatcacctccactagtatgataagcccacccccaaggggacagtcaatagctttttcaaaaattctcttgattgggcaaggtgtgtacgatat

SEQ ID NO: 13740 - DNA, 24266 bp, Unknown
  gut microbiota DNA sequence
cgggaaaatccgcagatttcccgacttgaaaatataaaatatttttctgcgtggtttactggtcgttatccacatcgtcccagccaatgaggtcgggcagggtcagtgtctcgtccgagcagtggtggcttgcgcggcgctggtcggcagccttggtgtgcactacctcgcgggcaagctcccggatggcaatgcagtcctccggcaggtcggtctggctgcggccggagtgggtgaacaggattttgccctcgtggcccacgatcaaggtcatgggcaggatctgcggagcattgcggtcgtagtgataaccggcatcccgggcacttttgtagatgcgttgggcagaaaagctccagctcaaaagtccgcgtgcctgctccacccccagatagctgtacagcacacccggcgcatcgcagatgatggggaagggaaactctttcccctgtgtagcctcggccactgcgcggggggctgagcgcaccacgcaggccagccgcacaccccgcagccgcggcagggtctttaagtagcgggtcaggtattcccgggtgaccgggtggtcgaacccgggcagaaagatcatgcacaggggctcggtgcccgcacacagggcgtaaaaatcgttgcccggggtggtgggggtgtcgaaggtgaaccggggaatggaagtaccaaccagatgctcagaactcatgccgcaattgcacatcctttcaaatggtgataaaaaaatccacagccgtgccctgtgtttgcaggggcacaagcggtggattggattactataaagatcccgcccggtcgtctgcggtcaatcaaacctacccttacggacaggtgggtgccctgtctccggaatcacgcttcctcatcgaacctccatggtcgacccatggcggggaggtctgcaatccaccggagaactccgggctcccgttgaatgattagtaggatcatacaaaccgcaacaaatcgagccgggcaggaagtcttgcacgggtcaatccgtcaaaggacttactcgatatcgtagtcctcgctcagacgctgctcgaacagcttgctgacttccatcagcacctcgtcatcctctacaacgtccagatattcgccttcgtcgtcctccccgacactcaggatcaccagctgggcgtcctcgttcaggtcctcttcgttctcggcgtattccacaacagccagataatgcacgcccttgtggtccagcgcatcgatcacctcaaaagtgacctcgttgccgtcctcatcctcaagggtcatcaggtcgggctgatattcttcctcagtattggggttcttgatctcgtcagacataatacgctcctgtattgctttatcacaaaaagcagttgatgcagcgggctgcgtcccgcttggtctgcttatagtgtagcgtgttttgcgcagttcgtcaagatgctttttcgcacagaaatcattggataaattttcacgcaatttcctctcgcactgccgcgcataatatggtatactactggttaaagcttttgcgctgcgctgtgcggcgttgtagtacagtatatggaacagggagcgggagtatgttgaaaaaattaggggcggtctgtcttgcggcggtgctgctgcttacgggctgcacgctgcggccgcaggaaaacggcagcaaggtccagagcatcagccgaccggcggtggaatccgctgagttgcagttcacccacccggtagcaggggacacggttgcggtgttcgatacctctgcgggtgttttccgggcggtgctcttcccggaaaaggccccgcaggcctgcgataacttcatcggccttgtacagcagggctactacaacggccttaccgtgagccgggtagagaaccagttcgtggtggaagccgggcagggcgcagacggcaagggttctactatctggaagggcagccgctacccggtggaggcatcggacagcctgcaccactacgccggggcgctgtgcatgggcgtggatgcctccggcgcgtgcgccagcgtgttctatgtggtggaatcgctgccgggagaccagtcggtaacgcaggaactgacagaccagatgaacgccgccggttaccgcgccgaagtggtatccgcttaccagaccgcgggcggcgcaccctatctggactacaccgacactgtgttcgggcaggtgtacgagggtatggacatcgtggacaccatcgcccagaccgctgtggacgaaaaccagaagcccaccaccgatatcaccatcaacagcgtgagcatcgagacctatcaggggtaaatagtatagcaaaaaatgatgcctgtgcgtgagcacaggcatcattttttatatctccccggggtgctccttgcgccatgcaaggtagtcctctaaaatcaccgtggcactgaccgaatccagaatctccttgcggcggctgccgtaggtgccgctttcgtccagaaggtcggcggcggcacaggtggtctgacgctcgtcccacatccgcaccggcaggccgctccaaagttccacggtctttgccagcttgcggctcttggcggcgcgttcgccctcggtgccgtccatattcagcggcagaccgatcaggatcatctcggcttcgatctccttggctacctcgcagacccgggcggcaaccttgttgcgcgcctttaaggtgatctggggcgtaatggcggtggtgagaaattcggtgcggtcgcaggtggcaaggccggtgcggctgtccccgtagtcaacggctaaaatcttcatacaaagtccctttccggtgtgcagaatgtttttttcagtgtaccacagcggcggcgggattgcaaagaaaagcggtggttttatctccgctttcgtgttacaataaaggcaaaaatcaatgagcgggaggagaccgaaatgctgaaactggttctgggcgcttccggcagcggcaagaccaccctgctgtatgcccgcatccgtgcccgtgccgaggcggggaaacgcagcatcctgctggtgccggagcagtttacctccagcaccgaagcacgcatctaccgggagctgggagatgccctttccggcatggtggaaagctattcctttaccagtctggccgagcatatccttgcgatagagggcggcgcggcggtgcagaccctgaccgatgccgggcgggcggtgctggtgcgccgtgcgctggaggaattgcaggataatgtgcactactactaccgccaccggcgcagcgcagccttttgccagatggcggcagagactatcgacgagctgaaaagcgccgggctttccggacagcagttgcaggagcttgcccgggactgcggcaccgagagcgcgaagctgagcgagctggcactcatctttcagggctacgaaagcctgctggcgggcaccggcatggaccctgccgaccgtctggagctggcggcagaccgtctggaggccgcgcttgcccgggacgaactgccggactttttgcgggagcgcgaggtgttcattgatgagttcgacaccttcaacgcacccaaaaagcggctgatgggtgccatgctggccgccctgcctgccgtgacggtggcgctgtgcgaggacggcgcacccatgcagcccggggacctggaactgttctccggtgcaaagcaggtggcggcgcagctgcgccagctggcgcgcaaaaacggcgcacaggtggccgccccggagctgctgcggcgggacctgcgccataaggatgccccgggccttgccgctctgaccgaactgttggagaccggcagctgcaccccgccggaaagcgccccggagctgcggctgtttgccgccgccagccgggaggaggaagcccgctgcgccgctgccgccatccgccgcctgatgcggcagggtgtgcgctgcggaaagatcgcggtggtctgccgcgatatcagcctgtaccgggctgcggtgcggtacgagttccgcatggcagagatccctctgtactgcgacgagcccaccaccccggagttcagcgcccctgccacggcggtgcgtgctctgctggcattgctgcggggcgcggatatgaccgagcagctgaccgtgctggccaagaccggcctgtgcgccctgaccgaaccggaggtctgtgcgctggaaaactacgcctacacatggtcgcccaatgtagcggcgtggcgggcagaatttaccaaaagtccccggggcttcggtgacgccgaactgaccgaggaagatacgctgaacctgacccgcgccgagaatgcccgcaaaaagctggtgacggcggtggataccctgcgcagcaaggtgcgcagcgccaacgccgagcagatcagccgggcgctgtatttctgcctgaaggagctgggcgcagaggggcagcaggccgcacaggtggaggatatccgcaccgctcggggcatcccggcggcagaggaagccgcccgcgagtggaacgtggtgatgcagctgctggacgagatggcgcggctgctgggcagtcagggcatcaccgtgccggagtacgaggatcttttcagcctgctgctgcgctcctctgacctggggcacatcccgcagaccttggacgcggtggtgctggcaagcgccggtaaaatgcgtctggatgcgccggactatgtgttcgtgctggggctggcagagggtgaattcccctgtacccccgcagaaagcggcctgctgacccacgccgaccgcgatttgctgatggcaaaacagatcgacctgccggactgttttgagaaccgtgtggtgcgcgagcaggtctgtttctacaaagcccttactgccccggcaaaggggctgtggatgagctggccgaaagggcaggggcagaccctgtgtgccgcgctggaacccatcgtggaggcgttgcagcccgccgcaccgcagctggaactgatcgaccttgccgccacccccgcagacagcttagacgtgctgggcggcggctggccgctgaccgaactggaacgcgccagcctgaccgaggcgctgcgcgcccccggtgagggagtgcaggcgccccgggggctggcactgttgcagcgtatggagcaggacccgccccggcaggtgcaggatctgcccacgctggaagcgctgctgggcaggcggctgcacatctcgcccagccagctggaaaaatactatacctgccgctacggctactttttgcagtatgtgctggggctcaagccccgccgccgtgcggagctttcggcagaccagagcggtaccctgatgcactgggtgctgcaaatggcgctggacccccaccccggggaggacaacccctgcgccgggctgcgcccctttttagaactggatgatgccgccatggccgaccttgccgccgcactggtggacgagtacgcgcggcgctatctgccggaggataccgcacgctttgcctacctgctctcccggctgaaaaagagcatgaccagcctgctgtgctatctgcgggacgagcagaaccagtcccaatttaagcccgtggcctgtgaactgaagatcggccggggcgaggatgccgtgcccgggcaggtgtaccgactgtcagatgggcgcacggtgcagctggtgggcacggtggaccgcgcagacgagtggatcgaggacgacggcacccgctgggtgcgggtggtggactacaagaccggcagcaaaaagctggacttgaaagaggtctactgcggtctggactgccagatgctgctgtatctgttcagcctgacccgggatgcgggcgggcgctttaccggcgcacagccggcgggcgttttgtatctgctggccgaccccgccccccagaccctgccgcgcgggcaggctgcccgggcagtggagtaccagctggacggccttgtgcgggacgagcagaagatctttgatgcgatggactcagacgaaacgggcaagtacctgcctttcggctaccgcaacggcgcacccagcccctaccagaaggacaagcgggcagacagcgccaagctcagccgcattcaattgcatctggacgaccttgttacccagatgggcgagcagctttacggcgggcagatcgatgccgagccgctggtggtgagcagcagcaaaagcccctgcacatggtgcgattacagctttatctgctgccacgagaccggggtgcatgagcgtgcgctggaagcccctgcaaagccctttgaacctgaggaagaacctgaagaagaggaggaacagccgtgagcggacccaaatggaccccggcgcagcaggccgccattgccgaccggggcggtgcactgctggtaagcgcagccgcgggcagcggcaagaccgccgtgctgaccgagcgggcggtgcagctgatcaccgacgatgagcacccggtcaacgccgaccggctgctcatcgtcacctttaccaatgcggcggcggcagagctgcgtgcccgcatcgggcaggcgctgctgcaccgcagccagctacagcccggcaacgccatgctgcgccgtcagcggatgctgctgcagcgtgcgcctatctgcaccattgatgctttttgtctgaacctgctgcacaagcactttcaggcgctggatatcccgccggattttgccccggcagaccccggtaccgtgcagctgctgcggggggcggcactggccgaaacgctggaaaacgcctaccgcgacccggatttctgcgcctttgcagatctgtacggcaagggacgcacggacaagcccgcaggcgatgccattttgcagatctacgattttctgcgggcgctgccggattataaccgcaagctggacgaatttcttgcgccatacgagcaggaaaacggctttgcttccacctgctggcacgacctgcttctggccgaagctgcccgctgcgccaaggctgcgcgggaactgctgacggcagcgctggccgactgccatgcggattttgaccaagagctggcagctgctgaggaaaaaaagaccccatccgcccgggcaaaggcacagcttgcggtggcagaaaaatacgaggaggccggtacaaggctggaaaaagccgccgccttttttgcgcaggcggagcagctggccactgccggacagtgggacccgctgtacgacctgctcaccccctatgtgctgggcatggaggaagcccccggcctgaagggcatgaaaaagcgtatgggcggcgaccacaaggcggagatcaagacccgttcggacgaagctgccgctttgttcgagcagatgacccagctcatctgctgctccgaggccgaagccgagaccgaccggcagatcaccctgccccggctgcgggcgctgtttgccgccgtgcgggacttcgatgcccggttcacggccagaaaacgggagcgcaagctgctggaattcagcgattttgagcaccttgccctgcggctgctgcgcaccccggagggtacgcctacccccttgtgcgagaacatccggcaggattacgccgccgtgatggtggacgaatatcaggacacgaacgccctgcaggatgcgctttaccgctgccttgccgccccggcaggggacaacctcttccttgtgggcgacctgaagcagagcatctaccgcttccggcaggcagagcccggcatcttccggcaaaagctggacagctggccgctgctgccggacgcaaaagcccgtccccgcccgccggagggcaccccgggaacggacgctctgctggcgctggatgcaaacttccgctccgcaccgcaggtggtggcgggcatcaactatctctttgagcagctcatgaccccggagctgggcgataccgcctacggagacgggcagcgtctggtctgcggcgcacccggggaatatcagggcagcgtggaagtgcagtttctgccggacgatgagacggaaaccgatgcgggctggatcgccgaacgcatcgcgcagctggtttctgccggagagccggtgcgggagggcagcaccacccgcccggtgcggtacgaggactgctgtgtactgctggcagcgcgcaccgagttcccggcctatgtggaggcgttgaccgcccggggcatcccggtatacgccgacgcccgggagaacctgatgcttgtgccccacatccgccccctcatcgccctgctcaaggtcatcgacgacccctcgcaggacatctatctggctgctgccatgctgggccccatgttcggctttaccgaggatgaccttgtgcggctgcgcgcccgcagccgtcaggtacaggccgagccggacaaaaagcccgcccgcatcagcctgtacggcgcactgctgctggcgttggaggacccggccgacgatccctttaccgagaaggtgaaggatttctacgctcatctcaccgccctgcggcagatggcgcgcagcgccccggcagagcagctgctggaagaaatttttgcctccaccggttatctggcggcgctgggcgtgctggaaaacggtgcccgccgccgggaggatgcccgccggtttgcctccttctgcgccacttccggtacaggcggcatctcggcgctggtgcgcgccatcgatgccgccgcgcaggccggcagtaccggacaggacactgtgcccagcggggtgcacccggggtgcgtgtccatcatgaccatccaccgctccaagggcttgcagttcccggtggtgttcgtgggggatacggcgcgcaagttcaacgcttcggatatccgtcagccggtgctggtgcaccgcagctacggtgccgggctgcggctgcggccggaaaacggcgagggcgcctacaagactgccgcctataccgcgctggctaatgtccatgccggggagctgcgcagcgagcagatgcgccttctgtatgtggcgctcacccgtgcgcaggataagctcatcctcaccgtgcccctgagcagcggcaagaccacaaagccctttgccaaggcagcagcttttctggctgccggggcgggggccacactgcaccagcaggccaacagctttgccgactggctgcgggcggcgctgctggtgcacccggacggcggggtgctgcggcagctttccggcaaccgggaactactgtttgtgcagaccgaaagcgtgatggccatcagggtgtgcgacgatgccgtgcaactggccgaggaaccggatgcagatacggagaatgaagtgccggagaccgacttggcactggtggagaaactgcggcagggctttgcgtggcagtacccggcggcagcgcttgcgcaggtgccagccaaggtcagcgtgaccagcatcgtgcacaaggccgagcaaaccacgctggagcgcccgggcttcctttccaaggacggcctgaccgccgccgagatgggcaccgcactgcacgcctttttggagcatgcggactttgcccggttggcagaagccaaggctgcgggcacgctggacgaagccatcccggcagagcgggatcgtcaggtggcattgcagctgaccgccccggagatcgcggaaaagctggacgcggtgtgcatccgccgctttgtggaaagcgaagcctttgcaaagatctgcgccgccgagcaggtgctgcgggagctgccctttatcaccgcactgcccgctggtgcggtgctggcggcgcaaggacacgaggcactgcccgctgccgcagacgcgcaggtgctggtgcagggtatcgccgaccttgtgcttgtgtacccggatcatctggaactgctggactacaagaccgaccgccgcaaggccgagagcgactttctgcgcgcctaccgcgcccagttgaacctttacgccattgccatcgaaaagcgctttgcaccgaaaaaggtgacctataagggcatctactcctttgcactgggcaaactgatcgaagcgtaaaagggaaaagtcatattttttccaaagaacgcataaaaagtgcttgacagggcagataaagcgtggtagaatagccgggtaaagaaagcagctacggcctgtgccgcgctcgccttgcgggagaatgtccccgggctatacccgaaacagcagcttattcctttgcgaatgctgcggctttgtgtgaaatttcgcgcggctgtccagaatatgggcggccgcgttttctatgccaaatattgcaacactatggattttgtttggaggtgcattcattatcgctaccgctggaaagtcgaaggaactggagatcaacggccagatccgtgatcgtgaggttcgcctgatcggtgctgacggcgagcagaagggcgttgtgtccattcaggtggccatgcgcgctgcagaagaagccgggctcgatctggtaaagatcgcaccgcaggctgtgccgcctgtgtgcaaggtgctggactacggtaaataccgttttgaacagcagaagaaggagaaggaagccaagaagaaccagaaggtggtcgaggtcaaggagacccgcctttcgctcaatattgacaccaacgacttcaacaccaagctcaaccagactgccaagttcctggcagccggacacaaggtaaaggtttcgatccgtttccgcggccgcgaaatggcgcacagtgctctgggcgcagacgtgctgaagcggtttgccgaggctctgcctcaggcatccaccgataagccgcccgtgctcgagggccgcacgatgtccattctgctgatcccgaaacccaataaggactaattttaggaggaaactaaaatggctaagatgaaactgaagacgcactccggcgctaagaagcgctttaagctgaccaagaacggcaagatcaagcgcggtcatgcattccgcagccacatcctgaccaagaagaccaccaagctgacccgtggctatcgtcagcccagctacgttgataagaccaacgcagctaccatcaagagcatgctgccctacgcctaagagcgagccgcaggtacacaaactttctacgagatactaaaggagatataaaaaatggcacgtatcaaaggcgcaaccatgacccacaaacgtcgtaagaagatgctgaagctggccaagggcttctacggctgcaagagcaagcattttaagatggccaagcagcaggtcatgaagagcggcaactacgctctggctggccgccgcatgaagaagcgtcagttccgcaacctgtggatttgccgcatcaacaacgcagttcgtcctctgggcatgaactactccaccttcatggctggcctgaagaaggcaggcatcgagctgaaccgcaagatgctgtccgagatggctatcaacgatcccaagagctttgccgctctggtcgagaccgtgaagaacgcctgataaagaccttgcatcgtgacgcccgcgcgtatacgcgggcgtccgttttgtatccgggcattttttgcggccagggaaacaaggcaacggggcagcgccctgccgcagaaatctgcggcagacgctgccctttttctattgtatccaaagcaaaagctacacacctgttcgggagggactcatggacgaaaagatcaccagccgggaaaacgcaaagataaaatacgcctgccgccttgcttccggtgcagcattccgccgcaccgaggggcgttttctggccgaggggcgcaagctgtgcccggaacttgcccggggcgcagagctggagaccctgttttataccgaaaatgcgctggaaaagtgcccggagcttgccgctttgccgggcgagcactatctggtagaggatcatgtggcggacaagctggctgacgtgggcacccatcagggggtattcggggtgttccgcaccccggtgcacactctagaggaggtgcgccccggcgggcggtatctggcgctggaacgggtgcaggaccccggcaacgtgggcactttgctgcgcagtgcggccgcctttggctttgacggtgtcatcctgagcgagggctgcgccagtgtctacgcccctaagaccctgcgcgcctccatgggcgcggcggtgcgcatcccggtcatcgagaccggtgccatgccgcaggccatcgctctgctgcgggaaaaaggcatcacctgccttgcggcagcgctgtaccagtcccagccgctcagcgcggcaaaggctgggtatcccggcggcgtctgcgtggtcatcggcagcgagggacagggcctgactgatgaaaccatcgccgcctgcaacagcacggtgcgcatccccatgaccgaccgggtggaaagcctgaacgccggcatcgcgggcagcatcctgctgtggcatttccgggaggagagcctgtgaccgggcagaccagcctgttcccgccggagcctgcacccgacccgctgctgtgctggctgtggctgtcgcaggtgctgggacccgccagtctccacgccggaaaggtgctggacgcctttggtggcgcacaggaggcgtgggaagcgcgggagaccgaggaattccggcaggcagcaggggatacagcctttaagcgtgcagcgcagctggatgcagaaagcttccacacgctggtgatgcagtgcgatgctctgcgggtgcgcatcctgccctttgacgacccggactacccgctggccttttcccgcatcccggatatgccgctggtgctctactgcaccggcgacccccgctggctcaacgagcccggggcggtgggcatcgtgggcagccgcaagcccacggaatacggcctgaacgcagcggcagatatcggcggggaactggcaaaaaacggagccatcatcgtcagcggtctggccgatgggctggacagcgccgggcaccgggcggcggtgaaaaacgactgccccaccattgcggtgatgggcgtacccatcgaccgcacctacccggcagccaatgctgctctgcggcagaagatcgagcgcaagggctgtgttatcagcgagtacccgccctgcggcgagggcgtaggccctaacggctttttgcagcgcaaccggctcattgcggcgctttcctctgccgtactggtggtggaagcgcgggaaaaaagcggcaccatgtccaccgttgcccacgccgagcgctacggcaagccggtgtacgccgtgccggggagtatctactcccccaattcggcaggcacgaacggtctgctgcgggatggccgcgcccgggcagtggccggtgcagccgacctgttggcggcgctggggctgcatacccggcaggcagcaccggcggctgcaaagcagcctgcacccctgagcgacaccgaacgccgggtgctggcgtgcatcggaccaaaacccgtgggcatcgaggaactgtgcgtgagcaccggcctgcccatgtccgcgctgctgggcaccctgatgaagctggaactgaccggccgggtgtacaagcagccggggcagcggtatgtgctgcggtaaaattgtggaatatttccgctggtaaagcacacaacagctgtggtacaataatatgagcgaatgaccgtgcatccctttgggggcacgttgcagatagaggagaaaagaagaaatggcgaaactggttatcgtggagtcgcctgcaaaggcgaaaaccatcggcaaatatctgggcgatgactacgaggtcactgccagcatgggccatatccgcgatctgcccgcatctcagctgggcattgatgtggagcatggctataccccgcaatacatcagcatcaagggcaaggaaaagctcatcaaggaactgaagagcaaggccaaacacgccgacggcgtgctgctggcgaccgacccggaccgcgagggcgaagccatcagctggcatctggccaatattctggggctggacccccacgagcccaaccgtgtcacctttgacgagatcaccaaaaagggtgtgaaggagggcatggcccacccccgcgccatcgacgaggatctgttcaacgcccagcaggcgcgccgcgtgctggaccgtctggtgggctacaagctcagcccgtttctgtggcgcaaggtgcgccgcggcctgtccgcaggccgtgtgcagagcgtggcggtgcggctgatcgacgaccgggaaaaggagatcgaaaacttcaagcccgatgaatactggaacgtggatgccaccttgggggccgggcacaaaagctttgtggcacgccttgccacggatgccaacggcaaaaagctgctgcccaaaagcgaggccgaggcccgcgccatcgagaagggcttggagggcgcaagctatgtggtgagcgaactcaagcgcggcaagcgcgcaaagcagcccactccggcctttattaccagtaccctgcagcaggaggcctcccgccgcttgggctttacagccacccgcaccatgcgcgccgcccagaccttgtacgaaggcgtggacattgccggacacggcatgatgggtcttatcacctatatgcgtaccgacagtctgcgcatctcggacgaggctgtggccgccgccaaggagtatatcgccggtgcttacggcgaggcgtatatctgcccctataagcgcacatggaagaccaagagcgccacggcagcacaggacgcccacgaagccatccgtccctctgtgccgtccctgaccccggacgaggtggacaagagtatcagcggcgacaccgcaaagctgtaccgcatgatctggagccgctttatggccagccagatggcagactgccagcaggataccgtgtcggtcaccgtcagcgcggcggattaccacttcaaggccagcggctacaccgtgacctttgacggctttaccgccctgtacgaggaagccaccgacgaaaaggaaaagaaggaaacgaaccttcccccgctggaacagggacaggtgctcaagctgcgggagctgaagagcgagcagaagttcacccagccgcccgcccgctacaccgaagctaccctcatcaaggcgctggaagaaaacggcatcggccgcccctccacctacgcacccatcatcaccaccatcatcgaccgcggctatgtggaacgcgaccagaaaaagcttaagcccaccctgctgggtcgtgctgtggacgggctgatgctggagcagttcccccacatcgtggacgtggatttctccgcccagatggagaagaatctggataaggtggaaagcggcaaggccgactggcgcaagaccgtggatgacttctatcagggctttgaggccagtctggaacaggccgaaaagaacatggagggcaaaaaggtcaaggtgccggacgagccctccagcgaggtgtgcgatctgtgcggacgccccatggtcatcaaggtgggcaagtacggcaagttcttggcgtgcagcggcttcccggagtgccggggcaccaagcgccttgtcaaggataccggcggcatctgccccaagtgcggcaaggggcgtctgctggagcgcaagagctccaagggacgcatctactacggctgcgagcgctacccggactgcgattttatgacttgggatatgccggttgccaccaagtgcgaaaagtgcggcagcactctgttccgcaagggcggcaagctgtactgcgccaaggagggctgcggctttgagatgccggtgcccaaaaaggactgaacagcccgaaacggactgacagatagaagccttcccccggacgggggaagcttttcagagaatacgctacaccctccctctttggcaatgactgagagggttggatttaaaggaaagactaaatgagcgaatataaagtaactattctgggcgcgggtctggcgggctgcgaagcggctctctggctggcgggcaagggcgtgcaggtagagctgtacgagcagaagcccgtccacttttcccccgcccacaaaagcgagggctttgcagaactgatctgctccaacagcctgaaggctgagcggctggactccgcctccggtctgctgaaggaagagatgcgccgcatgggcagtcggctgctgaccgccgccgaggagacccgcgtggccgccggcggcgcgctggcggtagaccgcgatgccttcagcgccgctgtcacccgcatggtggagcagtgtgagaatatcactgtccaccgggagcaggtggaaaccatcgacgagagcgctcccattctggtggccaccggcccgctgaccgacggcgcactggccgacgagatcggacgcctgaccggggacgagcggctgcatttctacgatgccgttgcccccatcgtcaccgccgaaagcctggactacggcaaggtgtttgccgcttcccgctatgaccgtggcgaggccgactacctgaactgccccttcaacaaggcagagtacgaggccttccacgccgcactggccggtgcggaacgtgcccccctgcacgattttgacaccgatgcagagcagagcgcaaagcccgacccggacgctcacggcaaaaaggccgataccgtcaccgtgtacgagggctgtatgcccattgagatcatggctgcccggggcgccgacaccatgcggtttggcccgctgcgcccggtgggtctggtagaccccaacaccggccaccgcccttgggcaaatgtgcagctgcgcgcagaaaataaagagcgcaccctgtataacatcgtgggcttccagacaaacctcaaatggggtgagcagaagcgggtgttcagcatgatccccgggctggaaaatgcggagtttgtgcgctacggtgtgatgcaccgcaacacctttctggatgcgccccgggtgctcagcgctcagctgtgcctgaaagaacatcccaacgtgttttttgcagggcagatcaccggctttgagggttatatggaaagcgccgcctgcggtctgctggcagcacgcaatctctacgcccgcttggagggcagacagctgcccccgccgcccgccgataccatgtgcggtgcgctggtgcagtacctgaccaccgagaacaaaaacttccagcccatgggcgcaaacatgggcattctgccgccgctgcccgccgagacccgtccccgggacaagcggctgcgttacatggcacaggccgagcgcgctgttgccagcttccagcactggctggaggaaactgctctgtaaggcaaaccacctgaaaggagaaaacaggtatgaagatcattgtggacatgatgggcggcgacaacgccccgctggctgttctggaaggcgctgcacaggccgtcaaggagtacggcgtgcagctgatcggcgtgggcaacgaggcgctggtgcgcaagaccgccgccgagcacaacattccgctggacggcatcgaactggtgaactgcaccgagaccatcgaaatgtgcgacgagcccgcccgcgctatccgccagaagaaggattcctccatcgtggtgggtctgaatatgctcaaggagggcaagggcgatgcctttgtctctgccggcagcaccggtgcgctgcacgttggcgcaagcctcatcgtgcgcaccctgcggggcgtcaagcgaccggcactggctaccatggtgcccgcaaagcagcaggcttatctgctgctggactgcggtgccaacgtggagtgccgcccggagatgctggccgcttttgcggtcatgggcagctgctatgtgaacaaagtagagggccgcaaaaaccccagcgtagcactggccaacaacggtgccgaggagagcaagggcactcccgtgctgcgggacgcccaccagctgctcaagaccaccccgggcatccgctttgtgggcaatatcgagccgcgtgatgtgcccaacggcgaggtggacgtggtggtctgcgatggctttaccggcaacgtcatcctcaagctgaccgagggcgtggcaaagatgctgctgggtatgctcaagcagatgttccttgcaaaccttggcggcaagctggcttatctgctgctcaagggcggcgttaccgacctgaagcaccagatggacagtgaggagtacggcggcgcgcccttccttggcgcaaagcagccggtcatcaaggcacacggctcctccaaggcaaagggcatcaaaaacgccatccggcaggcaaagatctgcgtggagaatgacctgtgcggcaccatgcagtccgcactggacgaactggctgcagcacagaaaactgaggaataaaagggagtaaaaacgaccatgagccatcagttggaaactatcatcggttacaaattcaaaaacccggaactgctggaaatcgcgcttacccacaccagctatgccaatgagagccgcaccccggtcaagcataacgagcggctggagtttctgggcgacagcgttttgcagatcgtatccgcagactacctgttccacgcctacgccgaccgcccggagggcgacctgacccgcatccgcgccagccttgtcagcgagagtgcactgttccagtttgcgcaggagatcgaccttggcgagtatctgcgccttggccgcggcgaggagcgctgcggcggccgcacccgtcccagtgtggtgtcagatgcctttgaggccgttattgccgccttgtatctggacggcggcatggaggtggcgcgcaagttcatcctgcccttcatcaccgagggcaagcacgctgaggcggactacaagacccgcctgcaggagatcgtgcagcagaacccggaagagcgcctgagctatgtggtggaaagcgagtccggcccggatcacgacaagcatttcgtggtggcggtgcgctttaactccgaccgcgtggcgcggggcgagggacgcagcaaaaaagctgccgagcagtgcgccgccaaggaagcactcaagctgctgggcgtgataaaggaaaagtaaatggtattcaaggaactggagatccagggctttaaaagttttcccgataaggtaaagatcagttttgataccggcgtcaccggcgtggtgggccccaacggctccggcaagtccaacctttcggacgcagtgcgctgggtgctgggcgagaccagctcccgccagctgcgcgccgccggcaaaatggaggacgtcatcttcggtggcacccgcaagcgcagccccatgggctttgcgcaggtgcggctgacgctggacaacgccgcccacacgctggatgtggacgcggacgaggtgaccatcgggcgcaaatactaccgctccggcgacagcgagtacaccatcaacgggcaggtatgccgcctgcgggacgtgtacgagctgctgctggataccggcatcggcagggacggatattcggtcatcgggcagggacgcattgcggagatcgtggcagccaaaagcagcgagcgccgcgagatctttgaagaagcctgcggcattgccaagtaccgctaccgcaagaccgaagccgagcgccgtctggccgcagcgggcgagaacttggagcgcctgcgggatatccttggcgagctggaaagccgggtgggcccgctggaaaaagaaagcgccaaggcacagaagtttctggaactgagcgcccagcgcaaaacgctggaagtgaccctgtggaccgatggggtgcaccgcgctcgggaagccgtgcgccagcaggtgcgggactacgagaccgcccagaccgactacgagcgttttgaccgggagaccaaggccgccgagcaggaggctgaggagatccgtatgcaggcacagcagctgacggttgctgtcgagcgcctgaatggggatatccgcagcatcacccagcagatcagcggctccgaaagccgcatcgccgtgctggaaaacgatattctgcgcaacgatgagagcgcggcttctttgcagcaggagatcgccgccgggcagcaggacaccgccgaggcggatgccgccttgcagcgccaccgtgccgtggcaaagaccatggaggcggcgggcgaaaagcttgcggcagagatcgaagcgctgaacgccgaacttgcccggctggcagatgccagtaccgccagcggtgcgcgcaaggacagtctgcgggcagagcttgccgaccgcaccgcaaagcgcaccgaagcacaggtggcacaggctgccgccgaagccgccggcgataccgcccggcagcgtctgcccgcgctggaacagagcgcccgggatgccgctgtacagctggaggaaacaaaacaggatctggccgacaccgtaaagtaccgccagacgctggaggaaaacgaaaagcagctgggcaacatccgctccggtctggaactcaagctgcgcagccgcaaggctgcgctggacgaagccgatgccgctgagcagcggctgggcagggaactggatgccgcccggcagcgcctttcggtgctgcgggagctggaaaagaacatggacggctaccaaaactcggtgcgtgcggtcatgcgcgccgccggagcccgccgtctgcggggcgttctggggccggtatccaccatcctgaaggtggagcccgggtgcgaggttgccatcgagaccgcactgggcggtgcgctgcagaacatcgtggtggaaaacgaagccgccgcgaaagccgccatcgccctgctgcgcaatgaccatgcaggccgcgccaccttcctgccgctggataccgtacagcccggcgtgttccgggggcggctgtccggcacggcacggctggcgtctgcgctggtgcaggccgatccccggtacgagaatatcgtctcgaacctgttggggcgcatcatcgtggtggaggatatcaacgaagcctcccgcgtggcgcgggacaacggttaccacaacaaggtggtcaccatggacggacaggtgatcaatgcaggcggcagctttaccggcggcagcgtgcagcgcagcgccggtctgttcacccgcaagcaggagatggaagagctgcgcctgaaggctgccaagctgcaaaaggactgccttgccgcacaggaaaagaccgaccagtgtaaagagcaggcagacgcgttgcaggcagagctgaccgccaccgccagtgaacagatcaccgctgccaacgaccgggtgcgtgcagaagccgaacagaagcggctggaagccgctgccgcccagctggaaactgccgtgcagaacgcgcagcagcagatggacgccttgcaggctgctttgaacgacagccgtgcaaaggcagataccgctgccttgcagcaggcagagctgacagcgcagatcgagcagctgactgccgagctgagccgcattgcagagggcagcgacagcttcctgacccagcagaaccagctggcacaggcgctcagcgccaagcggctggaacaggtgacccgccgcaaggacgcagagttggcttacagccagatcgctgcgctggaacagcgtgcaaaggacgccgctgaccgtcgcaccgcgctggaagaaagtcttgccgcccttgctgtccgcagcgaagcctgccgtaccgagatcgcagccatccgcaaggccaagaccgacagccagaccaccattacccaaaaggagcaggccatccgcgaagccactgaaaagcggcttgcctgccagcagaaggaaacggaagcgctggcaaaagcccgcaccgtctccgacagccgcgaggagatgggccgggagatggcacgccttgccgagcgcaaggccactgccgagaccgagtacgaccagaccgtggcaaagttgtgggacgagtaccagctctcggtcagtcaggccgaggagctgtgcgtggagttcgacagcctgaccgctttgcgggcacaggtggctgacctgcgcggcaagatccgcgcccttggcagcgtgaatgtgagcgccatcgaggagtacaaggaggtcaaagcccgctacgatgagctgtcccgtcaggtgaccgacgtggaggagagccgcaacgagctgagccgcatgatcgcaaagctttccgcccagatgcgggagatcttcaccgacagcttccgcgccatcaacgaaaacttcagccgcgtgttcaccgagctgttcggcggcggcgaagccagccttgtgctggaggacgaaagcgatgtgctggcctgtggcatcggcatccgggtagcgccgccgggcaaggtcatcaagaatctggaagccctttccggcggtgagcaggcgctggtggcgatcagcatctactttgccattctggcggtgaaccccgcgcccttctgtattctggacgagatcgaagccgccttggacgatgccaacgtggtgcggtttgcccagtatctgcgccgcatcagcgataagacccagttcatcgtcatcacccaccgccgcggcaccatggaggccgccaacgtgctgtatggcgttaccatgcaggaggacggcgtgtccaaactgctcaagctggatctggaacaggttgacgcaacgctggtttcctgatataaagtaaacagaaaatagataggaggaccactatggcgttcttcggatttggaaaaaaagaaaaagacaagatgaaaacgggtctggaaaagacccgcaccggtttctggggcagcattatgaacaccctgaccggcagcgtcatcgacgatgagatgtacgatgatctggaggagcagctgatccttgccgatgtaggcggtgaggtggcggtgcatctggtggacaagctccgcgaccgtgtgcgtgacaaggggctcaagaccggtgagcaggccgcagatgctctgcgcgacatcattgccgaggaaatgaccccggaggccgagatggcgctggacggcaagcccgccgtcattctggtcatcggcgtcaacggcgtgggcaagaccaccagcattgccaagctggccgattactacacccggcagggcaagcgggtcatgctggccgccggtgataccttccgtgccgctgccagcgagcagctggagatctgggcaagccgtgccggtgtgcctatcgtcagcgcgggcgaaggcgcagaccccgccgccgtcatctttgatacggtcaagtctgccaccgcacgcggctatgatatggtcattgcggacaccgcaggccgtctgcacaacaaatcaaacctgatggcagagctttccaagatcagccgcagcgtcaaaaaggcaagcccggaggccagtctggagactctgctggtgctggatgccatcactgggcagaacgccatcagtcaggccaaggaattctgcaaggctgccgatgccaccggcatcatcctgaccaagctggacggcaccgccaagggcggctgcgttgtggcggtcaagcagcgtctgggccttccggtgcgctttatcggcgtgggcgagggcatcgacgacctgctgcccttcaccccggagggctttgtggaagaactgctcccccgggaatggaagcactaaaacagaaccctctcaccgttccgtccgcttacagcggcgcggaaacggagattcccctctctggcgctggacgcgccatctctccccggccggggagagtctttcctctcagggggagctttgaaagcggaaggagtaacaagatgaaaatttgtgcagccaccggcaacgccggaaagcttcgcgagctgcgccgcattctggaagcgcagggacacgaggtggtcagccagaaagagctgggcatcaccatcgagccggaagagaccggcaccacctttgccgagaatgccctcatcaaggccgagaccatctgcaaggccagcggcctgcctactatcgccgatgactccggcctgtgtgtggatgcgctggacggcgcacccggcgtgtacagcgcccgctactgcggccaccacggcgacgatgaagccaacaacgataagcttctggctgccatgcaggcggtgcctgccgggcagcggggggcaaagttcgtctcggcggtatgcttcatcctgccggacggcaggcacctgacctgcatgggcgaatgcccgggcagcattgcctttacacggctgtgcggcgactacggttttggctacgacccgctgttcatccccgccgactgcggtgtgggcaaaacggacaagcgccccaacaccgagaaacgcagctacgcccagctgaccccggacgaaaaggacgccatcagccatcgcggcaacgcgctggcagcgctggaaaagcagctgcccagctttctgggtgagtaaagaaacgcaaactcagctgcgttt

SEQ ID NO: 13741 - DNA, 70670 bp, Unknown
  gut microbiota DNA sequence
acatattatcggcaacctcatactccacggcgatggtatcaatggcaatcatgctgccatataagaatttcagttctacacaagcggtatccatgttaaactcacaagaaatcaatctatccataagaaacctccattttgcgggatgttagatcatcccaaaatatttgaatgcttctcggattgctttctctttttccggtggacactggggctgtctggaatcctcggacttcggcaaattatagttcttaccaaccccaatcccacattttcgcttaatttgtgagatatacaggttggatacctttaacccgctatgctccagcacatagtccttaatctgggtgtaggttgccccatcttgaaattcggacatatccatatcttccaaagagaactcaacccgaatctttttcgagtcgacctcacccttggaaagcaagacaaccgtctcgcaatgtttcgtcctcgggaacagatccaccggctgcaccttttctgcgtgatacccattctgctccagccatgcggcatctcgggcggcggtggcggggttgcagctgacatacaccacccggcggggtgccatgcgcaccactgcggagagggtggcctcatcgcagcccttgcggggcgggtccagcattacgatgtccgggtgcagaccctcggcagccagctgggtggcagcctgtccggcatcggcacagaaaaagcggctcttggcagccacggcttcgcccatgcgggcagcgttggccttggcgctctcgatggcctccggcacgatctctacgccgatcagctcccggcattgacctgccatggaaagaccaatggtgcccatgccgcagtagagatccagcagcgtgtcgtccggggtcagctgcgcgtactgcgcagcaacgccgtacagccgctcggcggcaagcgtgttgacctgatagaaggacagtggtcccaaccgcaccggcacgccgcaaagcgtgtcctcaatgtagcccgggccgtacaggatgtgattttcactgcccaaaatgacgttggtgtttttggcgttgacgttgagcagaatggtgctgatggccgggaactgcccccgcagtgcggtgcaaagctgctctgcgtggggcagctttgcccgggtgcataccagacacaccatgatctgcccgctgtgcgcgccgcgccgcaggaagatatgtcgcaccagccccttgccgctctgctcatcgtaggggcggatgacctgctgtgcaaaaaaggcgcacagcgcgttgccaatctcgttcagcacgctgggctgcagcttgcagtccgggcaggggacgatgcggtgggtgcgccctgcgtaaaagccgatgcagggcacgccgttcttgtctatgcccacagggaactgcaccttgttgcggtagcggtctacgtctggagaaggcagaatatccagcaccggcacctccagcccgccgatgcggcggaaggcatccagcacgctttcctgcttggcgcgcagctctgcggcataatccagatgccgcaggctgcacccgccgcaggggcctgccaccgggcagtccaccggaatgcggtccggcgagggggtgagcagctcgtccaaaatgccaaaggcgtaccggccgcagtccttcacgatgcgcacccgtgcttcgtccccgggggcggtgccggggacaaatacggcctcgccatcggcactgtgggccacaccgctgccgtcgctggaaagacgttcgatgcgcagggtcaggatctggtttttctgtaaaggcatggtttctccttgtgtgatgggctcaggttacagttgggcagggcttgccgggtcggcgtcctgctgggcggcaaaatacttgctgggcggcacgcccttggcgcgcttgaacacccgtgagaagtagaactggtcaaagaagcctaccgacaccgcaacctccgcaatggaaaggttgccggcgcgcagcagcttgcaggcctcgttgatgcggtactcggtcaggtagtcgatggggctcttgcccacgttcaacatgaacacccggtacagatggctgcgggaaacccccacgctcttggctacatcgtcaatggagatgtcgtgggagtagttgaactggatgtacttgatggcgttcagcacatactggctggaggaggaggccgtgtggggcttgcctgcgctggtctcccgcatcaaggcagcgataaacaggtacagataccccaccatggctgcctcgtcctgtggctgcagcccgcgggaggaataaatgttggtcagcgctgcccgcatcccgtccgggtcgctggtgtggtgcacgggggcatcgtccgtaaagggcagctgcgcggccagcttgtgggcacaggcaccgttaaagcccacccagctgtactcccacggctgctgctcgtcggcggtgtagcggatcagctggctggggcgggcaaagaacaggtcgccctcgcttacctcccaagtgcggccgcccacctcgaagatgcccttgccggataccaccagatggatcaggtagtggtcacggatgccgggtccccatgtctggcccggagcgcaccgctccaagccgcagttgaagatggacaattcgatgttgttggtgtaattctgcttaaaggattgcttataaacgtctggcatggcagctttacctccgtcctgtcacattctgcacccagtataccatagaatgccctgcaaattcaacaaaagtacatcttattctttgcacctgacgccaaattttggatttttaggtcaaataaattgaaaaaacgcccgaaatgctttacaataggcaaaaagagcagaatcgtttattccggaggggaggagctgtcatggccaccagtgcacaactcagaaaacagatcctgcagggcagctgggacgccgtacttgctgcactttatggggcgaatccggcggtgctacaacggcagcgcgggcgctatgcggctgcgctggagcagttcgagctgtatttcggccctgggcggcaggtgcaggtgtactctgcacccgggcgcgcagagctgggcggcaaccacacggatcatcaggggggctacggccttgcggcggcggtcacgctggatatggtggcagtggcggcccgcaatacggatggctatgtgcgggtcaagtcccgggggttcaacaagctggatgtcattgatctggccaccgcagagccgcaggcaggggagagcacccattcggccagcctgatccgcggcattgctgagggtttccgcgcggtgggcaagcagatcggaggctttgatgcctacaccgccagcgatgtgctgcggggctccggtctgtccagctcggcggcctttgagatgggcatggcctctatctggaacgaggaatacagcaccgggctgaccctggcagagctggcgggcatctgccagtatgcggaaaacacctatttcggcaagcccagcggtcttttggatcagctgaccagtgcggtgggcggcattatctttgcggattttgccgatccgcgcaccccaaagatcgaaaagctccatgcagacggtctgctgccggaaggaatgttcctctgcgtcaccgatacccggggcagccacagcgaactgacgagcgagtttgcggcgattcggcaggagatggagcaggtggccgcctgcttcggaaagccgctgctgggtcaggtggaagagaacgcgttctggatggcactgcctgtcctgcgcagctgctgcggagaccgtgcagtgctgcgggcgatccattattttgaggagaatgcccgcacgctggcgcagcgggatgcgctttatgcaaagcagttcccggtgtttgcaggtctggtgaagcagagcggacaggcttcctttgcgctgtgtcagaatgtgtactgcacagcggatgtgcggcatcagggactgtccatagcgctggctctgagccagagcattctgcagggcagtgagggcgcatggcggatgcagggcggcggctttgcaggcaccattcaggcttatgtgcccgggcagctgctggagcggtaccatacagccatcgagcaggtattcgggcagggcagctgctatgtgctgcgcctgcgggagcagggtgcagtccgggtgatctgaacaaaacaaaaagccgtgcatagccggaatgctccgggatgcacggctttcttatagcttattactgaagagaaaaaagctgggggagagaattttcgaccggctggtcatttcgctgctgcgtattatccaagtactggacggcagtgacggtagcctcgcgggtgatgccaagcaggcggccgatctgctgagagagcttgatcccggtctgcacacctgtcttgatcacgcggaaaagtagcatgggcacaaaggtgaaggaaaacgagatcagcccaccgttccagaagaaatcattgaagtgcagattgtcaaaaaagctgccgacagcatcgccgaattcgctgccgccaaaggcagcgcactgctcctcgggggagagggctgcgtaggaagagggcagctgaagctttttcataaataaaaacactcctttccgggtcgatgaaagatcagcacagagctaccagagtaggcagacaattctgctgctcggcggcctcctgttctgccttctttttggcctgaatttcgttgtacgcattcttaaaggcgtccacaagatttttgatggagagatagatgctgcgtgcctgacaataggcataataaccgcccagaccagccataccgatcgtggcgaccttgctccatgtgttcagcttgccccagtagtgcccaattgcatcaccaacacccaaaccatcgttcagggcattctgcataccggaaactgcagcctggaacgcatagcggcccatcatgcccagcaggtttaccgtggcattgatgccaaaggccatcacctgctccggagtgatgttgatagaaagggcaccgccctcggtataggtcatctcctcggcagagagcacagagcagcaggcgggcagctgcagcgggcgctgatatgtatgatccatgatggaaaactcctttcgcacacagaactccccaaggggcagttcatctagtaactgaattgtagcatatctgcacaaaaatgacaagagagcgcgggtttgaaaatcatgatacatttgtgaatatattgtgacgatgcgttgtaaaactgacctgaatacgccataaacgcgcaaaactcctgcttttttacggcgaaaaaatgttgtagcaaaaatgtgctgaaaaagccgatcaacaacaaaggcatctgcccgtacccgctgcgcagaacgcagcagcgggcaaagcagatgccttgtgtgttttacaggttgccaaacgaaaggaaaacgaggtcaaagtgctttcggcacgcgctcatacagcgtggtcagcgcggcgatgtgcccggccaatgcagcgggcaggggctgtgccagccgccagcgccagtttgcgccctgtgtgctgggggtgttgatgcgggcctcgctgcccagatgcagccagtctgccagcgggatgatggcggtgtccgaaacactggcaaggcatgcgcagatcatgccttcagtcagggtctccggtgtgcagcgcagataccggcaggcgtaggctacgtcctcggcgctggcgttgctgcgccaaccctcggtggtcacgttatcgtgggtgcctgtatacaccacactgttgcggggataggtgtggggcaggtagttgcccgactcccggctgtcgaaggcaaactgcatgatcttcatgcccgggtagccgctttcggccagcatcgccttcacctccggggtcaagtagcccagatcctcggcgatgatattgccgccgcccagcgcctgctgcatggcgtggataaagtcccggtcggggcctttttcccagtgaccgcctgcagccgttgtgttttcggcagggatagagtagtaactctcgaaaccgcggaagtggtcaatgcgcaccacatcgtagatagaggtggcgtgcttcatgcgccgcttccaccagccaaagccggtggccttgtgggtaggccaatcgtacagcgggttgccccacagctgtccgtctgccgcaaaggaatccggcgggcagccggctacatgggtcaggtgcatctgtccatcagtctggaacagctccggttgggtccacaggtcactggaatccgggctgacgtagatggggatatcgcccaccagcaggacacctttgcggttggcataggccttcagcgcgttccactgggtgtagaagaagaactgcaccgccttgtggtagctgatctggtctgccaaccgtacctttgcggcggcaatgacctccggctcccggcagcgcagggcgtccggccagtcggcaaggcctgcctgcccctgctctgcctttacggccatgaacagggcgtagtcctccagccagaagctctgcgcggtgcagaaggcctcgtaagcaggggagggggctgccagcagccggtcagcagcctttttcagcagcaccgggcgctggttgtacagcgcaccgtagtcaacggtgcttaccggctgcgcggcgggaatctcttcggcagtcagatagccatctgccgccagcagacggaaatcgataaagtaggggtttccggcaaaggcggaaaagctctggtagggactgtcgccatagccggtagggccgatgggcaggatctgccaataagtctgctttgcctcggccagaaaatcaacgaatgcggtcgcttcactgcccagcgtaccgataccaaaaggccccggcaggctgaacaccggcatcaaaatgccgcttgcacgcataacgtgcacctccttagccctttacagcaccggccacgacaccctcgatgatgtacttctggcaggtcatgtagaggataataatggggatgatagcaatgatgatgcaggccatcatgggagccagctccacacggccgtagccgccgcggaaatactggatcgccatggggatggtgcggtacttcttgatatccagcaccagcgtgggcagcaggtagtcgttccacacccacatggtctccagaatagcagtggagatcatggtaggcttcaggatggggaacacgaccttgaagaagatctggatggggttgcagccgtcgatcatggctgcttcctcgatctccatgggcacgctcttcataaagccggtaaacatgaacacggccagaccggcgccgaagcccagatagatgatgcagatgttccaagggttgttcaggttcagacggtcagcggtcttggacagggtgaacatgaccatctggaagggaacgaccatggagaacacgatcagcagattcatgaacttgctcagcttattgtttacgcgggtcaggtaccaaccagtcatggagcagcacagcaggatcagcaccacgctggtgatagtaatcagaaggctgtaacccatgctggagagaaagtccatcttggtcacgccgtaaacgtagttgcgcagtccggcaaaggtttcggcggtgggcagacggaacacggtagaggtggtaaagctgccctcggttttcaagctgttcagcaggatcagcacgatggggtagatccacagcaggcagaggagaaccattacaacaacaaggatgacatcccaagttcttttctgtttcgacattactgctgcacctccttagagcgggtaaagtggagctggatcagcgagatgaccacaacaatcaggaagaacacaacagcctttgcctgaccaatgcccttccactgtgcaccggagcggccgtagaaggtgttgtagatgttcagtgccagcatttcactggcgttggcgggttcgcctgcggtcagagccacgttctggtcgaacagcttgaagctgttggtcagggtcaggaaggtgcagatggtcacgctgggcatgaccatgggaatcttgatcttgaacaggatctcgcggtcgttggcaccgtcgatcttagcggcctcgatcaggtcgccgggcacgctttgcaggccggccacatagatgatcatcatgtagccgatctgctgccagcacatcaggatgaccagaccgacaaaaccggccttggcatccagtgccagcaggggcttctgcaggttcgccagcacgccgttgagcaggatctgccagatatagcccagcagaatgccgccgatcaggttgggcataaagaacacggtacggaagatgttggtgcccttgatgccgcgggtcagcaccagcgcaatggcaaaggcgcacacgttgatgagcacagtgctcaccacggtaaaggctgccgtaaagccgaaagcgtgcaggaaggtggaatcctgaaataccgagaggtagttctggatgcccacaaatgtagtcttggacacggtggtgaaccgctggaaggacagataaacgccccagataaagggccagatgaagccgataataaaggcgaccagagtaggcagcacaaatatcggccagtatttactaatggctttttgcatgatatacctcctgagggagctgtctgataaaaaagaaaggaggcgggcgaacttctcgcccgcctcccattttagttcttagggagatctccggtcaaaggtttagccgttggccagcttgtactccttggcccagccatccacaaatgcggtgacaacgtcgtcccacttgccggtacctgctgcgtatgcagtcagagcgctgcccacgccgttcttccactcctcggaaggcatggtggagaagcaccagtcaacactggtcttgccgtcggccacatactggtttgcaatggtgatcagggggttggtggagtccttagccttcttgaaggggatgacgaagcccatcttgtcagccattgcgctggtgccggtctcagaggtgacacaccagtacaggaagtccagagtagcctgaatgtcggcctcggaagcggtgttattgacacaccagaagttctcggaaccggtgcacaggccctgattctcctcgccgtccacgccgatgtagatgggcagcatacccagattgtcgtcgcccagatccttcacgtcattgtaagcccaagtgccgttctggtagaacacagccttcttgcccacaaactcagccacagcgtcgttgccggtcttggaagccagcagcttgggatcgcaggtggaatcggtgatgtacagatcccagatctgcttgtagttatccagataggtgcccttgatggcgtcggtagagccgatgccgtctgccttgtactcgtagtagatgggcaggtttgccagatgggtcttgaagcgccagtcagaagaaccgtccatgccagcggaggtgaaagcaccgtccacgcccagctcagccttacgggcctgaatgtcatcagcgaccttcttcaggtcggcaaagcccttgatgtcctcctgcttgtaaccggcagcggtcagcagttccttgttgtagatgatgccgtaggtctcgatgacgtatgcaatgctggtaacagcgtcgccgtccttcagtgcaaaggagtcgctggtcagctcgccgtacagctggctgccggacaggtcgtagcagtaatccttccagtttgccagaccaacagggccgttcacctggaacagggtgggagcctcgctcttctccatctcgctcatcagggtggtctcgtactggccggaagcggcggtgacaacggtcacaggcacgccggtctccttggtgtactcagcggccagatcctgccaatcctgatcctgctcgggcttgaagttcaggtagtagaccttgccgtctgcctttgcagcggtgctggaagcagcggtagaactggcagcagaggaagcggtgctgctggaagagccgccgcaggcagccagacccagagcagcggcagaaacgccagcggccttcaggaagttacgacgagtgatcatctttttcataataagttctccttcttattaaaattacagatcaactatatactctccgtccttcgacggagggaatacaacatttaaattgcccttacgctttcgccctgctgcaactccggctgcagggtcacggtctgggcagaggagccatgctcgatttgccgcaccaatagttcgatgctttgcagtgcgatctgctcgctgggctggacgatggtggtcatcaccggcacgcagtagcgggacatcgtgatgccgtcaaagccgatcaccgaaacatcttccggcacccggaacccggcgcttaccagcgcccggatggcgccaaaggcgatgacatcgctcatggcgaagagggcggtgaactctgcccgtcgggccagcagactgttcatggcgtggtaggcggattcgaaatcgtagttggacaggccgtacagcttgtcgttgaacacaatgcccgcatcctccatggcctgctgtgcgccctgacggcgcatcagactggggtagctggtcaccggaccgcccaaaacggcgatcttgcggtgcccctgccggatcaggtagtccacagcggtataggccgctgcccggtcatctacgcccaccatggaaaggttggggaagtccaactcgtccgtgaccagcgtggtgagcaccgagggaacattgatacggtcgaagccccgctggaagttggctacgctgccgcccaggaagatgatgcctttgggcttgatctcccgcaggatcttttcggcggcgtcgatctcgttggcgttctcgtccaagtaagagacgatgccgttgtatccgtacagggtggcggcgcgctggagctgcaccagaaaatcagaaaagaagatgttccgggtgccctttaccacaaacacaaggctgcgggactgctgaatcttcagctgtcgggcgttggtgttgggcacaaacccggcctcccgcatcaccttcagaacgtgctccttggtctccgggcggacatccggcctgtcgttgatcacacgggagatggtgctgacagagcaaccgctgatccgtgcgatgtccttgatggtcaggtttgccatgtcggcgggcctcactttctgaaagtgtttcgggaacgttgtcgggaacgttcccagcgacattagtatggcacattctgtataaaaaatcaataagtgtgatacaactttgtacaaggtgtgcaatgccgcccctcgcatttgtgcagtttgatttgcgtgcagagcagcaaacctgaaaataccgataattcccggtacaagtcataaacaaccgggacaatcgtaccggtttgtaactttttgcgcgaaaaacgcttcccggtacacagctgaatgtgctatactatgtgaaaaaaggagagggggcaaaatgttatgatcttatccttacagggttgcatggcagtgggaaagaccacggcagcccgctatctggaacagcactgccaacaggtacaggtttgttttgaggacaacgctgccgtccttgcagagataaagcagcgtgggttgaataagaacagctatgcggactatctggagatccaacggctttttttgcgcaatgagctgtgccgcgggcagaaagcaaaaaaatacccccacgccgtgatggatttcggcgcggaggagattgagttctacaccttgaactaccccaaaagcagggggctggagtgggagatggaagcgatccggcaggctttagccccggagcttgcagcggtgcaggcttgtatgccggagcacattctgtttctggacgcttccgaagccgtcctgcgtgcccgtaaagcgggagatgccacccgttcccgggaattctttgcgtattacctgaaccatcttctgtcgctgaaacgggaatggttccgggaaaagaaaaacgtaacatttctttctaccgacgggctgaccgctcggcaggtgggggagaaggtaaaacattggtgtgaacagtatatctaacgcaagcaaaaaagcgctctcaccttgtcatcggtgagagcgctttgctgattgctgattattttgatcgggttggttctttaaagattagtcgctgacgtagggcatcagagcaacgtgacgagcacgcttgatggcgatggtcagtgcgcgctgatggtaagcgcaggtgccggtcacacggcggggaatgatcttagcacgctcagagacgtacttacgcagacggggcacgtccttgtaatcgatggtgtcgatgcgatcgacacagaagctgcaaaccttcttgcggccgcgacgcatggggcgtgcggggcgagagccttcggttctttcaaaagccattgcttattacctcctattggatttttaacggatagaccgtttcgtgtcagaacggcaggtcatcgctgtcatcaatgacggcgaagtcgtcggcattgccggcagagtagctgggagctgcctccacagcagccggacgggcaggcgctgcgttctggtaggacggagcggcattctgatagccgtttccgtcacctgcattgctgctcttggggcctgcaaagttgatgttgttggcaaccacttcaacggcagtgcggtttgcgccggtcttatcctgatactgacgggactgcaaacggccgtccacaacgatcagggaacctttctgaaaatagcggcagacgaattcggcctgccgatcccatgcaaccacatcgatccagtccgccacgctctgcccattggcatcgcggcgcccgcggtcgcaggcaatgcggaacgaagcaacgttcttgccggtagtggtctgacgcatttcagggtcacgcgcaaggcgacccatgatagcaacaacattcaacatagtacggtttccctttctgtcacagaagaattactcctcgtgagcaatgatcaggctgcgcataacgccttcagtgatcttgtacacacggtccagctcagcggggaagctgggctcgctggtgaagttgatcacggtgtagacgccctcttcctcgtcgttgatggggtaggccagacggcgcttgccccactcgtcgatagaatcgatcgtaccgttagcctcgatcagggacttgaacttacccaccagagcggcggaagcctcctcatcgagagcggcgctggtaatcagcatggtttcgtactttgccatttttgtagcacctccttttggacttgagggccctgcggatctgcaaggccaagggtacacaggctgcggtatcgcggcctgtgtggtgtgtctgttcagacagcaatttattatagcaagcttctttacttctgtcaagcttttttgacaaaaagaacgataaaaaatgttttgcattttttggtaaaaaggactataatgtaaacgctttccctgcaatatggcagggccggggctccggcagtggcagggaagcgggaaaaattaaaggaggataatccatgtattcgttgtttcgagatctggcaatcataatcctgagcgcgaaattcttcggactggtggcgcgcaagtgcaaggctccgcaggtggtgggtgagatcatcgccggcctgctcatcggcccctgtgtgctgaacctggtgcagatcagcgactccatctccatctttgcagagatcggcgttgtgatgctcatgttcaccaccggcctcggcaccaacctgaaagagctgatcaaggcaggccccatcgccaccctgatcgctaccgttggcgtggctgtgcctctggtgggcggcaccttattatatggtgcgttctacggctttgccgcagttggcagcccggagttctaccgggcgctgttcatcggcaccattatgaccgctaccagtgtgtccatcacggtggcgaccttgcaggagcttgggcacctgaagagttttttgggcacgactatcgtcagtgccgctgtcattgatgatgtcatcggcatcgtggtgctcacctgtgtgctgggcgccagcagcggcaccggtacgggtctgggcaaggtgctgttcaacactctgctgttctttgccaccgcactgggcgttggccttgtggtacactacgccatgaaatggctggatcagcgcaacccccatacccagcgtatcaccatcgtgagcatggccttctgctttgccatggcctacatcgcagaggaatacttcggcatcgccgatatcaccggcgcttacattgcaggtatcgtgctgtgcaccatggatgacgcaccctatgtagagcgccgggtggatatcagcaactacgttatctttgcgccgatcttctttgcctccatcggcctcaagaccgatatcagcggcctgaccccggagattttactcttctgcgtctgcttcgtggttgtggcactgatcaccaagatcatcggctgcggtctggcagcaaagatctgccgcttcaactgggacgattccctgaaggtcggcgtcggtatgatgacccgcggcgaggtggcactgatcgtggcacagaagggcttggccatcggtgtggtagacccggtctactttaccgctgtgatcctgctgatcgtggtgtccagcgtggctaccccgctggcactcaaggccatgttcaccaagcgcccgcccgtgccgcatcccagtcaggcaaactaaatcaggaatttaattttcatgtttagggttcagaaaggcctgcgggcgtttctgaacccctttttatctgaatataggcaaaaaaacggggccgctgcacatagtttcgtgcaacagccccgtttttattgtttacgcagtatataatttacagcgtcttgcagaactccttcaggtaggcgcggaactcctcgccgatctcagggtgctgcaaggccagttccacctgagcctccacgaccttgagcttgttgcccatatcgtagtgcttgccggtgaattccacggcggtcatgccgccgcgggtacgggcatactctgccatggcatcggtcagctggatctcgccaccggcaccgggcttggtgtgggcaaggatctcgtagatctccggggtcagcagcacacgacccagaatggaatagttgctgaactcctgccccttcttgggcttctcgatcatatcgtccacaaagaagtagttgtcgtggataggggtggtctttaagctgcaatagcggctcacgtcctcccaaggcacagcggacacgccggcaaccggacggccgaactcctcgtaggcgcggatcagctgggcgcagaccggatcctcgccccagatcacgtcatcgccataaatgaccacaaagggatcatcgccggtaaaggccttggcggtgttgactgcgtggcccagacccagcgtctccttctggcgcacaaacaggatgttggccatattggcgatgcccagacactcctccagcatcttttccttgccgggctttgccagcttttcctccagctcggggctgcggtcaaaatgatcctcaataatgctctggttgcggcccagaatgatcaggatatcggtaatgccggagcggacggcctcctccaccagatactggatggcgggcttatccacgatgggcagcattcccttgggcattgccttggtagcgggcagtacgcgggtgccaagacccgcagccggaataacggctttggtgacttttttcataatgattctcccatgttctcattttatgcacggtgaaccgcgcttttcagcaggatccccatcctgcatgaaccgttatcagataaaggtgcctaccagtgcgttcaggtccggccccagcagcatggagcaaaggctgcctactagcatcagcaggatgaacgctccgatgcaggctgcaaagctgacaccgccctgtgcgttcagcacggcgcggcgctgctccgggtccgggaactcggcacggatgcggcggatgcgtgccgctgcgctgcggcggtagagccacttgccatacagcccccgcaccagcatcagtgcaaaactgagaagggacatgacgcggctcaacactaccagcatagaggcgctgatcccggcggtcagggggctgccggtggtctgcatcatactgattaaggtgggaatgaacagcagcagttctgcggccagaaagccgaaggcaggcttccacgccttgcggtagaaaaagtagaacgggccgaacagcagcgctgaaaaactcatggagatcttggagtgacgcagctgcatctggctgtaatcgttcaggtagaccggcgcggctgtgccgataaaatccacccagtcctgataggggacgccgtcgatcagttcatccttgccaaaggcggcgcgcacattgcggtgcaccgggtcaacgaccttctcggtaaaattacggtacatttcgtcccggtacatcctgctgtaatcaaaatcccggttctgctcggcgctggcggcagcacggtcgttgggctgttctgcgctctcagggggcagggcagcgccgcagcagcggcagacattctcgctgcgcagggtgcgctccccgcaggtgggacaggtgcgcagctgcgcatcctgataaggaaacttccattcatagcctgcgccatgggcaggggcgtggatgcacagacccattttctcgtaacaggtgcggtgatagggtgcaccgcagtccgggcagaccacgatgtcgtcctgaagggtcagcggcttgccgcagccctcacagggacagccataatatttcggcatgatatcctcctgtgaaatcgatcatactggtattatactcccccgggtatgaaaagaaaaggtgaaaatctttaaaaatccggcaagatagtatttttcctctttactttatcacagattctcggtatactaatgaagtatctgtgtataaactgtgtcttttggcggagcagaaaatgcgcgctgcgcgtgcgttttgcaccctgccggggacattattgttatgatgtaaacccttgaacgagaggaacttagaaaatgatcacgactgatgaactgaaagtgcagttggccgagcacgccaaggccgttaaggacctggaggaagcactggccattgaagcaagccgcaagcgcgtgcaggagctggagcacaccatgtcccgccccggcttttatgatgatacagaactgagcaagaaggtctttgacgaagtcggcgacctgaagggtaagctgaaccgctttgaaaagctgcagggtctgtacgatgacgctgagaccatgctggagatgctggacgaggagtacgaccccgccatgatccccgaggccgaggaggccgtgaacaccgtgggcaaggctgtggaggaactgcagctgatgactatgctgaacggcgagtacgaccacagcaacgccatccttaccttccacgcaggcaccggcggcaccgaggcacaggactgggccgagatgctgtatcgtatgtataacaagtgggcacaggcacacggcatgaccgtggaggtgctggattatcaggacggcgacgaagccggtctgaagagcgcttccatgatggtcaagggggccaacgcctacggtctgctcaagagcgagaacggcgtgcaccgtctggtgcgtgtctctccctttgacgccaacgcccgccgccagaccagctttgcctctctggaggtcatgccggaactggacaacaccattcaggtggacatccgccccgaggatatcgagatgcaggtgtaccgctcctccggtgccggcggccagcacatcaataagacctcctctgctgtccgtctgatccacaagcccaccggcatcgtggtcaactgccagacccagcgcagccagttccagaaccgcgactacgctatggaaatgctgaaggcgaagctctaccagatcgccaagcagcagcatatggataagatcgacgacatcaagggcgtacagaacgagatcgcatggggtcaccagatccgcagctatgtgttcatgccctacaccatggtcaaggatcaccgcaccaactacgagaccggcaatgtggatgccgtgatggatggcgatatcgatgagttcatctttgcctacctcaaggccgccagccgcggcgagctgcaggacgcataagcgcctgtctctgtaaaaatcataaccgcacctgtgtccctttttggatgcaggtgcggttttttcgtgcttgtctgcgcatactaaccccgaaaaatgcgcagggaggccgtaaaatgtccaagcacagcatcgtcaggtggataaagatgataggggtttatctgctggtggccgccgtggcggcgctgggctggctgtggtgcgtcctgccggaggaagtctatctggaaccggagcagccccttgcgctgccccgctttggctgggtggaaccgctgcgcggacacggcagccgcaacgtggccagcacccgggcagcgggcagctatcagaccacgctggcgctgggcggctggctgccggtcaagaccatccgtgccaccgtgatgcagcgccccacggtcacggtgtgcggcacgccctttggggtgaagatgttttcagagggagcgcttgtggtgggcttttccgaggtgcacaccgccgccggtacagtgaaccccgcaaagcaggcggggctgcggctgggcgaccgggtcatccgcatgggaaacacggtcaccgagaccaacgagcaggtccatgctgcactggaagccgccgccggtgcggcggtggaggtggtctacgtccgcaagggggagcagcggcagaccatccttttgccggtgtgggatacgcagaacgcccagtggcgggcagggatgtgggtgcgggattcctccgccggggtgggcactctgacctttgtagatgcgcaggccggggtgtttgccgggttggggcaccctatcagcgacagcgacaccggcgagcgggttgccctgcgcagcggcgagatcgtggcctgccagatcgtgggctgcaccggcggtaccgccggcagccccggagagctgaaaggcaaattcctcagcgaccacgcccttggaaggatctgcatcaacggcgaaaatggtgtttacggcacggtaagcaccgccattgccgggcagcagacagagcttgcctttgcgcaggaggtgctgcccggcgcggcagagatcctgaccaccaccagcggcgaaaagccccgcagctaccgtgtctatattgaaaaggtgaacgacgccgacccgcgccgcaacatggtgctgcgcgtcaccgacccggcactgctggcgcagaccggcggcatcgtgcaggggatgagcggcagtcccatcctgcaaaacggacggctggtgggtgcagtgacccatgtgctggtcaatgacccgacacgaggctacggtatttttgcacaaaccatgctggaacaggcgcattccgtgcccggaacggacgcagcagcataaaaaagtatgacattcgagcagaatttccataatttcccaaaataaaccgttgaactatctggaaaattatggtaaaatccatggtgttaagggaactgcacacattggaggaaacaaccatggataaagtgagattcttgatgtcggataccggtgctcagatcacagaagcctgtcgtgaggcgctggagcaaaagggcgtggaagtgaccgttgtggaaaaggatggaaacaaggttttacagaagatgctggccgttcgcccgcaggtagtgctgttggacgcctttatgcctgggctggacgcgctggcggtcaagcagcgctacaacgccgcaggcgagcgccacacctcgtttttcgtcaccggcgcgttccagagcgaggagatggtgcaggagctgctggacgaaggctttgcctactatttcgtcaagccctttgatgaaagtgtccttgccgcccgggtgctcaaagcagccagcggacaggaaaagcacctgctccacaccagcgtggacagtgatgagctgaccgtcaccgaaatattgcaccaaattggcgtgcctgcgcacatcaagggctaccagttcctgcgggatgccatcctgctcaccatgaacgaaccggagtacatcaacgccgtgaccaagcgcctgtacccggaaatcgccaagaaaaacggtaccaccgccagccgcgtggagcgcgccatccgccacgccatcgaggttgcatgggaccggggagacgtggataccctcaacagctactttggctataccatccataacctgcgcggcaagcctacgaacagcgagttcatcgcgatgatagctgataagatgcggctggataagcggcagagggtggggtaacatctgcaaattgaaaatacggctgatttgagcgctgcttttgaaaagcgtgataaaaactaaattaacagaagagccgcagttggggattttcttcccagctgcggctcttttgatatgaataaacgtattacggctcgattttgattttatctttggcatattccaacgcaaggccaataagctcgtttcgagaacggttcgtcttttgcgctaaatcgtcgtaaaagtcaacaatggatttgtctacccgaatcgtgaacataacaggttctgtgcgctttgttatcttgagttcgtccataattatcaccctgattctattatgatgcacagaacgatagaaagaaatgttgcaattatgtttacaattaaacataaaatgatataatggaataaagaagccaaaacaaggaggattgtacaatggagtatcattttacagggacaggtgattcactggacgttacctttattgcagacggcatcattgatggaagcggaaaggttattccttatccagcaattaagagcataaaggtaaagcgaaaaggaaatgaatcggtattgatgattacagcagaagagaatgatacaaaagttgaatactgctattctgttgccccaaaggacgaggaaagccttaaaaaagcagtagctgatattgaggcatgctacataaagaaacgaaaaggaaaatatttactaaattggaaaattataggcatgacggcagtgatctttttgctggtatgcggtggtggcctcggttggtatgcgaataatagtagagaattagccgacagcgaaaaaacagccgatagtgaaattacttcgtcgcaaaaaggcagcgtggataacgaacctcgaattgagtttgaagaaacagaaaccacgaaaagaacagatacaatctataattgtccagaatacaccgtataccctacaaacatcaatgcagataagattgtatggacaacaacggatgaatctgttgcgaaagttgaaaatggaatgttatatgctggaaaagagggaacggcgcaaataactgcaacgattgatggtaatataagcgcgtctatgactgtaaacgtcaaaagcaaggctaagaaaacttcaacttcatcgtataacagttcaaacgatgaaaatagtttgacatacagttcgagacccggttggattacaggcggtcccggtgctggctctacgggaaaggtctctggtaaatcttctaatcaagaatatcaaaatgctttaacgaaaggcttacaatacgcaaaccagcttcatatgtcaaagaaagcagtatatgaccaactgacatcttcttatggagaaggcttcccggcggatgctgcacaatatgctattgataatatgacgggcgtagactggaatgcgaatgccctcgaaaaggcaaagcaatattattataatatgtcgatgtccaaaagcgcagtttatgaccagcttacttcggaatatggtgaacagtttactgcgtctcaggcacagtatgcaattgaccatctggattgagatacaatagccgaataagagaaagaccgcagacggaacaaaagccgtttgcggtctttctctttgcattttccttcccatctggtacaatggtgcagaagggaagtgacaacatgccggaagtggatgtgatccgtgcgcagctgtttgcgctgcaagataaagaatatcaggtcttttacagccgcctgatgcccaccttaccaccggaaacggtgatcggggtgcgggtgccgctgctgcgcaggctggcaaaacagctggcggataccccggaagcggaggcgtttctgcagtgcctgccgcatttttattatgaagaaaacgccctccacgcctttctgctggagtctgtccgggattacggcacagcgctggcggcaacggagcgctttttgccctatgtggataattgggcagtctgcgatagcttcagccccaaggtctttgcgcagcataagccggaactgctgtgtgctatccggcgctggctgggctctgaccaagtgtataccgtgcgctacgggatcgggatgctgatgcggtattatctggacgatgccttccggccggaatatctggcttgggtggcggcggtgcacagcgaggaatactatgtcaatatgatgcgggcgtggtattttgccactgcactggcaaagcagcccgcagcggcactgccgtggctgaccgaaaagcggctggacgtgtggacgcacaacaagaccatccagaaagcagtagaaagccgccgcatccccccggagcaaaagcaggctttgcgggcgctgcgcattcgttcacaaaagctttgcgaagaacgacgcgtttgactgtttacaatgtggcgaatttattgtaaaatagaatatagcaaaaatgccgggtctatccggcgaaagataaaataggtggtgtttggattatggcattgaaatataagcgtatccttctgaagatcagcggcgaggcgctgggcggcgaaaagggcatgggctttgacgagcccaccatggacgccatttgcggcggcgtgaagaaagctcatgagctgggcgtgcagatcggcatcgtggtaggcggcggcaacttctggcgcggccgctccagcggtaagatggagcgcacgctggccgataagatcggtatgctggctacggtgatgaacgcactggctgtctccgataagctggagcagctgggtgtgcccaccgaggtgtttacctcgatcaccatgccgcaggtggcccctgcctttacccgcaaggacgctctgcgcgccatggatgagggcaagatcgctgtgttcggcggcggcactggcaaccccttcttctctaccgatacggctactgccctgcgcgccgtggaggtgagcgccgacgtgatgttcaaggcgaccatggtggacggcgtttacgataaggatccccacaagtacccggatgccaaaaagtacgatacccttacctttaccaaggtgctggaggatcagctggccgttatggacggtaccgcagctaccctgtgccgcgacaacaagctgcccattctggtgtttgatctggccgacccggacaacatcgcacgggctgtgcagggcgagaacgtgggcacgctggtctacgagggctgagcatagcgccccggtgcaactgcatacgattggatagagcagcagcggcgcagtgcgctgcctgcatggatcaatagaataaagaaacaggagaacaacgacaatgagcagcaacaccaaggtttacgaagataagatgaagagctctgtggagcacctcagccgcgagctggccgctgtgcgcgcaggccgtgcgaaccccgccgtgctggataaggtggtcgtggactactacggtgctcccacccccatccagcagttggccgctgtggccgtctctgaggcacgcaccctcaccatcaccccttgggaccgcaccctgctgcgccccatcagcaaggcaatcatggccagcgatgtgggcatcacccccattgatgacggcgttaccatccgcctgaacttccccgcacccaacgaggagcgccgcaagcagctggccaaggaggtctccaagctgggtgaggacgccaaggttgccgtgcgtaacgtgcgccgcgacgctatggataaggctaaggccatgaagaaggccggcgagctgaccgaggacacccagaagaccatggaagaggatgtccagaagctgaccgataagtatatcaagaacattgatgctgccgtggaagaaaagcagaaggagatcatggccgtctgatccgcagcacacaataacaactgggaggtgccgtgcgctggtgaaaggtgcgcggcactttttgcagggcagccctgctgccgggaggtataaatggcacaccccaaagaatttgccgaggggctttccatcggcatcatcatggacggcaatggccgctgggcgaaaaaccgcggcctgccccgcaccgcaggacacaaaaaaggtgcggcggtgttcaaggatattgccaactactgcgatgaacttggcgtagcatcggtgtatttctatgctttctctaccgagaactggaagcgcccgctggaagaggtgggtgccatcatgaagctgttcgcccagtacctcatcgagggctttgattacaagaaccgcaatatccgcatcaagttcttgggcgaccgcaccgcgctggaccccaagctgcaaaagatgatgaatgaactggaaggggactctgcctgcaagaccggcatgaccctgaacatcgccatcaactacggcggccgcccggagatcgtgcgggcggcgcagcagctggccgcaaaggctgtggcaggcgagatccgccccgaggacatcaacgagcagatgatgagcgatgccatgtacaccgccggacagaaggacccggactttatcctgcgtcccagcggcgaaaagcggctgtccaactttatgctctggcaggccgcctattcggaactggtggagatggatgtgctctggccggactttacccgcgccgatctggataccgccattgaggagttcaaccaccgcagccgccggttcggcggcatctgagcggcaatctgtccgtattgcaaaccctgcacctatggtgcagacccgacagacccggtacttcctcgggtcggaatgcgttgccctgcaaggggctgctgccggaagaacaaaggagatcgaaacctatgaaaacacgcattattactgcgatcgtgggcattctggtactcatcggcgtgatgtttaccttcaacaccatggtgttcaatctggtgatcgcagccattaccctgatcgccatccacgagatttacagcgccctcggctttgaaaaaaaagactggctcatgtacgcagtgctggtaccctatacattgctggtcatgctttccagctatagcgccatgcgcaagctggtcatgccgatgtcctttgtgctggtcaccttttttgccatctatctggtggtgcgcaacggcaccatcagctaccagaaggccagcggtcttttggtgttttcgggcatcgtgatcttctgcttctactccttcgttctgctcaaggagcgtctgccagtggaaaaattcggctatgacgcggttttcttcatcctgctcatcctctgctttgcatggggcggcgatacctgtgcctattttgcaggccgcgccttcggcaagcataagctgtgcccggtggtcagccccaaaaagacggtggagggtgccatcggcggcgtgctgggcaccatggtgttcggcgtggtcgccaccctcatctactccatagcggcaaaccgcatggaggcctttacccgctctaatatcggcgtttccatgtatgttatcattgcgctgctgggctgtatcgccgctgtgctgggcatctacggcgacctgtttgccagcgtggtcaagcgccagtgcggcatcaaggactacggcaccatcttcccggggcacggcggcattctggaccgctttgacagcgtgatgttcatcgcgcccttcgtgaccatggtcattaccgccgtgttctacgcctgatacaggggaggaaactattatgtctaaaaaaattacgctgctgggttctaccggctccatcggcacccagagtctggatgtcatccgcgctcaagggtacgaggtctacggcctttctgcccacagccatgtagaaaaaattttgcagcagatcgaagagttccacccgaaatacgtctgcatgaccgacccggacgccgccgcaaagctggacgctgcgctggcaggccgggcaaatgcgcccaagctgctcaccggcccggaggggctgaaagagctggctgcgctggacggcccggatgtggtgctgaacagtgtggtgggcattgccggccttggtgccagcctgtgcgccatcgaaagcggccatgacctggcactggccaacaaggagagccttgtcaccggcggtcatctggtcacgcaagctgtggaaaagcacggcgtacagctgcttccagtagacagcgagcactccgccatcttccagtgtctgcaggataaggaaagcgcccccagtctgaccaaaattctgctcacggcctccggcggcccctttttcggcatgaccaccgagcagctgcgcggcaagacccgtgcagacgccctcaagcacccaaactggaatatgggcgcaaagatcaccatcgactccgccaccctgatgaacaagggtctggaactgatcgaggctgtatggctcttcggtctgcccccggaaaaaatccaaatcgtggtgcagcgccagagtatcgtccactctgcggtgcagttcagcgataattcgatcatcgcgcagctgggtgtgccggatatgcgtatccccatccagtacgccttgacctaccccaagcgtgtgccgggcgtagtgccggagttggactttaccaccctgaagctgctcaccttcgatgtggccgacgaagagaccttccgttgccttgccgcctgcaaaaaggccattcgcaagggcggtcttggcccctgcgccgccaacggtgccaacgaggaagccgttaagctgttccttgaggacaagatcggctttttggatatcggccgcttggtggaggctgttgtggacagcgacagctttggcggcgactatacgctggcagacgtgtacgagtgcgaccgcatggcgcgcgcattcgtgcaggcacacctgtaacgctttatcagaaatatacgccccggcgctgtttttgtaacggttccggggcggtataggagaacgaatgtcatttattatcaccatccttgccgcgctgctcgtgttcagtgcggtgatcgccatccacgagttcgggcattttactgtggcaaagctctgcggcattcaggtcaatgagttttccatcggcatggggccggtgctctggaaaaagaatcataaaggcacccagtacagtctgcgcgccctgcctgtgggtggctttgtagcgctggaaggggaggaaagccccgaaagccagcaggcagaagctgcccatactgtgcaggagcagcccgccccggagacggaagcgtctgtgcagcccaccggcgtccccttgaacgaggcgccggtttggcagcgggcactggtcatggtagccggtgcggtcatgaattttgtgctgggctttgtggtgctggtggttttgatcgccgcccagaatgagcccatcaccagcaagaccatctacgccattcaggacggtgccctctgcgggcagaccggcctgcaggcgggggacaaggttctggcggtgaacggccgccgctgctttgtggccaatgatatcctgtacgagctggtgcgcacccagtcttacagtgcggatttcaccgtactgcgggatggccaaaaggtgcagctgccgggggtgcagttcgacacatggcaggacgaacagggcgagacccacatgagcatcggtttttccgtctacgggctggaaaagacccttggtaacgtgctgcgggaggcgagcaacagcgtgctgtattacggccgcatcgtgttcacctctcttattgacctgctgcgcgggcgggagagcatcaacaacctctccggcccggtgggcatcgtgtcggccatcgggcaggccgccagctatggctggcaggacttgctggaactgctggcactgattaccgtcaaccttggcatcctcaacctgctgcccttcccggcgctggacggcggcaaggtagtatttttgatcattgaaggcgttaccggccatgcagtgccggaaaagctgcaaagcgtgctcacccttgcaaccttcgggctgctgttcgggctgatgatctttgcaacctacaacgatattctccggcttattaccgggacagtataagaaaggggaacccttatgcggcagaaaaaacgtgaagtgaagatcggcaatgtgaccattggcggcagcaaccctattgcggtgcagaccatgctcaatgtgccggtggaggacatcgagggcaatgtggcacaggctaagcggtgcgaagccgctggctgtcagattttgcgggtgacctgtcccagcccggcagatgcaaagtgcatcgaggccgtcaaaaacgcagtgaacatccccatcgtggcagatatccactttgactataaggctgcgctggcctgcgcggacgtaggcgtagataagatccgcatcaacccgggcaatatcggcgatgatgaccgggtaaaggcagtggtggatgcctgccagcagaagaatatccccatccgcatcggcgtcaacggcggcagtctggaaaagcacattctggcccgctacggcgcacccaccccggaagctatggtggaaagcgctttgtaccatgtgcggctgctggaaaagttcgattttaacaacatcgttatctccatcaaaaactccaacgtgccccgcatgatggaagcctaccgccagctcagcgccgtcaccgactacccgctccatgtgggcgtcaccgaggccggtacctaccagatgggtctgctgaaaagcggcatgggcatcggcgggatgctgctggagggcatcggcgataccatccgcgtgtcgctggctgccgagccggaaaaagaggtggaggcaggcttcaacatcctgcgcgccgtgggcttcccggtcaccggaccggaggtcatcacctgccccacctgcggacgcacccagtacccctgcaccgagatcgccaacgaggtggaaaagcggctgcagggctacaaaaagtccatcaaggtggccgtgatgggctgcgttgtcaatggccccggcgaagcccgcgaagctgatatcggcattgcgggcggcaagggcgaggctgtgctgttcatccatggcaagcccatcaaaaagctgaccggcgataacattctggatcagttcatggacgagatctataaattgtaagcattcttttcgctactgccacacccgcaaaaacgggtgcggcagtttgtgctgtaaagaacccaccaaaaaggagtaccatttgtgaaaccacttgtttcccagctgtggccgcagtttatggcggacccggattttgcggcctgcttcgggcaggtgatcgtggagcacgcccggatgctgcggcaggaccggcaggtcgagtttactctgcgcagcgccgccccgctggatcagaacctctgcgcccggctactggcttccctgcagccggactacgagggctttgaactgaagatcaagaacctgttcggctatgccatgctggacgagcacgctttgcgcatcctgctggaggacatgaagcgggacggtgtgcccatcaacggctttctggacaggagcagcattaccatcaccgggcagaacatcacggtgggggtgtgccacggtacaaagtttttgcaggagatgggctttgaagaactgcttgcaaagcgcgttgccgagcataccggcgttacccccaaggtgacgctgcaaagcgcagtgactgcggcggagcagcagcagatggaggaaaagctggagcgcaagatcgcaccgccggtggtcaaattcgagaaaaagaacaccgcaccgtctatcaaggtggaggggctcaaccttaccgacaagccggttaccatcttccacggcaaaatgttcacccccaaaaaccttacgcccctcaaggatctgggcggcgagggcggcaagtgcatgatctggggcgatgtgttctttaccgaggtcaagggcaactaccgcaagatctacaccgtgtctatcaccgactataccggctcgatcaacctgaaagtccgtgcacaggaaggggaggactgctccaagtgggagggcattggcaagggcagcacggtcattgtgcggggcgactgctcctacgataaatacgagcacgactacatcgtgtacccctacgatgtgctgatcgtggagcgcaaaaagcgggaggatactgccccggaaaagcgggtggagctgcatctgcacaccaagctttccagcatggacggcttctgcgaccccggcggcatcgtcaagctggcgcaccgcatgggacaccccgccattgccatcaccgaccacggcgtgtgtcagggctatccggaagccatgctggcagccgatgacatccacaaaaaagacccggatttcaagctcatctacggctgcgaggcctattttgtggacgacatggtgccctgcgtttacggcgtaaaggatcagccgctggacggcgagttctgcgtgtttgacaccgagaccaccggtcttgaccccggggtagagtaccttaccgagattggcgcggtcatcatccgcaacggcgaggtggtggaggagttcgataccttcgtcaagcccggcaagcccatcacccccaagatcaccgagctgaccggcatcaccaacgagatggtagcggacgcccccagcgaaaaggaagcgctggaagcttttcttgcctttgcgggcgaccgcattctggtgggacacaacgtccacgcctttgatatgcgctttctgcgggcagctgccaagcgcagcggcatcaagctggagcctacctatattgacaccctgaccatggcgcagactatgtacccgggcctgcacaattataagcagggcaccatcaataagcatctggaactgcccgcctacgaggcgcaccgcgcctgcgaggactccgctgcactgggacgcatcttctgcgtgatgctgaacgacttagcggaaaaagaggtaacgaaggtcagcgaaatcaacaccggtcttggcggcaaccgtgaggtgctgaaaaagaaatactaccacctgatcattctggtcaaaaaccagatgggtctgaagaacctgtacaaaatcgtcagcgaggcacacgtcaactacttcttcaaaaagccccgcgtgccccgcagtctgctgaacaagtaccgggacggcctgctgctcaccagtgcctgtgaggcaggcgagctgtaccgcgccatcgtggacggcaccagctacgaggaactgaaaaaaatcgccgcctactacgatattcttgagatccagccgctgggcaacaacgcctatatggtgcgggacggcaaggtggacagcgaggaacggatcaaggagttcaaccgcaccgttatcaagctgggtgatgatctgcacaaaccggtcattgccaccggcgacgtgcactttaccgagccggaggatgcgatctatcgcgctgtattacaggcgggcaacggctttaaggatgccgacaatcagccgccgctgttcttccgcaccacgcaggatatgctggcgcagttctactatctgcccaaggaaaaggcctacgaggtggtagtaaagaacccccgcaagatcgccgccatgatcgacaacaacgtgcgcgccatcccccggggcacctacccgcccagcatcgagggcgcagagcagcagctccgcgatgccacgtgggagcacgccaagcgggattacggagaccccttgcccgagatcgtggaaaagcggctgcaaaaggaactggactccatctgcggccacggctacgcggttctgtacgtcattgcggtcaagctggtggcctactccaatgcgggcggctatcaagtgggcagccgtggctctgtcggctcctccgctgtggcgcacttctccggcatttcggaggtaaacagcctgccgccccactaccgctgccccaagtgcaagcacagcgagtttatcaccgacggcagcgtggatgatggctttgacctgccggacaaaaactgcccccagtgcggcacccggatgctggtggatggacacgacatccccttcgagaccttcctgggcttctacggcgataaggaaccggatatcgacctgaacttctccggcgagtaccagtccaacgtgcaccgctataccgaggagctgttcggcaaggccaacgtgttcaaggccggcacggtgtccggtattcaggataaaacggcctacggctacgttaaaaaatatctggacgagcggcagcgcaccgtgaaccacgccgaggaaaaccgcctgacgctgggctgcaccggtgtcaagcgcaccaccggccagcaccccggcggcatggtggtcgtgccggacacctacgagatctacgatttttgtcccatccagcacccggcggatgacgtggcgggcggtctgttgaccacccacttcgagtttaagtacctacacgacaccctgctcaagctggacgaactgggccacgatatgcccactttctacaagtattttgaggaatacaccggcatcccggtggacagcatccccatgaacgaccccaaggtgtacagtctgctgaccagtccggaagcgcttggtgtgaccccggaacagatcgacagccagaccggcaccttcggcatcccggagatgggcacgaacttcgtgcgcggaatgttggtggaggcacggcctaagaatttctccgagctgatccagatctccggtctgtcccacggcacggacgtgtggacgggcaacgcggacgagctgatccgcagcggcacctgcaccattgcagaggtcatcggctgccgtgacagtatcatgctgtacctgctgcgcaaggggctggaacccaagatggcctttgatatcatggaggccgtgcgtaagggcaaggtggctaagggcggcttccagccgggctgggaggaagccatgcgggagcacgaggtaccggactggtacatcgagagctgccgcaaaatcaagtatatgttccccaaggcccatgctgtggcctatttgatgagcgccatccggctgatgtggtacaagatctacaagccgcaggccttctatgcggtgtactttaccgtgcgcggcgacgatatcgactacgaagccgccatcggcggtgctgccgtggcgcgtgcccacatggaggcggtcaagcgccgtctgaaggaggaaaagaacgccaaggatgaggacgtgctggtcagcttgcagctggtcaacgagatgctgagccgtgggtacgagtttttgcccatcgagctgggcaagagccgcggttccaagtatgtggtagaggacgacaaggtgcgtctgcccttcagcgccctgaaaggattgggcggtgccgccgccgaggcactggagcgggtgactatccacggagaggaatatatctcggtggaggagctgcagcaggcctccggtgtgggcagcagcattctggaccgtctgcgtcaggtgggcgcactgggcgacctgcccgagagcagtcaggtaagctttttctgagaaacaaaggccgttgcacagattttgtgcagcggccttttatcaggtctggacgattttgaatacccgccgcgtgtgctttgggcattttcagcggaaaggtttttataatttccaagtctggaagttctgcggaacttccagacttgctttttcaccagaaaaagaggctgccgcacggaataccatgcaacagcctctttatattttgcgataatatcagatcagagcagggaagtgcttactccacgctgatcatatagtagtaaacgggctggccgccgcggatgtggcttacttccacatggttggggcactttgcctttacgatctcggtaaccttttcggcgtcctcgtcgctcacgtcacaaccggaaatgatggtgacaaagctggaatccttcttgcacatattgcgtgccagacggtaggtggccttggtgatatcggtggaggtggaaacgatcttgccgttctccagtgccatgatctcgcccttgcggatgcgcttgccatcgtactcgctgtcgcgggcggcgtaggtaatcagaccggtggacaccttgtcggcagcagccatcatgttgatggtgttggtctcggcattcacagaggggtcaaagttcagcagtgcggtaatgcccatgggcacggtgcgggtgggcagcaccaccacctgacggtccgccagcttctgtgcctgctcggcagccatgatgatgttcttgttgttgggcagcacgaacacggtcttggcgggaacactctggatggctgccagaatgtcctcggtggaggggttcatggtctggccgccggacaccacagcgtctgctgccagatcggtgaacacagccttcagaccctcaccggcggcaacggccacaaagccgtagtcacggctggggtccacggcagcatagatgaactcactggcctgagagggagccttctcggcagaagcctgcttttcaaggctcttgccctgcttctggcgggcgaggaactgctcgtgcatattctcgatcttgaagttggtcaggtagccgtacttgatggcctcgctcaggatcttgccggggtcggcagtgtgaacgtgcaggttgatgacatcgtcatcctcaatgcagaccacgctgtcgccgttggactctgcaaaggcgcgcatcttggcggcgctggcaccctcgtacttattgatgaggaactgggtgcagtagccgttggtaatgtcttccaccttcatcaggtcgtcggtgaacacgcccttaccggcattttcagtggacagctttgccttgttgggggcagcctcaccaccagcaataatgccctcgccgtggaacaccttgcccatgccctcaaagatgaccatgatgccctgaccgcctgcgtccacaacaccggctttcttcagcacgggcagcaggttgggggtgtcctccagtgccttctggccggcagtcagcaccacgtcccacagggcgggaacatcggcggcatcactggcagcggcttcctcagaagcaacgcgggcaacggtcagaatggtgccctcggtgggcttcatcacggccttgtaagcgccctcgacacccttctgcagggcagccacgatatcggcaacgtcagcctcttttttgccctccaaagccttggagaagccgcggaacagcaggctggtgataacgccggagttgccgcgcgcaccgcgcagcatggcggaagcagcagttttggcggactcgcccacggtgcagctgtcgtccagagcctccagctcacgcacggcagcgcccacggtcatgcccatgttggtgccggtgtcgccatccggcacagggaaaacgttcagctcgtccacgcgggaacgctggttgttgatgttgttggcgccggaaatgatggcgtcgcgcaggatcttaccagaaatcattgttcttactccttagtagctggccggaaaatcccggctcgggtttgcagacaaatcaggcgatgacgtcatccacggacaccaccacgcgggcgaccttcagcccggtggcctgttctacctcgtccttgacacggtgggagatgctgcgggcggcggtggaaatgttcagaccgtagctgacggcaatgtgcagctcgatcaccagacgcccattctgctgggtcacgcgcacacccttttccgggtaatcggaaccgtataccatgcttttcacagcgtcagtcatatcacggggagccatggcagcaacgccgtagcactgtttggtggcttcacccaccagggtggaaaaatacccatcagtaaagctgacattcccaagcgggaaacgggaagtgatcatagtcgctctgctcctttatgttattttttataaaaatacacgcaagggtcgggggcattggctgtgcaaaacgaaacttgcctcagataaacacccaccctattatacaactttgcaccgtggttgtacagttcaaattgttggatttactgctttttgcgctctttttgcatggtttttgtaaagaaaaaagagcaaattccttcgacagccctcgcgccgctttgcgcagcgggcgtggtatgctgaaggcaggctgtgcggaacccatcaaaacggaaagtatgacaaataaagaaaaacaatctgtgaataaattataaaagcttccttgtctggctttctttgcctatggaaaagtgctaaaatataaatgaaaaggaaaaggggcggtcagccccctttttccatgatacttcccggaatacgccggacgcacggcacattacatagcgcaggcagaccgttccaacgggcattgcctgcaaaaaatgcgataggagctgttggcatgaacattctcttttttctttccccaaagcaggatctgatgtacgtttacgatgacttcaccctccggcagacactggaaaagtgggaaaacaaccgctacgcctccattccggtgctgaaccgcaagggcgaatatgtgggcaccctgactgagggcgatatcctgtggggactgaaaaaataccatggtctggatctggaagccgccgaggacattcccatctcagagtttgcgcataagcgggactacaaggccgtcacggtgaccaccagcatggatgaactggtagaagctgccatgagccagaacttcgtcccggtggtggatgaccggggcattttcatcggcattgtgcggcggcaggccatcatccgttactgctacgataaatcccgcaagattgaaatgacccgcaccggccgccctataaaggagctggctggcgtacattaaaaatacaaaacgagggcgctgcacagtaaaagtgcagcgccctcattttgtatttattattacttattacggatgtactcgtccatggcctttgcagctgccttaccggcacccatggccttgatgacggtagcagcgccggtcacagcgtcaccaccggcgtacacgccgtcacggctggtcttgccctcgtcgccctcggtcacgatgcagccgtgcttattggtctccaaacccggagtggtagagcggatcagcgggttggggctggtgcctaggctcatgatcacggtatccacttccagctcaaactcgctgccctgcttttcaatgggacggcggcggccggaagcatccggctcacccagttccatctcgatgcaggtcatggagtgtacaaagccgtcctcgtccgggtggatggcaacggggttgcacagggtcttgaagatgatgccctcttcctcggcgtgctccacctcttccttacgggcgggcagctcagccatgccgcggcggtagacgatgtacacgctctcggcacccagacgcagggcgctgcgggcagcgtccatggccacattgccgccgcccacaacagcgaccttcttgccggtgcggatgggggtcttgctggtgggcaggtaagctttcatcagattggagcgggtcaaaaactcattggcagagtacacacccttcaggctctcgccggggatgttcatgaagcggggcagaccggcgccggagcctacgaacacagcctcgtagccgtactcgcccatcagctcgtcaatggtcagcactttgccgatgaccatgttgcactcaaaatccacgcccatcttcttcaggccgtcgatctcctgctggacgatggccttgggcagacggaactcagggatgccgtacatcagcacaccgcctgcaacgtgcagagcctcgtaaacggtcaccttgtagcccagctttgccagatcaccggcggcggtcaggccggcagggccagcgccgatgacggcaaccttatggccgttccattcgggtacgatgggtgcggtgtgcacgttctcgcggtgccagtcggccacaaagcgctccagacggccaatagccaccggctcgttcttgatgccgcgggtgcacttgccctcgcactggctctcctgcgggcagacacgaccacagacggcaggcagggaagaggagcggttgatcacctgataggcggcctcaaagtcgccctcggccacatgggcgatgaactccgggatatcgatgcccacggggcagccggactggcagggcttgttcttgcagccgatgcagcgcttggcctcgttcacagccatctcggcggtgtagcccagagcaacttccttaaagtttttgttgcggacgttggggtcctgcgtgggcatggggcactttttgggatccatattgaaagccattttacattccctcctgagtcttgaacaggttgcaggctgcctcacgggcgtgtgcctcaaacggacggtacatggtgccgcgcgccattgcctcgtcaaaatccaccagatcgccgtcaaagtccgggccgtccacgcaggcaaacttggtctgaccgcccacggttaggcggcagccgccacacatgccggtgccgtcgatcataatggggttcatggaaacgatgctcttcaggccgtgcttctggcaggtcttgaccacaaacttcatcatgatcagcgggccgatggtgatgaccagatcgtactggttgccggcagccaccagctcgtccagtgcagcggtgaccacgcccttggtgccgtagctgccgtcatcggtcatgatgcgcagctcgtcgctgcaggcgttgaactcgtcctcaagaatcagcagatccttattgcggaagccgactacgctgtgcaccacgcagccctgatcgtgcagctccttggcaatgggcagtgcaatggcgcagcctacgccgccgcccacgacgcacaccttcttcagaccctcggtctcggtggcgcggcccagcgggccgacaaaatcgtggacacaatcgcctgcattcaggctattcagttccatggtggtaccgcccacgatctggaaaatgatatccacagtgcccttttcgcggtcgtaaccggccacggtcagggggatacgctcgctgtcctcaaacggacgtacaatgatgaactgacccggctttgcctttttggcgatcagcggggcttcgatgaccatctttgtcacggtggggttcagcgcgaccttttcagtgatcttatacattgcgttagctcctttttgctggcaattcctttttcttttctataaatggaagctgcacccgcgcgggtgcagctttccgtttgacaaagcgtcctctttattataatagtttgtgaaatagaaagcaactgtattttgcttgtgcacacagccgtgcgaaacgaggtgaaaaggggggatgtggtgctgcacacaaaataaaaagaacgtaccagagttaaaagacattcttttttgaaaaaatgtaattttgtggttgacaactgccggagtgtgcggtataataaccaacgtcgccggacaacagaccggcaaaaacaaatggaatgtgcggccgtagctcatctggtagagcgccaccttgccaaggtggaggtagcgagttcgagcctcgtcggccgctccatatgtggaagtttagctcagctgggagagcatctgccttacaagcagagggtcagcggttcgagcccgttaacttccaccatatggcccggtagctcagttggttagagcaccagcctgtcacgctgggggtcgtcggttcgagcccgatccgggtcgtatttgcctctgtagctcagtcggtagagcaggggactgaaaatccccgtgtcattggttcgattccgatcggaggcaccacgtcgaaagtcgtgtaagactttctcctcttcctcacaaaactttgcttcgcaaacttctgcgggggccccgaaattcgcaagaatcgctcgggagggtgcagggataaatgcaccggatatgcggccgtagctcatctggtagagcgccaccttgccaaggtggaggtagcgagttcgagcctcgtcggccgctccaatacgaagccatcgttgatgcagaaatgcaaaagcgatggcttttttgttttgtgtggcaatggtcgaaaatgttctccgcttgccaaagcaaagagccgctgtacaacacgatgcacggcggctcttcttacaatataaatatggcaccgccgcgcagcgtcttacatcaccatagtaataatgagcgcacaaagcggcagggtgacgatgctgagcagggtagtcagcaccacgcttccggcggcaaagtgctcatcgtggccgaactgcaccgcaaataccgaggtgatggcggcagccgggcagcattccagcagcgtgaccacctgtgcagcagtgccgtggaagcccagcaccccgaacagtgccagcgtagccgccgggatcagcagcatacgcacggaggcaagcttccagatgtgcttgtcggtcacgatgctgcgcacgtcaccggcagcaatcagcataccggtgatgagcatggacagcggggtgttcaccccggccagcagctccagcggctgggtgatcagggcaggcaggggaatctgcagcagatagatgcccagccccaccacaatggcgtacagcaccggggtgcgcaccagactgcgggcaacctcttttacgctggaaccgccgctgacaaggccataacccagcgtccacagcagaatgttgaacacggtgacgtaggcactggcatacagaagaccttcggagccgaacagcaccgaaataagcgggaagcccatgtacgctgcgttggaaaaaatgcaggcaaaccggaaaatgggcatccggctgccggtcttgtgtgccgtgagcagcagggtgatcacggtgcccagcagcacggacaggacactcatgccaaaagccgccagcagattatgcaggatctgggtgctgaactccatgcggtaagagtttaccaccatggccggtacgatgatgtacaccagcagattggaaagcgcctgcttgttttccagcttgagcacgccggttttgaccgccaccatgcctgtgccgatcagcaggaacaagaccgcgacctgctgcgcggtgatgagagccagttccataaaatttcctcctctgggtcgtaacgagtatactacgaaagatacaacacaggtatagcacaaaaccctgcggatagcaaggctaaacgcagggttttgcaagattttgctgttacagcttacaaaatgacatttttgatcagcagggagatgctgccgtcatcagcgtgcaggaactctacctccgattcagcgttcaataactccgtggggatcttcacttcaatgccgttggcggtgcgcaggctgcggctctccatgcggcggatgcgggcgggagtcacggtcaccggctgggcagcgctgtcaaggacatcgctcttttccacatagtcgtcaaagggcacggcggcgaggggatattcctcttccagctgctggcgcacctgctggatggacacctgattgtcgttgtcggcggcctgattggcgatcatcatggccacctgtgcctccacatggggcgtttcggcgtagttttcctgcacagcctgcacggcggcttcctgaatagcctgcagctttttcttttccggctgggcggtggtgtactggaacaccacggtggaaaggtaaaactccttgtggccgtcaatatcgtacttcttttccagcagccgcatggagtaatcggtcaggtctaccagtgcgccctcctccaccttgccgctctgggtaggcaggcaggcgcgctgctggatgatggagttcaccggtgcaccctctacggtttcggtatagtgggtgtagccgtttttgtagttcagcttcagaatgcccagccacggcgcaccgtcccgggtaaaatccaccacggcaaggtctgccccggggatggtggtgtgggcgtgcatatagtcgaacagcaccccggcaatgcggcaggaaagatccacgaagtcctgattgtgctccagctcatttttaaaggctgaatccggcagcgggcggcactggcggatgtcgtcgctggccagcagcttttcaatgtgattttgcaggtaggcgtttttttcggcggtcagctccatgggcccgccgctgagcaccggcgcatccatggtggtatccagaacgtgcagaatggcctgatgaatgatgatctccattgttgctcctcatttcgtgacatagtgtttgcgcccagtatagcacaaccgccggaaaaaggcgagagccgcccgggtattttgcggattctacaatttacaaatcccgccaaaagggctatacttataatatctgtgcaaaaggaggtggaattggtggacgagcagttggaacagattgaaggcgtcgtggaggatatcatctacgagaacgaggataacggctatgtggtgttcgaaatctccggcagcggggtgctcacggtggtctgcggcatcgtaggcgagctacacgcaggggaaagcgtcatctgccgcggccgatacgaaaaccacgccacctatggccgccagttccacgcgcaggaatgcgaaaccgatatgcccaaggatctggaagcggtgtacgcctttctggcaagtcgctccctgccgtatatcggggcaaaaactgcggataagatcattgatatgttcggggctgaagcgctggaggtcatcgccaacgaccccgcccggctgactaagatccccggcatctcgccggataaagccgatcgcatccagcaggagttcaagcggatgttcggcatgcgggagctcatcgcctatctggcgcagttcgagatcagcccccgcaaggctatggaggtgttcaaggcctttggcgtgggggcaatgcaggccatcgcgtcaaacccctatctgctgtgcggcgagccgctgcagctggacttccgccacgcggacagcatcgcccagtattaccacatggaaggggactgtgcccagcggctggaagctgccctgctgcgcactttgcgccataatgcaggcaacggccacacctgcctgccccgggcacagctgctggccactgcctccaacttcatccatcagccgccggaaaagctggcccgtgcactggatcattgcatcgagacggaagaactgtgcgtgaaaatgttcgatgcggtaccttatatttacctgccggatctgttggctgcggagcaggacattgccgaccggctgaatctgctggcaaagcgcggcaagaataccgtgcgggagctggataaaaacatccagatcttagagttgacgcagggctttgcctacgcccccctgcaaagggaagccatccgcaaggctatgacagagaactgccttgtgctcaccggcggccccggcactggcaagaccaccacggtcaacgccattttgcagctgctggaaaatcaggccgagcgagtagccctgtgcgcccccaccggccgcgccgccaaacggctcagcgagctgaccggccgcaaggccagcaccattcaccgcctgttggaggtggactacaccggcggcgtggtcagctttatccacaacgacaaaaacctgctcaagtgtgacgtggtcattctggacgagatgagcatggtggatgtcaagctgtttcaggcactcattgcggcactgcgctacacctgccgtattattatggtaggcgatgctgaccagctgcccagtgtaggcgcgggcaacatcctcagcgaggtcatccgctccggctgcgtgcccactgtctgcctgaacgagatcttccggcaggcaaaacgcagtctcatcgtggaaaacgcgcaccatatcatctccggcgagccattgcaaaagggcagcaagactgacgacttcttctttctggagaccgacggcgaggccgcgcagcgtctggtgtgcgaccttgttaccactcggctgccccggagctacggctttgatcccatccgggatattcaggtgctgtgtcccacaaagcttggccccaccggcacgcaggcgctgaacgtggagctgcaaaacctgctcaacccgccccagaaaggcaagccccagctgcaaagcgccgcccgagtgttccgggtgggggataaggtgatgcaggtgcgtaacaactacgagatcgtctggaaccgcatcggcggcgaacagggcgtaggtgcctacaacggcgatatcggcatcgtggaaagcatcaacctgcgagagcgctccatggtggtgcgtatggacgaccggcggctgctctacccggcggaaaacctgaacgagttggagatcgcctacgccatcacggtgcacaaaagtcagggcagcgagttcccggcggtgatcctgccggcggcgcaggtgccgccaaggctgtgttaccgcaacttgttctacaccggtgtcacccgcgcgcgcaggctgtgcgttgtggcgggccgcagggatgtggtgaacagcatgatgagcaacatccggcagaatctgcgttacagcggcctgtgcgctctgctgcaggccggacagtcgccacagcagctcagcacagaaggggaaagcccctgataaaaccgcgcagaacagcggcaaagcttgtatactttttgccgcaactatgttatactaaaatagtctttgtttttttgcccgccgctgcgggcgttacatacatgatagaggaacgcagagaaaggattcaggcaattatggcacagaatgatatcggcatcgaccttggtactactaccatcatcatcgcgcaggagggcaagggcgtggtgctcaaccagcccagcgttgtggcgatggatacccgcaagaacaccgtgttggaggccggcgataaagcactggccatggtgggacgcacgcccaactatatctccgccatcttcccgctgaaggatggcgtcatcagcgaccacaccatgacccgggagctgatctgccgctttgtcaagcaggtgtacagctcccacatggtcaagccccgggtggcagtgtgcgtgcccgccgccattaccggcattgagagcgacgccgtggtggaggctgtggtggcagccggtgcccgtcaggtgtacctgatcgatgagcctatcgccgcagcccttggctccggcatcgacatcactctgccggacggccgtatgatcattgatatcggcggcggcaccacggatatcgccgtgctgagccttggcggcaaggtcaaggccaccagtgtgcgcgtggccggtaaccactacgatgaggaaatcctcaagcatgttcgcaacaaatacagcatcgccatcggccagcgcaccgccgaggaactgaagaagcatgttgcctgctgcccccaaaagaccgatttccacgagagcatggagatcaagggccgcagcctgcttaccggtctgccggtgcgcgtgaccgtttccaccgatgatctgtacgagccggtgatgatgctcagcgagcagatcggcaccgcagcccatcaggtgctggaaaagaccccgccggagctggcaggcgatatctaccgtaacggcgttatgctgaccggcggcggtgcccagctgcacggcttgaccgaatatctgagccaggaactgaaggtggaggtcaccgtctcgccggaccccgtaaactgtgttgcactgggcacggcgcagagcctttccatcggtgataagctggaaaccggctttacggatgccaccccgcgcatcggccgccgctaagcttggttcgttttgtccatgtcatatcacaaagcagcaaaaataaaatttgttaatttttgttgaaatgaatggcaaaatacggtatactatacccaaattgattttctgctaacgatgttgtatcgcttgcagtatccaacaaacaggaggaaaaaccatggacttaggtttcgatgtggtcgttaccattactggtatcgtgctggtgttcctgatcctcgtgctgctgatggcaatcatcacgctggagggcaagatcttcgactcgatgaatgccaagaagaaggccgccaagactgctgcgcaggcacccgccgcaaagcccgctgccgctccggtacagcaggctgcgcccgctcctcaggtagaggagggcatccccggtgatgtggtggccgctattatggctgctatccatgcaatgggcaacggcaagtacacccttaaggcagtgcgtcgtggcaaaaatggctggggcaaggccggcgtgaacgacaccacggccccgttttaacacaggaggaagagcatgacacagtttattgatactctggtcggtattttccaaagttccggctttgcacagtttggccagcccggcggctggctgtacgccgtgatgatctgcgtgggttgctttctgctgtacctcgccatcgtcaaggagttcgaacccctgatcctgctgcccatggcctttggcatgatccttgccaacctccccggcagcggcatcatccacatgcagtacttcgttggtgacggtctggagcaccccatgtgggtcgagatcctgaacaacggcggtctggccgatatgctctacatgggtgttaagctgggcatctacccgccgctgattttcctcggcatcggcaccatgaccgactttgcacccctgatctccaaccccaagagcctgctgctgggcgctgccgcacagttcggtatcttcggtacttacatgggcgcccgtctgctggccgctaccggtctggtggacttcacccagaagcagtccgctgccatctccatcatcggcggtgccgacggccccaccgctatcttcgttacctcccgtctggcacctgagctgctgggcagcatcgctgtggcagcgtacagctacatggcactggtgcccgttatccagccgcccatcatgaaggcattgaccacctccaaggagcgctctgtggtcatgaagcagctgcgcaccgtctccaagaccgagaggatcatcttccccatcatggtcgctatcattgtttccctcatcgtgccggatgccgccgttctggtcggtatgctgatgctgggcaacctgatgaaggagtgcggcgttgtggatcgtatccagaagaccgccggtaatgagctgatgaacatcattaccatcttcttggctctgtctgttggctgcaccaccagtgcaaacaccttcctgaacacccgcaccctgttcatcatcgtgctgggtctgatcgccttctccttcggcaccgcagccggtgtgctgtgcggcaaggtcatgtacaagctgaccggcggtcaggtgaaccccctaatcggttccgccggcgtttccgccgtgcctatggccgctcgtgtctcccagaaggtcggccagagcgagaacccctccaacttcctgctgatgcacgccatgggccccaacgtggccggcgttatcggttcggccgttgctgcaggtatcctgatcaacatcttcggctaagcaaaacctgaagcactatctcaagagccatcgcacaagtttgtgcggtggctctttttgtgcaggacaatttcaaatggccgccgcagtgctttggcgatattcagcggaattatgatttattattttgggataacggagcgtctgcggacgctccgttatcccattttcacgggagaggacataagaggcaacagctgccgtttccagttacgaccccttctgtgaaaaagaggttctgaaacgcccgcaggcgtttcagaatctcaaatattaaaatatactttccttgaacaatggccagagcggcagcggaggccattcaaaatcgtgttagcattagttttttcctgtttgtgtttggctgctgcttgtgctatcatagagaaaaacagggcgcaatacgcccccaaaacaggagggagccgttatggaaaaaatcaagcttgaggttgcaggtgtcccggctgtcctgtacggcaagcgcagccgtaaggtctatctctatgtccatggcaaaaacggcagcgcggccgaggcagcccgctttgcccgcacagcctgcccggcaggctggcaggtgctggctgtcgatctgccggagcacggcacccgaaaaaacagcccggaaaagctggtgccgtgggtggtcacccgggagctgcaggcggtttacgcccggatgcatccggtatggaagcatatccgggtgtatggggtcagcatcggggcgtggtttgctatgcaggcgttgcagacgcaaaaaccggagaaggcgctgctggtgtccccgatcgtggatatggaaaaattgatccttgccctgatgcagcaggcaggggtaacggaggagcagctgcacgcggcaggggagatccccacagactttggggagacgctttcgtggccgtatctgtgctgggtgcgggagcacccgctgcactggaaagtacccacacaggtgctctatgctgatacagatccccttaccgggcacaccgctatggagcggttccggcagcagaccggggcgcacctgaccattctggagggcggggagcactggttccacaccgagacccagctggccgctctgcaaagctgggaaagctgtcatttataataggccgtttctcttttcctcagtctgtgaaaatgtaagcccggaaaatctgcggattttccgggcttacatataaaatacgcttccacaacaaaacgccgctgacggctttgtgcatcgtcagcggcgttttgtttattgaaaacaggattgtgaatggcagaatcagacgtttgcttcgctgttgtgctcagccttcttgtaagcggagaaggagtggaacacgatgttcaggcccagcacgatcagcagcacggcaaggatcagctgcaggccgtttgcgatgaacacagcgccccaagtggtctcaccggcagggatggtaacagaagcggcggtgctgatggccttgaccatagcgatcaggcgctgcaccagtgcggtaaacgtaacgcacagcatgatgaccagaggggggaacagcatcttgttgctgcggccggtcaccttcaggaacacgcacagggtagccagcaccagtgcgctcagcagctggttggcagaaccgaacagcggccagatgttggcgtagccgatcttggtcaggataaagccgaacaccagcgtgatgaaggtggagaagtacacgttgcagaacagcttgcgccagccctcggcgtgctccatgtcgtccacgctgaacagctcctggaagctcatgcggccaatacgggccacggcatccagactggtcagtgccagtgcggaaacgcacatggtcatgaacacggtagcagcgtaggcgggcacaccgaacatctcaaagaaaccggcaacgccgcggctgaagatctggaacggagtaccggcagcaggggtaccgtcggcagctgcggcagcaccggcaacgcacagagccagaacagccaacaggctttcaaggatcatggcaccgtagccgaccttcagcatatccttctcgttctcaacggtcttggaggaagtaccggaggaaacaaggctgtggaaaccggaaactgcaccgcaggccacggtgacgaacaggatggggaacatggtgcccagcttttcgttggtaaagccggtgaacacaggcagattcatggtggggtgtgccaccagcaggccaaccacagcacccacaatcatggccacgaacataaaggtggtcatgtggtcacggggctgcttgagcagccacatgggcagcacagcagcaaagaagatgtacacaaaggtgatgtagctccaagcggccttgcccaagatcaggggcaggtttgcgccgatgacaaaggacagcacgatgaacacgatgctgataacgctttccttccagccggagaagctgaactttttctgcagcaggccaaagataacggcgaacaccatgaacatgatggacaccatgccggcagcgccgttggtcttggcagcctcaaccattgcgccgtctgcgccgaaggcattgaaggtgccggcaaccatgtccgcaaaagcggcaatcacgatgccgcagaacagccagcagaacagcaggaacagcttgcggccggtcttgccgatgtacttttcaatcagcatacccatgctcttgccgtcgttcttaacggaagcatacagggcaccaaagtcggtgacagcgccgaagaagatgccgcccagcagcacccacagcagcaccggcagccagccgaaggctgcggcctgaatggcaccggtaacagggcctgcaccggcaatggagctgaactggtgggcaaacaccgtccagccgttggtgggtacatagtcccggccatcctcgtggacgacagccggagtcttggctgcggggtcgatgccccatttgttagccagccagcggccgtaaagcacataagcgccaaacaggcacaccgctgcgatcaatacgatgaccagcgtattcatagttttctacctctttccttttttcactccgcaacaggttcggaacgataggatgccgtccggcaaagcgcttccccggagcgtaaaaaaccttcgtcctcagcacatgaccgggctttccggccacactccgaagacgaaggcttctgctcccgcctgccagggcaggagcaatactccgcggtaccacttcgcttgctgtgttaaaacagccactctcccacgcatggtatactgaccatgctgcccgataacgtgggctggacggcaccatgctacttgggggcacaaaacccggttcacacaggctgctcgcaggcgagggtcctctgctcctgactgccgctttttcacccgagaagcggctcgctgaaagagggtgatgcagaagatcatgtcctgttccttgcatttgctgaatgattgtgtcctactttattcccgttttcatcaattgtcaatatttttatcacaagttcagaggatacgccaattcaagccattttctgggaataatttttagatgattttctttcatgtgtgaagagaataaaactgaatacgctcttaattgaaaaccattcacccacaggccttgactttcacactttgaagtgctaaagtaatagcgtgcagaatattccgtgcgacagcactgtctgctttgcctgctgccgccgctgttatagtaaggagaaaaacaatggctgaaaaaaattccagaagaaacgagacgacggatgcactgtttgacgctatcctcagtctggagagccgggaagagtgctacgccttttttgaggatctgtgcaccgtgaaggaaatctcggatatggcacagcgcctgcaggccgcaaagttgctgctggacggtgccacctacgagcagatcgtcaaggcggtggagatcagcactgccaccatcagccgcatcaaccgctgcatccagtacggttccggcggctaccgtgataccattgagaaggtgcgcgcgcaggctgaaaagcagtaacagccgcacccgccgcagcataggatagggcacacgactggaaaggaaggttttgccctatgatgatcgatacaccatgcgcccgttctcagtgcccggagatgcccaaggtcagcttggatcaggctgttgtggacctgatggaaagcattgccttgcaggaaacggcgctcagccacattttgtgtgccgaaagccggaagatgcagaaggccatggatctggatggcttggatctttgcaagctgctggaggtgaacgactccgccaccaatatggtgcacgccgtcgcaaaccttgaactggtgctcaaggataagctggagttcgtttccaacaacctctatgtcccgggggacagcggctgcccatcacctgcgcagtaatgttttttgtgcgggacgatttttactgcaatctaacccatgaaaatgcaatgccgggcagcccgcaggctgcccgacattgctctgaatcgttctgccgcaagggaggctgctgcacaaaacagggtgcagcagcctccctttttatgaaaatcctgcataagagacagaaaaatcttttgttggaattgctgatgtatcaaatctgtgctatactattggatgtatcaccatgaaagcgaggaataaaatattgctgcattatgatgcgatcctatttgatgtggacgggacgctgatcgattcggcccccggtatcattcatacattgcaagaggttttctgcaccatgggtgtggatgtatccggcgtaaacctgcgccggtatctgggcccgccgctgcgcaaaagcttcggtgagcacttcaccgacccggcgctgatcgaaaaggccaccgacctttaccgcacgagctacgcggtgaagggcagccacgagtgtgccgtgttcccgggtgttccgcagatgctgcaaaccctgaagcaggctggttttattttgtgcaccgccacctccaagcccaccaaggtggtcacccccattctggaagaacaggggctggcgcagtattttgattttatcggcggtgcctccatggacgagagccgggacaccaagaccgaggtcgtgcgttatgtgctcagccagcccgccttgcagggcaagcgggtgctgatggtgggcgaccgcaacgatgatatgcggggcgctgccgactgtggtctggatgctgccggtgtgctgtacggctacggcagccgggaagagctggaagctttccatccggtgctgctggccgaaagctgcgccgaccttaccgaccggctgctggcagcccgggtatgacaggaagtttcattccttcggaaggagaatggatagaatatgagaagcaataatcaacaggagaacaaggcgctgaccccgatgcagaagcaggcggtgctggtgtgcatcgtgtgcgcactggcggcgctgctgaccatcggcatcacccttaccatgctcaagcggggcaagagcccgacggagcagccgggggattcttccattattacccctgcgcccgctccggaaggggaggaggatatctccgaccactaccagatcaacgagacttccagcgcactgctcaccgggactgctgatgctggtgacgcctatcaggagcagaccctttttatcggcgattccaacacggtgcgtttgtacgccaacggtctgatctcgttgcagcagttctgcgccaaggaaggcattggcaccagtgccgccctgaacgagggcatcgttacctttaagcgggacgataaccgctacaccattgcgcaggcggtggccaaaatgaagccccgccgggtggtcattatgctgggcaccaacgacaacggcatgagcaccgaggactttatcagccactacaccgcgctggtgcaggccattcaggccagctatccctataccgatatcatcgtcaacacggtgccgccggtcccgtccaaccactccaactaccccaatatggatcagacccgcattgatgatttcaacatggcgctgctgaccatgtgcgagcagctgggcgtcaagttcctcaactctgccgaggcactgaaggacgccaacggctacggcaatgtcgattactaccagagcggggatatccacctcaagcccgcaggcctgaaggtgctgctgaagtatctgcgcacccacgcttatgagaccgaggatcgccgcccggataccaataatatccccacccgtgccgagtataccgccaaccccagctccgcggtggaggcacccagcagctcggagacggtctcctcctctgttgttgaggaaaaaacggagtatcaggcggactatcgcgtggacaaaaccggcggcggctccctgacctgcggcgacgagagcggcaagtctcttaccgtcaaggtgaccagcgccgcccagagcgttaaggtgaccgctgtgccggaggacggctatgtgttcgtcaagtggagcgatggcgtgaccaagcgcacccgcactgataccaattttgaccagaacgtggatgtgaccgctgtgtttgcagcagcctctatccaggtcagcagcagcggtaaggctgggctgggggattcctatacctttaaggcaaccctcaagggcaagtatctggatgcttccagcatccgctggtatgtcaacggcagcgaggtaacacaggctgccggtaagaccaccgtaaagggcgaggtagacccttctatggtgggcggcaccttccgggtgtacgccaccgccagctataacgactgcaccgtcaccagcaacaagctggaacttacggtcagcggtggaacgtccggcagcaccagcagctccagtagctccagcgcttcctctaaggaggataagcctgcatcctccaaggaagaaacgtcctcctctaaggaagaaaaaccggcctcttccaaggaagagaaacccgcttcctccaaggaggagaagcccgcttcttcctcctcgaacggtacttctgaaagcgccggcagctcctccaaggtggagaagcctgcctcttctgcggcatcttctaaggaagaaaagcccgtctcttcttcgcagagcagttcctcttccaaggaggaaaaaccagcctcttctaaagaggaaaagcccgcttcctccaaaaccgaggtaagcgccagcaaggaagctgccaactaagggcacatttcctccttgcgccgcataggctggcgggagaggaaggtggagccttatgtactgggaagcgatgcgcacgcccgccctgcccggcgagtatgacgtgaccgacggcagcgtggattactacgataccgactgggaaaacgtggataacagcgcactggaggaagaaatgcagaaatgtggtctgacgccctgcgagggtaaaacaatgtgtccggacaacaccccggcacaaacagacctgtctgcgtatgagatcgtttctgaataatgggaagccagctctgccgggggtggggctggcttctccctgttgatacaccaaagtgggaaatgctgaaaagaaagtgagatactatggcaaaatattattgcatcctgttcgatgcagacaatacgctgctcaactttgacgcagcggaaaacaaggcgctggccgaaacgctggtgaactacggcatcgagccggacgccgagaccgtgcagacctaccgcaccatcaacgaggagctgtggcggcagctggaaaaaggccagatccgccgcgaaaagctgttcagcgagcggttcagccgcttcttaaagaccatcgatgccgccggtgacggcgtggagatgaaccgcttctatctggagcagctgtccacccacccggacttgatgagcgccgaggttttggacgtgctgcgggagctttccgaggtggcaacgctggctatcgtcagtaacggtgcccagatggtgcagacccgccgtctggcggaaagcggcgtgatgaactttatggaggacgtgttcatctctgagaaaatgggctgcgaaaagcccaatgcccgcatctttgatgcggctctgcgcgcactgggcgtggagaatcgggagcacgttctgatggtgggcgacagtctggccagcgatattcagggcggcagcaacgccgggctggatacctgctggtataaccccaaccacgccgagaaccccggcaaggtgatccccacctacgagatcgccagtctggaggaactgtatccgctggtgatggagcaggaggaactggccaacgttggcctgaagaaccgccgccaccagtgctgaaacttgaaaaaacggataacggaacaaaattatgctgatacatttggaaaaattgggtaagacctttggcgaaaaggtggtgctgcacgatgtgaccgccagtgtcgagcgggaagatcgcatcggcattgtgggacagaacggtgcaggcaagaccactctgctcaagattcttaccggcgaatatcaggactacgagggcgagttcagcgtgacccacggggtaacactgggctatctggagcagaacgcaaagctggacgccacgctggatatctacggcgagatgcgcgccacttttgccccggtgctggatgccatggcgcagatgcagatcttggaacgccgcatggctgcccagcccgataacgccgacctgctggcacagcacgatgccctgcaaaatattgtggacgccgccgacggctacaacatggacgtgaacatcaaaaaggtgctgtccggcatgggttttgcacaggatacatggcaaaagaacattgcagtgctctccggcggtgagctgacgcggctgcgcttggcaaagctgctgctggaaaagcccgatgtcctcattctggacgagcccaccaaccacttggactttgccaccatggaatggctggaaaattacctcaagggctactccggtgcggtgctggtggtcagccacgaccgctatttcctcgataatgtctgtacaaagatctgggaggtgtccttccagaccatgaccacctacaagggcaacttctcggcctatctgccccagaaggaagccgccgatgccctgcgccagaagcagcacgatgccgacgtggcactggctgaaaagctgcaggactatgtggaccgcaaccttgtgcgcgcctccaccaccaaaatggcacagagccgccgcaagcagctggaaaagctggagatcaccgaggcacccaaggacgagaccaaccagctgaagttccgctttgaatatgacgtagaaccgtggaatgagctggtgatgctgaaaaatctcagcatcaagatcggggagcgtaccctgctggaaccctttacctatacggtctgccgcgggcagcggcttatcattgccggccccaacggtgcgggcaaatccaccctgatgcaggtgctggatggcaagcgccgcccctccggcggcatggtgcggctgggcaccggagcacgtcccagcatctttgcccagcagcagaaccgtctggggcagggcagggtcattgacgtcatctggaacaagtacccccgcatgaccgagctggaagtgcgcagccaccttgcaaagctgggcttccggggcgatacggtgttcaaaccctgcgaagcattgtccggcggcgagctggcgcgtctgcgctttgcagagatcgtgctggaacggccgaacctgctgtttctggacgagcccaccaaccacttggacatctacacccgcgagaacctgactgaggcactgatggcctacaccggtaccctgctgctggtcactcacgaccgtcacctgatgaacagtctggcctgtcccatcctctatcttgaggacggcaaggctgtgctctaccccagctacgatgccctgatgggacgtgctgccccggtgcaggccgcccagaaggcggccgagcccgccaagaccggctacggcaaggaacagcgccgccgccgtgccgagctgcgcgccaagatcaaggcctgcgaggacgagatggaggcctgcggtgcacgcgaggtggagctggacaacgagatcaactccccggaggtgtacaacgaccccgacctgctgcgccagaaaagcgatgagctgagcgatctgcgtttccatcaggaggagctttttgccgcatgggaagccgctatggaagagcaggaagcctacgagcagacgcagcagcccgaagaataaaggagcgtatcctctatgcctaaaaatcaccgcaactatcaaaaaacacggcacatcgccctgtccggtctgctgtttgcgctggccatggcgctttccttcatcgagggaacgctggtcatcccggggcttttgccgggcatgaagctggggcttgccaacatcgtggtcatgtacgccttgttcttcatgggaccccggcaggcactggtgctggatgtgctcaaggcgctgttcgtctttctggtgtccggcttcacggcgggctttctctcgctgtgcggcgggcttttgtcccttgcggtgatgtgggtgctgtactatcttctgccggtgcggcccacatggttcatcctgtcggtctgcggcgcactggcgcataacgtggggcagctgctgggcgcaggggtcatcatctcctcgtccttgtcgctgtattatgcgccggtcatgctggtgctggggcttgtcatgggggcgctcacctcggtcacgctgcgggcgttgctgcccgcgctgggcaaaatgggcttcaacacccacgaaaaccgccccgaatgaccgaccatttcggcagggcagttgcattttggccggaaatctgtataataaggaaacaactgtatttttatcaaaaagaccccaaaagatagcgctgccgcagcatgggaacttgagcggcagtcgggaggtgtttgtatatgtctgaaaaagttaccatcaaggtcgagcggaaggagctccatctgcccaccatcgcactgcgcgggctggtggtgttccccaacaaccttgttcattttgaagtcgggcgggaaaagagcattgccgccgtggagtgggccatggccaacaactccaacgtatttctggtagcccagaaagagatggagaccagcgagcccacccagcaggacctgtacacctacggcgtagtagctgaggtcaagcaggtgctgcgcgtgtcggacgaactggtcaaggtgctggtagagggcaagtaccgcgccaagctgaccgaactggataccaccggcgattttctgctgtctgccgtgcgctccgctccggtgcgtgccgcaaagcccgaagaggctgtggagaccgaggcgctgctccgcgccctcaagaccggctttgacgaatatctgggtatgaacccgcgccttgccaaggacgtggtgttcaccatcgtttccagcgatgaccccatgttcctcaccgagtatatgccggcaaacctcttgttccgctacgaggacaagcaggccgtgatgaacgaaaacaccctcaacggccgtctgcagcgccttgtggagatgctgcgccgcgaatgccaggtgatgaagatcgaaaaggagatcgcggaaaaggtcaacgagtccatggacaagaaccagcgcgattactacctgcacgagcagctgcacatcatcaacgatgagctgggcgagggggacgatacccacgctgaagccgatgattaccgccgcaagatccgggagctgcaccttgccgaggacagcgagaaaaaactgctcaaggaggtagaccgcctgtcccggatgcagagcagcaatcaggaagccacggtcatccgtacctatctggatacctgtctggatctgccgtggaacaccatgaccgtggatgatctggatatccaccgcgcccagcagattttggatcgggaccactacggcctgaaaaaggtcaaggaccgcattctggaaatgctggccgtgcgcaagctggcaccggacgtgaaggcacagatcatctgtctggtaggccctccgggcgttggcaagaccagtattgcgcgctccatcgccgaaagccttggccgcaaatatgtgcgcatcagtctgggcggcgtgcgggacgaagccgagatccgcggtcatcgccgcacctacatcggtgctatgcccggcaagatcatcagcgccatgatcaccgctaagtcctccaaccccctgatgctgctggacgagatcgacaagctggcaggggacttccggggcgacccggcggctgcgctgctggaagcgctggacccggagcagaacagcaccttcaacgatcatttcatcgatatcccgtttgatctgagccatgtgctctttattaccaccgccaacgacttgggcagcatccccggcccgctgcgggaccgcatggacgtcattgagctgcccagctatacccgcgtggaaaaatacaacattgcccgcaaacatttgctgcccaagcagctcaaggcctgcggcctgaccggcaaggtcaccatgaaccagagcgcactctacggcatcatcgacgggtacacccgcgaggccggtgtgcgtaatctggagcgtaccatcaccagcgtgctgcgcaagtgcgcccgcaagatcgcttccggcgaggtggaaagcgtggcggtgactgccgccatgctggaggaactgctgggcccccgcatcgtcaagccggacttcctcaaccgcaccaacgccgtgggcatcgccaacggtctggcatggaccagcgtaggcggcgagaccctgcccattgaggtgcaggtcatggacaacggcaccggcaagatcacggtcaccggctctctgggcgatgtgatgaaggagagcgcacagttggcagtcacttgggtgcgcgtccacgccgaggaatacggcatcgaccccgagcggctgaagaagtgcgacctgcacatccacgccccggagggtgctgtgcccaaggatggcccttctgccggcgtcaccctgaccacggcactggtgtcctgcctgtccggcgtaccggtgcgcggcgatgtggccatgaccggcgagatcaccctgcacggcaatgtgctgcccatcggcggtctgcgggaaaagagcatggctgcttaccgcgagggcatgaagaccgtgctcatccccaaggacaacgagcctgatctttacgacgtggacgaggaggtcaagaagaatctgaccttcctgcccatgcagaacctctcgcaggtgctggctgccgccctgcttaagccgaaggcagcaaagagcaccgcaggccgcccccgcaccaaaaagtccaaagcaggggaaagccgcatccccgccgcgcctgagaagaaccagccgggcgctgtctgctgaaataccagaaaggaacacgccatgatcttcaataaagctgattttattgccagctatggcatttccagccagctgcccgagagcgaccgccctgaactgagcttttcggggcgctccaacgtgggcaaatccagcctgatcaacaagttgtgcagccgcaaaaatctggcgcgcgtgtccagtacgccgggcaaaacggctaccatcaatttctattcggtggacgactgctactttgtggacctgccgggctacggctacgccaaggtgagcaacgccgaccgcgagcgctgggacgacctcatcaacagctacttcgaggcaccccgccaccacaccctgctggtgcagctgctggactgccgccacgcccccagcgcagacgatttacagatgctacgctatctgcactaccaccgcatcccctatgtggtggcgctgaccaaggcggacaagctgaaaaagagccagcttgccaaaacgcaggaggactttgaaaacatctgccgcccctacggctgccagaaggtggtgctgaccagcggcgaaaacggctacggcatcccggagctgcaggcggtgctcaacgccgcagtggctgcggaaaacgaggaagcggagtaacgccatggcttacaacgaatttgcctatttttacgatgaattcaacggcgaggcggactacgatgccctgtacagccagatccatacaaagctggaagctcacggcatccacgacggcattgtggccgaccttggctgcggcaccggggaactgaccctgatgctgacgcaggcgggctacgatatgatcggcatcgaccagtcggaggagatgctctgcgtggtgcgggataaggccgagcagctgggactttccggtcgtttgctgctgctacggcaggacctgctcaagctggatctctacggcaccatccgggcggcggtatccacctttgataccttcaaccacatcccggatctggataccgccattgccaacgcaggcttttttatggaaaagggcggggtgttcctgtttgatatgaacaccccctataagcaccggaaggttctgggcgataacgaattcacctttgaggaagaggatgccgcctgcgtgtggcacaaccactataacgccgccgaccgcaaggtggagatcacggtggacattgattatcacgagaccggcgagcatttccacgaggaattctgcgagtatacctatgatctggctaccatccgtgcggcgctggaaaagcacggctttgcactggaaagcgtctgcgatggcgagactttcggcccgctgaccgaggaaagccagcgctacttcttctgcgcaacaaaacagtatacacaactggaggaataacctatggcaaacctgatccgcggcctgtccgaaaacggcggtgtcgtgttctgcggtgtggattccaccgatattgtccgtaaagcagaaaagcttcacaccacaagcgccacctgcagcgcggcactgggtcgtctgctcacgggtgctaccctgatgggctccatgctcaaggatgaccgcgaccgcatcaccctgcgtgtggcgggcggcggccctgccggcgtgctcattgcctgcaccgacggcaccggcaacgtgaagggctgcattgacaatccgctggtggagctgcccgccaaagccaacggccacttggacgtgggcactgccgtgggcaaggacggcgtgctgaccgttatccgggataaccgcctgcaaaaggagcccacggtggggcaggtgccgctggtgtccggcgagatcgctgaggatctgaccagctactatgcgtacagcgagcaggtgcctaccgtgatggcgctgggcgtgctggtggacaaagacttgtccattctctgcgccggtggttttatggtacagctgctgcccggcgctaccgatgctgaaatcgaccagctggaaaagaacatcagcgccatgccctctgtcaccgagctgctccatgcgggcaagacccccgaggacatgatgcagctggcactggccggctttacccccaacgtgctggacgagcgcacggtgcagtaccaatgcgattgcagcgccgagcgcaccaaggaaatgctgctcagccttggccgtgccgaacttgtgcggatgcgggacgaggacctcaactgtgaggtggtgtgccacttctgccacagcaagtaccagtacgacctgaacgccctgcttgccgagtacgatgcacaggctgcacaggccgctgaagccgaacatcccatacaataaaaaatccgcttttcaaaaggcggctgcgcagttgtgtgcagccgccttttttgcttttgcgtttccgaagcaagttgcttttatagctgaagttttccctctcgccccctctcgtgaaaagacaggtctggaaaatccgcagattttccagacctgtaaataaacaataatctttccgctgaatatggtcagagcaaagcggagaccattccaaatcgtccgccttttgttatgtgcagatatctgccgccacagtatacacggcattgtaatgcagggtatcctcctgcacggtgcattcctcccggcgggcgaggatgtcggcatccgggaaagcctcgtgcagtgcccgcagcccttgcagccgcgccagcgtaagcgcctgtgcctcggtgcggtacatcgttttttgctgctgcccgtaataggtggtctcctccaccgcgcagggcaggggcagaccaaaaacctctaattgcagatgccgggtgcggcacagcccatccctatcgggtgcaaagggggaaagcgcggcagagtgccccgcgaaaaacagccggtaatttgttttgttttcgccggtcagctgcgacatcgtctctgccagcggaacgctctggtctgtctgccactccagctgcgccaccactgtgcctgccgccggggcaaagatcaaggtgccgtcccgctcgctgcgtgccgtgccgatcaacccctgcccggcctccacggtctgcccgggggctaccagcatggtgccgctggcaagatttgtacgcagcaccgttcccttgcactttgcccgcagcccgtgcagggtgcctgcggcgatctcaggccgtgcacgggcaggggcggcctccaccacaagccgtcctttttcaaaattcaggcttgcccacgagaactcgccgctttccagcagggagtactctccggtgcgcagcagctcctcggttacggcagtgccgggctgcaagccgcagctgcgcagcaccgcacccgcccgcgcccgctgtccggtagtcaggctgccgtagtccaccgcccatataagcccttgcagccagaccagtaccagcccccaagcgacaagcccggtccatagccctttgcgccgcagcagcgggcgcagcaaaaaatacagtcctttccgcttttccacccgcagccgcacccgcctgtgccgggcaagtgcggccagccgtcggtactgccatgctgcgcaatggccgtaaaagccgccgggcagggaaaaaacaccgtataaatgcagcccttgtccggcggcatcggtcaaaagtgcctcggggctgccgttccgggcggtaaagcgcacccccgcccaaaggcttgcagcttccatgatggcctcctattcatcggaaaaatcggtgcgcaaaaactgcccctgcaccgtcagccgtgcggcggtcagggtgcagatgcgtagtccgctgccgtataccgtgaaccgccccttcgccagccgcagacacagcctgttttcatcaaagaataacaccgtgcaaaaatgctcgatctccatccggtcgccgctcaggtatacggcagggcggctgtaaaacccgggcggcggctgtcggaacagtccgcgcagccagtcgcccggggtgcgccggtcgtggtgtgctctggccatcgttgtccctcccgtcccgcgctttgtacattgcacagcccatgcttccatatatatggagggggagggcgtgcttatgagtaaaagctgcaaaccgctgcatccggggctttttttgctgggtgcagctacggcggcactagtgtttgccgcgccgcagacctgcgcggaagccttccggcagggtcttgcgctctgcggcgggccgctgctggtgtcgctgtttccgtttctggtggtgtcggcgcttatcatgcgcagcggcgcgggcgaggtgttgggtgtgctgctctggccggtggtacgctgtatcggcctgcgcagccgcagcgcgggcagtgtgctgctcatcggccttgtgggcggctttgcccctgctgccgctgccactgccgaggcagtccgcagcagggaactgacctcgcaggaggcttcggctctgctgcccgcctgcatctgctccgggccatcctttgttattctgacggttggggagcagctgctgggcagccgtacggcgggggtgtgtctgtttgccgcacaggtactggcaggctggctgacggctgcgctgctctgccgtgttcgcggcataccggagcctttgcccgcgccgcccgctgccgcgcaaactgaaccgccgccggcgctcgacactatccttgcgcaagcagcggtgacctacctgaaattgtgcggctttgtgctgtattttcgcctgttggcggcaggctgcgggctgctgctgcccgcagtgtttgcaccctttcccgccatgctgctggaagtgtgctccggctgcgactacgccgcccgcaccggtttgtgggcaagcgggctgtgctgtgccgcgctcagcgtgcagggcgcttcggtgctgctgcaggtgcgcaccctctgcccgccggaggtctcgcttcgctccttgctgtggggcagactgttgcatctgccgctttcgctggcgctgttttatctgggcttaccgcagagcgctgtggaaagcttcaatactttgtgcgcccgtgtggtgcccatgcagcgggtgccgacagattgcgccctgctggtgttcgcggtgtgctgcatcacagcgtgcgaggcctgccgcctgaccgagaagaaggcgcaaaatgcagttccggcaaacaaaaactgctctgcggcttgcaaaccgccgcaaaatgtggtaacataactcttggttatcatattaccaaacgcagcgacggagagagtaggcgctgtctgcacggcaaagagagaagcttcaccggctgaaagggcttccatgtgcggcagaggctgaagttcgctcccgagcggtctgcgcgaacgatgcgggtgcatctattagcacagaacggttgcgccccgttacggcgtttgagcgccgtctgcctttgtgcagacggaaaccgggtggtaccgcggagcagaaatggttatagcttcgtcccttttgcctgagcagtcgggcaggggacggggcttttttgttataccccgctccatgaacacaaagaataaaggagagaaaatccatgcaagcaatgatcgatgagctggccaagcaggccgctgaaagccttggtcaggtgtccagcaaggagacgctggcttccttctggcaggaatacctcagcaaaaacggcaagatccctgccctgatgaagaatctgcgcaccgttgcgccggaagagcgccccgccatgggcaagatcatcaacgaactcaagcagaaggtgcaggcagactacgatgccgccgccgagaccgtgaagcaggcagagcttgctgcccgcaacgccgccgagacggtggacatcaccctgcccgccaagacccgccccatgggcggcctgcacccgctgaccctgatcaccaaccagatcatcgacgtgttctccggcatgggcttttcggtgggcaccttcccggagatcgaggacgatgaccacaactttacccgcctgaacgtgcccaaggatcacccggcacgcgacatgcaggacaccttctacctgtcggaggagttcctgctgcgtacccagacttccggcggccagatccgcaccatggacgttcagaagccgcccatcaagatcctgatgcccggccgtgtgttccgctccgactcggacgctacccacagccccatgttccaccagatggaaggtctggtcgtggacaagggcatcaccctgggcgacctgcagggcgcactgaacaccttcgtgcagaagctgttcggcgccgacacccgcacccgcctgcgtccctcctacttcccgttcaccgagcccagcgtggaggtggacgtaagctgcttcgagtgccacggcaagggctgccctctgtgcaagcacaccggctggatcgaggtgctgggcggcggcgttgtcaaccgcaaggtgctggaaaactgcaacattgacccggacgagtactccggcttcgccttcggcattggcatcgagcgtatcgccatgctgaagtatggcatcaacaacatcggtctgatgttcgagaacaatctgcagttcctcaagcagttccacgaataagaggggagagaacaaacaatgaaagtacctttcagttggttaaaagaattcgttgatatcgatgtcaccgcacaggagctggaggagaagctgttctcctgcggcttcgaggtagaagagctcatcccgctggatgccggcatcagcaaggtggtcgtcggcaagatcgtggagatggaaaagcaggagggcacccacctgaccaagtgtgtggtggactgcggcgcttacggccacgagatccgcatcagcaccggtgccgccaacatgaagctgggcgattgcgtgcctaccgcactggatggctccaccctgcccggcggcatcaccatcaaggctcgcaagatgcagggcgtggagtccaacggtatgctgtgctccggcgcagaactgggtctgaacgacgacttgttcccaggctctgaggtctacggcctgctcattctgcccgaggattctgtccccggcaccgacatcgcccccgtggtgggtctggacgactacatctttgatatctctatcaccgccaaccgcccggactgccagtccgttctgggcattgcccgcgaggtggctgcggttctgggcaagcccctgcacatgcccgccatggactacaaggctgtctgcgagccggacgctcccatcaccgtcaaggtggaggcaccggagctgtgcccccgctacatggcacactatgtccgcaacatccgcatgggcgagtctccccgctggatgaagcgccatctggcactgtgcggcctgcgctccatcagcaacgtggtggatatcaccaaccacaccttgctggaaatgggtcagcccatgcacgcctttgacctgaacaaggtcgccggccgcaccattgatgtgcgccgcgcccacgagggcgaaaagatcgtcacgctggacgagaaggagttcaccttgaaccccaacaatctggtcatctgtgatgctgaaaagccggtagcactggccggtatcatgggcggcgcaaactccggcatggacgataacaccaccagcctgctgttcgagtgcgctacttttgcccgcgacagcgtgcgtaagaccagccgtgcactgggtcagaacagcgattcctctgcccgctacgagaagggcgtggatcgctattctccgcagctgggtctggcacgcgctctgcacctgatccagcagctggattgcggtgatatcaccacgctggaatacgacctgaccgatggccgtccgctggagcgcaagcacatcgtcgccaccccggcaaagatctgcggcgtgctgggcatcaccgtgcccgaccagaccatgatcgacatcctgcagcgtctggagttcaccgtggatgtgcaggccgatggcagctgggacgtgtccgcacccctgtaccgtgatgacgtggaaagcttcccggatctggccgaggaggtcatccgtgagtacggctacgaccatatcgtgcccaccttcctgaacactgcctccgttaccaacggcggcctgaactacgaccagaagcagcagctcaagaccaagcgtctgctggctgcacagggcttctacgaggcctccacgctggccttctactccaacgccgagctggatatgctgcatatccccgccgaggacgaagcccgtaaggctatccgtatcctgaaccccatcagcgagaacctgtccatcatgcgcaccctgctgaccccctccatgctgaacgtcatcgtggacaacctgaaaaagggcaacgccgagggtcgcctgttcgagatggcaccggtctatctggccaaggaactgcctatcaatgagcacccccacgagcgtcagactctctgcatcggtgccttcggccccgaggaggacttcttcaccgtcaagggcgcgctggaagcactggcagccggttttggcctgacctttgattatcagcgcgagaccgccgcatggctgcaccccggcatcagcgccgccgtgtactgcaacggtaagcgtctgggcgtgttcggcaagctggccaacgagatcaacgcagagctggagatcgccaaggagcagaaggacagccagaacatctatctgggcgagctggactacgaggctctgatgtcctgcgtagagggcgagctgcgctataagcctctcagcccttatgcacctgttaagcgcgacttggctctagtctgcggcgaggctgtatcctgcggcgagatcgaggagaccatccgcaaggccagcccgctggtcagcgaggtcaagctgttcgatatctatcgcggcgcaaaccttggcgatggcaaaaagagcatggcctttagcctgtccctgtctgatcccaagaaggaagtctctgctgaggaagtggagcgcgtggtcaagaagatcctcggcaacctgaagttcaagctgggtatcgaaatccgctaaaagcatattatataagtatttatatatagaacaaaggccgtctgtgcaatgcatggacggcctttttacatggagaagagggggtgagtacaatataagtgaagcaaactcaattttctttcaaaaaagatgtcaaaaagtgttgacaactgtcccggggtgtggtattatacttgagcgccaagcgctgagacaaaagaatgacttctgaaagctcagcaggaagcccttgaaaagaaccaatagacgctaaaaagttccggctgataccgagaaacctgaagcgctccaagttcacaaaacttcaaaagcttctcaaaaaagtgcttgacaatttatcacgaaagtgataaaataagtaaactgtcagctgataaggctgcagcgcacaggaccttgaaaattgaacaatatcgaaagaacttgtaacggaacctattttcgtgttggaaaaacacggtaagcaattccaaacaaaagtaattcacacaggacgcaagcgattgcgtgctgagcgaaacaagatttaacacttttaagtgataaat

SEQ ID NO: 13742 - DNA, 67979 bp, Unknown
  gut microbiota DNA sequence
atttatggaatttttgtttgttcaatatagcttttgtcgcgctctgcggagcgcgacaaaagctgcttgttttaaaattacctaaaaagcaaggacgtgcagcccgcgggctgcacgtccttgcttatagaacattctttaactgaacaggcttttagtgttgtgagagtatacggatagtactaaaccgacacagatatacagcataagcaccgagctaccgcctgcggagtagaagggcagggtgacaccgatgaccggcagcacccgcaggttcatgcccacgttcaccgcgatctgcgccatcagggcacctccgataccggcgcagatgtagctgcccagcagatcttcgctgcgggcaccggtggcaaaggtcttgatcaccagcgccagcagaacgcccagcaccacgcagcagcccacaaagcccgccacgttgccgatccagctgaggatgaagtcgttgtgggcgttgggcacgctgtaatacctgcctccgaataggccgttgccaaagatgccgccggagcccagcgcgatctcgccgcgctgctgctggtagatgatgttcttccataccgtctcgctgggggcccaaccggtggtgttttccgggtccagcaccgccagaatgcggtaccactggtaccccttgccgatcttatcgctgaaaaaggcaaaggccaccgccacggcggtgcccgccgccgcaaaggctgcaaagatatacttccagctcagccccgccgcaaacatcatgcagcagccgatgatgccgtagatgatggcagtgccgtcatcgccctgcacatggatgatggcaatgggcaccagcagatgcagcagcagctttgccagctcctttggttcattgatacggctgcgcacgttgttcaggtgcatggcaaaggtcaggataaagctgatctttgccagctctgtgggctgaaaggtaaagccgcccagcttgtaccaggagtagttgtcggtatcaccggcgttgtagccgatggtcagcgggccgatggacacgtttcggatgaccagcgtgggcagcaccagaccccacgtcagcacaacgtgcaccggccacacctttacaaggctgcggtagtccacgcaggagagcagcagcgcaatcacgatgccaatggcggcagcgcccgcctgcaccagcgcccggcggtagtcgccaatgccaatgatggcaccggtcacctcgtcggtggcaaagccgttgccctgcttagctgcccacgaggacagcgccagcaccgccatcacgctgctgaaaatgcacagcagcagatacatcttatcggtgcgcttaaaatattgtcgaatgctatccaaagaaagcaccgcctttcgtcagaacagtctgccggggcgtgcctgtgtacaggcgataaaaacccagcatatcgctattatacacaaatccttgcgccaatgcaatgcgccgggtgtgacggaatggtaaaacattgccggggtgcttgacaaagccccggttgcatcctacaatgaacctgtgggcgcagccttgcgcacaacagccccggcagtgtgccgggggagaggaacggaaaagaagaaatggaacatacgttttatcgccgtctgttcagcgcggtgtgtgccattgcgctggcctttacggcagtgtgcccggcagtggctgccgcgccggaggaaaccaccggcaccccccagaccctgaccgcttccgaggtaaaggagatgcaacagacagatgccgccgtcaccgccctgacagacagcgccgcctacgccgggatgtcggaggaagagcgtcaggtggctgcgctggcgcagctggacgaactggcggcgcaggggcttgtgaaaaaagacagcatctatgtggatgcgaaaaacggtatggtaagctttacttacagctgcggcgcactgggcggtattctgctcaccgataccgagagcgaggcggacgccgccctgcccgggccggagatggaggatgcgcccgccctgctcgctgccgagaacggcacggtgggcaatgcggtcatctactatgcctttgataatggcgtcaacagtaaccgctacccctactattcttatatgaaggactactggaacggctacgggctggacacccatttggacatgatggtgaccgtctccgacctgaagcggatggcagactacgaccttgccgtcctcagcgcccacggcgcgtactatacctatgagtacggctggctgtggaaaaaacaggccaccgcgcccatcatcctgctgctggaaaaatctgatttctggaacgacctgcgctacggcttggagctgcttagccaccgggtcatcaaggtgaacggctgctacgccgtcaccggggactttttcggcaatgcctaccggggcggtaagctgaacggcaccatcgtgctttcggagacctgcgagttctacggacgcagcggccatgtagacaccgccctttcggacgggctgctctccggcggggcaaaggccgtggcgggctttgtgaacaacgtgtacagcgtgtactctcgcagtatgctgtgggcgaccgtgaaccgcctgatcgagggcgagacgttgcagcaggccattgattacggccttgaggtctacggcgaaaacgacatcgtgtggtatctcaaccagaacaccggacggcgtccccacgcggcggcgtcctatcccatcattcagggcgacggcaccgctcggcttaccgcgcccggcacggcaacgaacagcgctgcagagcagcagacccctgccgccgcctgaccattgcacttttgtgcgttttatattatacttagggatggcagagtgtctgccatcccttttttgaaacgatgaggtaaccttcatgtcagaatatatcacccattcccgcgccgagacggtggcgctgggcaagcggatggccgctgtgctggcccccggggcgctgatcgcctttaccggcggtctgggcgcgggcaagaccgcctttaccgagggtcttgccgagggtctgggctgcaccgacccggtgtccagccccacctttgctatcgtgaactactaccggggcccgcgcccgctggcgcactttgacctgtaccgcatttctaccgagaatgatctgtgcgcggcaggcttctacgattatctggatcagggcgctgtggtggcggcagagtggagcgaaaactttgccgacctgctggcgctggaaaaccccatccgggtgaacatcgaacgtctggacgataccacccgcaagatcaccattgagggggtgacggtatgaatattctggccgtggatacggcgggcaagaccgccggtgtggctctgctgcaggatgatcgcctgctgtacgaggtatatctggacggcggcatgacccacagcgaaacgctgatgcccatgatcgacagctgcttaaagatgtgcgggctgacctgcgcggacatcgacctgtacgccgtcaacgcaggcccgggcagctttaccggcctgcgcatcgggctggccgccgtcaaggggttggccttcccgcgcgagacgctgtgtgccccggtgtctaccctggaagcgctggccgctgcccacaccggcgagggtacggtgctctgtgcgctggacgcccgccgcgcacaggtgtacagtgctgcatttgaccttgccacccacacccgcctgctggacgatgacgcccgggcggtgacagatctggcggattttgtagaaaattgcaaaaagcccctgttttttgttggtgatggcgcgggtctgtgctataataaatacagtaatgtaccgggcgtgctgcaaacacccccggcgctgcggggcggccgtgccgctgccgtagcacttgtggcaaagcagatggccgcagccgggcaggctgtgctgccggaggcgctgctgccggactaccaccgtctcagtcaggcggagcgggagcgggcggagcgtctggctgccgaagccgcagcaaacaaacaataaaagtggaactgtgaccactcacagggaaaggacgtttttccatggcaaaacccatcgcacttgccgccgaccacggcggatttgaactgaaagaggctgtcaaggcacatctggaggagcttggtctggagtatatcgactttggcacccacagcaccgacagcgtggactaccccgatatggctgtgcccgcttgtgacgcagtggtgagcggccagtgcgagaaggcactgctgttctgcggcaccggtgtgggcatcagcatggcagccaacaagatcaagggcatccgcgcctgctgctgctccgacagcttcagctgcgagtatacccgccgccacaacgatgccaacgccctgtgcatgggcggccgtgtagtgggtgcaggccttgcctgccagctggtggatatcttcctgaacaccgagtttgagggcggccgccatcagcgccgcatcgacaagctgaccgcactggaaaaccgctgattgaaatttttgtaatttcacagagaagcttgcactgcaagcttctctgtgaaaaaaagctatttgtgcgcccaccgggcgggcaaggccacagatcagtacccgatagaatgttctatataaattaaggagcgtgtttttatgaccccgatgatcgttgaacatccgctgctgcagcacaagatcagcctgctgcgcaacaaacagaccggcaccaaggagttccgtgacctcgttggcgagatcgcaacgctgctgtgctacgaggctactcgcgatctgccgctggaagaggtggagatcgagacccccatcaccatggcaaagaccaaggtgctggcaggccgcaagctggctctggtgcccatcctgcgcgccggcatgggtatgctggacggcatgctgaccctgctgcccgctgccaaggtcggcttcatcggcctgtaccgcgacgaaaagaccctgcagcctgtggagtacttctgcaagctgccgcaggatatcgccgagcgcgatgttctggtgctggatcccatgctggctactggcggcagcgccatcgacgccatcacccagatcaagaagcacggcgcaaagcgcatcaagttcatcggtctgctgggcgcaccggagggcatcaaggctctgcacgaggcacaccccgatgtggacatctatctgggcgcacaggacgaccgcctgaacgagaatggctacatcgtgcccggtctgggcgatgcaggcgaccgtatctacggcaccaagtaaaacatatctataaaaaacaatgccggagcatcagcgctccggcattgttttttatcttacatctcgctgctgcgcagaaaacgcaccagcaggggcagctcatacagcagcatcagcagccagcccaccgcgtagctgaagggcaaggcttcgatgtccatcttcatcaccagcacaaacagtgcggcggcagccacacggccgcccatgttcagcatactgctgttcagggtgaccttcaaatcgcccatgccccggaaaaagccctgaatgccgttggtggcggcgggcatcagataaaacagcgagatggtgcgcaaaaaccgcacgccaaggtccaccacagcagggtcggcggcaaacagccggatgatgggctcggcaaacagcaggcagacaccggtaagcagcagcgcatagacgaattcgatgcgcataccgcagtggtagccctgccgtacccggtcggtcttgcccgcgccccggttctgcgccatcagggtggtcatggcgtggccgatgttctgctgcggggtgtaggcgaagtcatcgatgcgggaggcagcggtaaaagccgccatggcgttgacgcccatggtgttcacaatggcctgcaccgcaattttgcccagctgcaccgtggcctgctgcatggcgctggcccagccgtagctcacggttttgcgcagcagtttgccgtcatacaccagccaccgcctgcccagctgcaggactggtaccttatagcggatgtacaccacgcacagcaggcagcaggcggcctcgctgagcacggtggaaagggcgcagccctcgctgccccagcccagcgcctccacaaaaaacaggtcgccgccaatgttcagcaccgcactgatcatcaaaaaatacagcgcgctcttgctgtcgcccagcgcacgcatggtggcggcaagaaaattatagaagaaggtgaagatcagccccgcaaacacgatacgcaggtagttcactgcaatgggcagaatagccgcaggcacctgcagcaaccgcagcagcgggtctgccagcagcacgcacagggcagagaaagtcagggagaacaccgtgcccgcaatggcagtggtggatacttgacgctccaccagctcggtatcccccgcgccaaaggcggtgctgaccagaatgcccgcgcccagacacatcccgttgatgaacaggatggcaagggtcatcagggggttcgaggtgcccacggcagccagtgcatcctcgcccacaaacttgcccacgatgatactgtcggcggcgttgtaggtaagctggaacaggttgcccagcaccagcggaatggtgaatttgatcagcaacggcgtaatggcgccgctggtcatgtccttggtcatgaaaaacgtcctctttcctattgatagaagcagccgcttacacgatgctggcgcgtccgctgaaaatggccagcgccgcgcggctgttgcagttagccagcagctgggcggcggcgtgcagggcagcaccggcgctgaccgaagcggggatcgcatcggtgcgcagcacctgctgggcagcccgctgggcgtcccggctggccacggcagaaacgttatccaccacatagctgttgtagttttccggtatgatgccgtagccgatatccgggatgccgtgggggccggtaagcccgccgcccagcacctgattttcatacggctccaccgccacgatgcgcacatcgttcgtccatgccttgatggtctcgcccacgccggtcaccgtgccggcactgcccaccccgatggtaatggcgtccacaaggctcttgttctgccgggcaatgctttgcacgatggcggggccggtgacccggcggtggtactccgggttgtcgtcgttggcaagccagttcatataataccagccgttcgcggcagcggtctgcgccgccagcgcccgcgccccggccagaccgctgcgggcagggctgtgccggatctgtgcacccagccgcagcaggtactcctgccgcagggcaggggcgtcctccggcatcaccagcacgatggggtgcccggcggtcaggctggccagcgtaagggcggtggcaaaggggccggaggctgcttcaataatgggctgccccggggcaagctgctttttttcaatggcaagggccagcatcccctcggcaaggccgtcccgggcggtgccggtggggccgttaaaatccagatacgcgtacagatgtcccttcagcccgcaggcggcggcatagccccgcagctccacaatggggcaggcagtggtaagggtctggtaaaaattagagtagatcggcacaagggcactcctttctcttgggatacaacactattatcctaacgcaaagcccccggctgcgtcaagatgccttttggcaaaaacagcgaattttgggcagatatttcagaaaaaactccaaaatccccttgacaaggggcaggggttctggtatactccatccgtaaagcaaaaaaactttacaacacagcaagcacagacagcagagcaccgggggtcaacagcaatggcaaaagatctggaaatggggtatctgctggatttttatggcgaggtgcttacccagaagcagcgcgagatgctgcgccagtattacaacgatgatctttcgctgagcgagatcggcgaaaacttcggcatcacccggcagggtgcacgggacgccatcaagcatggcgaaaccaccctgaaggagctggaagaaaaggtaggctttgcagcccgctaccggcgggtgcagcagaagctggaacagctggaacagctggtcatcgacacccggttcgagtgcaccggcccccgcgccaatatcaccaccacggaatatgtggaaacgctgacaaaaatgctggagctcatccgctcgatggatgaagcaaacgaaagctgatcgaattttgaaaggagcaccgcacaatggcatttgaatccctgaccgaccgccttgccggtgtattcaaaaagctgcgcggtcacggtaagctgaccgaggcagatatcaaggccgccatgcgcgaggtgcggatggctttgctggaagctgatgtcaactataaggttgccaaggacttctgcgcaaaggtgtctgagcgcgccatgggtcaggaggtcatggagagcctgacccccgcccagcaggtggtcaagatcgtcaatgaggagctggtagccctcatgggcggcagcgaagccgcccgcctgaacatcaagaacaaggggcagacggtcattatgctctgcggcctgcagggcaacggtaaaaccacccacgcggcaaagcttgccaagttttatatcaagcagggacgccgccccatgctggtggcctgcgatatctaccgccctgcggctattgaccagctgcaggtggtgggcaagcaggccggtgcgccggtgttcaccctgcccggcgcaaagccgccggagatcgcccgcaaggcgctggcgcacgccaaggactacggcaacgacatcgtcattctggatacggcaggccgtttgcagatcgacgaagtgctgatgcaggagctggtggacatcaaggccgccgttcccgtggacgagacgctgctggtggtggatgccatggccggtcaggatgccgtcaatgtggctaagaccttcaacgagacggtgggcgtggatggcatcatccttaccaagaccgacggcgatacccgcggcggtgcagcgctttccgtgctggccgttaccggcaagcccatcaagttccagggcaccggcgaaaagctggatgatctggatgtgttccacccggaccgcatggcaagccgcatccttggcatgggcgatgtgctcagcctgatcgagcgcgcacaggatgccgccgacgaaaaggccgccgaggagaccgccaagcggctgatggaaaacaagttcgatatgaacgatatgctggagcagttcgcccagatccgcaagatgggcggcgcaggcgcaatgctgagtatgctgcccggcgcatccggcattgatgccagccagatcgacgaaaaagcctttgaccgcatcgaggccatgatctattccatgaccaaagaagagcgggaaaagccctccatcatcaaccccaagcgcaagcgccgcattgccgcaggcagcggtacccgcgtagaggacgtgaacaagctgctcaagcagtatgagatgatgcagaagatgatgaagcagttcaagaagagccccaagggctttgcccgccgtctgggcggcatgatgggcaaccccaacgccttccgcggactgaaataacaacggtatacaaccccggcggggtttgtaacatatatcaaaaacaacaatttttggaggatatctattatggcagttaagattcgtctgcgccgcgttggcgccaagaaggctcccttctaccgtgttgtcgttgctgacagccgcttcccccgcgatggccgcttcatcgaggagatcggcacttacgatcccaacaaggagccctctgaggtgaaaatcgatgccgagaaggcaaagcagtggatcgctaacggcgctcagcccactgataccgttcgtgtcctgctgaagaagtccaacattctgtaagtagggagggctgactcatgcaggagctgttgctggcagttgcccgcggtctcgtggaggacaaggacgccgttaaggtcacggtggacgagccccgcgaggacggtaccatcgtctaccacctgagcgtggcagagggagatatgggccgtgtcatcggcaagcagggccggatcgcaaaagccattcgtgtggtgatgcgcgcggctgctgtgcgggtcgatgaaaaggtccttgttgagatcgactgagcaccctacgggccctttgcctttgcggcaaggggcctttttgtttagacttcaaaggaagcaccctcatccggcgcgaacgcgccaccttcccccgactggaggaaggctttcccggctggtacactttcataaggcttcccccggccgggggaagctgtcgaacgcagtgagactgatgagggcgtattggcacaagtttgataacacaggagcgaatttatgcagcaatatctggaagccggaaaagttgttaccacccacggtgtgcgcggggaaatgaagctggagctttggtgcgacggggtggattttttgaaaaaagcggggcgtctgtacccttcggcgcagggcggcaaggcgtataagatcctttccatccgtccgcaggggcagatggcgctgctccagctggagggggtcagcgatatggacgccgcccgggcgctgcgcgggcaggtgttctactttgaccgcaacgatgccaccctgcccgcaggccggtggtatgtggcagacctcatcgggtgcgaggtgcgggacgccgacaccggcaaggtgtacggcgtggtgaccagcgtggaccacccgggtgcgcaggatatctacaccgtcaaggcacccggcggcaaggagtatatgttccccggggtggatgcttttttgaaagagcgcaacccgccggaggggtatatccttgtcacccccatccccggtctgctggatgacgattttgacagcgagcgggaggaggagtaagccatgggaatgcgtgtggacatcgtgactttgttcccggagatgtgccagcaggtgctggacgccagcatcatcggccgggcggcaaagcggggctatattgagacccactgccaccagatccgggactataccctgaataagcagaagcagaccgacgattacccctacggcggcggctgcggcatggtgctgtacgcccagcccatcgcggactgcctgcgggcggtgcagcgcgaggtggccgagcagggacgccccgccccgcatatcgtgttcctgacggcgggcggccagcgctacaccgaggagcacgcaaagcgcttggcacagtacgacaacctgacgctggtctgcggccactacgaaggcattgacgagcgtgtcatcgaagcttttgcggacgaggagatctccattggtgattatatcctgaccggcggcgagctggccagccttgtggtggcagacagcgtgctgcgcctgaagcccggcgtactggccgagcagaagggctacgaggaggaaagctactgggacggtctgctggaatacccccagtacacccgccccgaggtgtgggaaggccgtgccgtgcccgaggtgctgctgggcggcgaccacgcaaaaatcgacgcatggcgcggtgagcagagccgcacccgcacccgtctgcgccgcccggagctgtacgagcagtggtgcacgagccaccccattgccgaagtgcccaagtggaagcggggcgaaaatgtccggctggtaaagaccgctgaacagtttgccgccgccgcaaagctgtttgccgagggacggcaggctgtctgtgccgataactggacgccggaatactgccgcaccctgaccgagccgcagtttttgctgcaattgcagcaggaaaaggcggcgggctgggtgtgctacctgcacaccaccaaggacgtgccggacggcatggtgtgcgtcagccacaaggcggggcatatcgagcacctgttcgtcacggaaaaagcccggggcaagggcattggcgcaaagctgctggattttgcccgcaaaaagctgccggagcacgcacacccggtgctgagtgttctgaacaccaacacccgcgccattgcgctgtatacccgcatgggctggcagctggacggcagcaccagtctggaatttgacccgcagcaataccccactgtgacgcgtaaatgcgcactggtgcagatgcgctacgcaggccctgcgcaggagtgagccggcaccggaaatgtcggtgaaaatacacaaaattcagggcaaaactccccggcggtctaaaagttgttgaaaacttttgtattacccctctaaccttcggggtataattttattgtctttgtacaaaacctgaaaaatgctctcggtttcattgggaaaaccgccaaaaatgcaaaaggggactgtacaaccgtttcgacttgcgctaaaatgagtgtaacacaacaggcacactatgcttttgtacaccaaaacgatattagataggagcgctttactatgtacgtaaaagaagttaccgttgaaaatcaggttggtctgcacgctcgtccggctaccttctttatccagaaggcaaacgagttcaagtcttccatctgggtcgaaaaggaagaacgccgcgtgaacgcaaagagcctgctgggcgttctgtctctgggtatcgttggcggcactaccatccgcatcatcgctgacggcgctgatgagcaggctgccgtggacggcctgatcaagctggtggagtccggctttgcagagtaagtctgtatcacaagcaacagaaagcggcgggggctccctgccgcttttttagtacgctttttaccgggagcaaagggctttccattgcaggacgcccatcccacaaatacggaggaaggtgctgcatgaccaaagccgagctctatcaaaaagcctgtatgctgccgctgctgcccggggtgtatatcatccgggacaaaagcgacactatcatctatatcggcaaggccaagcgcctgcgcatccgggtaagccagtatttccgcgagggcgtgccccacgataacaaggtcagccagatgatcgcccatgcctacgcctttgacgtcatcgtctgtcaaagcgagttcgaggcgctggtgctggaagccagccagatcaaggcgcacacccccaagtacaacattctgctcaaggatgacaagggttacagctatatccgcgtcacccgggaggactggccgcgcctttccttcaccctgcaaaaggaggaggacggggcggagtatatcggcccctacacctccagctttgcggcgcggcagatggcagaaacggccatggacgcttttttgctgccgcgctgctccaagcgcttcccgcaggagatcggcaaagggcgcccctgcctgaacgcccatatcggcaagtgcatggcggtgtgcagcggcaagatcagctgcgagacctacaatcaggcggtcaaaaacgcggtgcacctcatccgctacggcaaaaaggatatcctgaaaaccctcaacgagcggatgcaggaagcctccgaccggctggaatttgagaccgccgcccttctgcgggatcagatcaatgccatcaccaagctgacggcagggcagaaggtggtggtagacccggacgtggagatggacgtggtggcgctggcgggtacgccggacagtgtgtgcgcggcggtgctgcgcttccgggagggacggctgaccgacaagcgggagtttttgttccacgatacctcggatatcgacgcggtgcgggaggaatttctgccccggtactatctggacgatgaacaaattccgaaaattatcgcggtggacgcgctgccgccggacatggaagctttgcagcaggcgctgaaccagaagcggggcagcgaggtacagctgtatgtgccgcagcggggcgataaagcgcatctggtggagatggcgcacaccaacgcggtggagcgtctggcgcgggagagcggccgctacgcccgggaggaaaagctgctggacgagctggcgcaggtgctggggctttcaaagccgccccgcgccatcgaaagctacgatatctccaactggggcgacggcagcagcgtctgcggcatggtcaccttcaaggacggcaagcccttcaaggcgggctaccgcaagttcaaaatgaagaccgtggcgggcacggacgactacgcttctctggcagagactgtttcccgccgggcggcagagtacgaaaaatacgctgcacaggctgaaaacggacagcccggcggcaactggttcgggcagaagccggaccttttgctgatggatggcggcaggggacaggtgagcgccgcaaaggaagcgcttgccggtacggcgctggcagatgtgccgctgtacggcatggtaaaggatgaccaccaccgcacccgcgccatcgtggacagcgacgggcgggaaatcgctatcaacatgaaccgcggcacctttaccttcatcaccgccattcaggacgagacccaccgctttgccaacgcctaccgcaagcagcagatgaagcagaaaagctactcctccaccctgaccgaggtgccgggcgtaggccccaaaacagccaaagccctgctggcgcagttcaagagcgtgggcgcggtgaaggaagccacccctgaccagctggaaaacacccccggtgtgggcaaacagctggcgcagaccatctacgattattttcacagggaagcataaaaacacccccggcatccgttttcgtttcgttcggatgccgggggtgttctgcgttcaggggtcaattggtataggagatggagagatcgccggtgacagaatcgagggaaactttacgagaggtatttgccttgccatcatggatcgaggtgcccttaagttcattggtgacgaggagatagtccgaggcgctgccctccagagttaggtcagtatcgccagtgatgaccgagatgctaacatcctgagcaccggacagcataccgatcgtgcagtcccccatggcaagttcggcatcgaatttcggcgcggtcagatggtcaatgtgacagccgcccatggcaagatcaaaatccgcgtctttcacagtcaggctgtcggcagaaacgccacccatggcaagttccagatccagttcttccacagagagcgtgccaaggtcaacgtcgcccatggcaagatcaatgtctacctcatgcaggatattttccggagcggtaatggtgagcacagcactgtcaacatcagggggagcgtagtatttcgggatatggtaggaaaactctgcggttccgtcttttttgttggaatgggtgagataccgggtcctaaagccatcaaactgtagcgtgatgtcggaagcgtttgggtcaacaacaaagagaatggtaccatagtccaacttcagcgatagttcatcgctgaccatctcagcagagagggagaaagtcaagccgtctggagtggaaacaggaaccgcgggctgcgtagaggaactttcggcaggcacttccgcagaggaagcaggaatttccgaggcaggagaaatggactcgaccggctgcaccggggtggccttggagtgctggaagaaaaagcaggccagcaccagcaccgccagcccgccgcccagcaccatgcgccagcgggaacgcggcttgcgggcaggagatgccggggcggcagaggcgccttgcgggttttgctcgtccagaattttgcgggcgacctcctcggggctgcccagctccgcaatggcgcgggcttcgttttccggcccggcggcgtccagataatcctcgtaataactcaacgcgtccttgcgctcggcctccggtaagggagccagaagctgctccagcgcagcaagaaatgcagtacgggtcataaatcattccacctctctgaaaaatgtgtcaatggaagaacggtagcggctccactcctgcgcgtaggcggcaagctgcgaccgcccggcggaggtgatctgataatagcggcggttgcggccattgaagggcgcatcgtagaccgtgagcagctggtctttctgcagccggcgcagcaccggatacagggtggattcgcttagttccagcgtgtgggtgacctgttgggtgatcttgtagccgtaggtaccttccggctcctgcgccaccacggacagcacaatggcatccagcagcgcggcactgatgggaaaactcatgtgggaacagcctcctttcggcgtggtctgtttctataatattatatagcatataatattacacaagtcaatagggaatttaccctctcagtctcgctgcgctcgccagctcccccgaagggggagctttactgcacggactggcagataacaaaaaagctccccctttcgggggagctggatgcgaacgaagtgagcagactgagagggtcgagcttctcagttttcagaagagatatcctgtccgaagtacttttcgctcagggtctttagggtaccatcggcgcgcagctcctcaatggcggtgttcagcgcgtccagataggcggtgtcctcgctcttgagcaccgggatggccacatgagaagcctcggcggtctgtgccaccagtttgaagtctgcgtccgggtggacgttcaggtagtcgtagaaggaaacatctgcgttcagggtggcatcaatgcggcctgcggtcagcagctggatggtctcctccagtgtgtcgatgccctgcacggtagcgccgtagctctcggccagctccatgtaggtggaagccagactgttggcggtggtcttgcccttcaaatcctcaaagctgtggatgtcttcgttatccttgcgcaccgccagcgcagtgtggatgtaaccgtagggggtggtgaaagcgtaggtcttggcgcgctcctcggtcacttccacgccgttgcacaccatgtcgtagcggcctgcgtccagaccggcaaacaggctgtcccagtcactctccacatactccggctccacgcccagcttttcggcaatggcgcgggatacctccacgtcgtagcccaccagcgtgtcagaggaatcgtggtaactccacggctgccatgcgccctccagtgccaccaccagcttgccgctcttctggatgctgtccagcttattcagcgttgcggaactggcagtgctggcagtactggcagtactggcggcggtgtccttggaagagcagccggtcaggctcagcaccccggctgcggccataacgcccatcagagagataaaggttctgcgtttcataagtaaaaattcctttctgtcgtgaaaaatgcaaaaagagaagtggttttattccgtgtgggcaatcctgcgcaggaaggcccgggtgcgctcctccttgggggatgcaaagaactgctgagagggagcctgctccaccaccacgccgttttccataaacacggtcttggaggaaacattgcgggcaaagcccatctcgtgggtgaccaccagcatggtcatgccctcctcggccagctgccgcatcacgctgagcacctcgccggtcagctccgggtcaagggcgctggtgggctcgtcaaagtaaatgatctccgggtcggcggcaagggcacgggcgatcgccacccgctgctgctgcccgccggaaagctggcgggggtagtagtcggcacggtctgcaaggcctaccttggcaagcatcttcatgccgatttcatccgcctgctccttgggcagcttacgcgccacgatgagcccttcggtcacattctgcagggcggtcttgttgcggaacaggttgtagttctggaacacaaaggcggtctttttgcgcagccgggcaatgtcggcgcggctggcatgggcaaggtcgaagctttcgccgtcaaacaccagctgcccggcatcggcagtctccagaaagttcaagcagcgcagcagggtggtcttgccggagccggacggccccagaatggccaccacatcgcccttttccacggtcaggtctacgccgcgcagcacgggcagctcgctggcgaccttccgcgcaccggggcggtggaaaaagccgggctttgcgtaggtgcggaaggctttttgcacattgcagatctcaagcatagccataggtgtgcacccccctttttactggaagccgcgggcgttgagctgacgttccagcagcgcctgcagcttggtgatgacggtacagaacagcagatacaccacagccacctcacagtagatgggcaggaagatgtaggtgcgggcggctacccgctgcccggccatgaacagctctgccaccgtgatgttggacgccagcgaggtgtccttgatcataccgataagggagttggacagcgcaggcacggcggtgcgcagtgcctgcggcagcacgatgcggcgcatgatctgccaccagctcatgcccacacagtacccggcctccagctgcccctgcggtacgctttccagcgcaccgcgcatggtctcggcgcagtaggcaccctcgttgaaggcaaaggcaatgaccgccgccggaaaggcattcagcatgatgcccacgctgggcaggccgtaaaagatgatgaacagttgcaccagcagcggcgtgccccggatgacccagatatagaaccgggcgatctgccgcagcaccggcacattggcgtactgcaccagcgccaccgccaccgcgatgatcatggcaaaaaagaaggagagaagggtcagcggaatggtcatggtcaggcctgccgtcaggatgcggggcagcgcctccaccagcacgctgaccgtgcggttggataaaagtgcttcaaacatcgttttttcctcaaagctaaaaatgcacaagccggcaaagcttttgccgactaaggcagtatataccttaaagtagggtcaaagtcaagagactgaatcaccaatccctacaaaacctaccagaatactataatagcatgaaatgccccgcagtgcaaacggtttgcataaaacgtgtgatgtgaccgaaaaattgcatgaacttgttaaatatttgtgcaatgcggcagatgcttgacgctgtgggcgctttcgtgtacaatggtcatagtagtgcgcaggcgcggggcaacggcccggcgcggcgcaaatccaccggcaggggcttgccctttgcccggtgcagacacggaggatacaaacgtgaaaaagtttagtattggtgttctgggtgcaggcacctggggcatggctctggcacggatgctgaccgtcagcggcaacgatgtgcaggtgtggtcggctattgaagccgaggtggacaacctttccaccacccgggtgcaccccaatctgccggggatggtcatcccgcaggagctgcgttttaccaaaagcatagaggaagtgtgtaccggcaaggacgtgctgctgtttgcagtgccgtcggtgttcgtgcgctccacggcggccaaggcgcggccctatatccgctccggccagatcatcgtggatgtggcaaagggcattgagcccgataccttatatactatgaccgagatccttgccgacgagctgagccacgagaacggcccccgggcggtgcgtctggtggcgctcagcggccccacccacgccgaggaggtggcgctggatctgcccaccaccatcgtttccgccagcccggatctggaggctgccgaggtggtgcaggaggtgttcagcaacacctgtatgcgcgtgtacaccaacactgatatcaagggcgtggaactgagcggtgctatgaagaacgtcattgcgctgggcgtcggcatttccaccggccttggctacggcgataacgcccgcgccgctctgatcacccgcggcattgccgagatcgctcggctgggcgtggctatgggctgcaatgtccagacctttgcgggtctggccggcatcggcgacctgatcgtcaccgccaccagtatgcacagccgcaacaaccgcgccggtatcctgatcggcaagggcgaaagcccggagcaggccgtgaaggaagtcggcatggtggtggagggcatcaacgctctgcctgccgccatggagctggccgagaagtaccatgtggaaatgcccattgcccagacggtgaacgccatcgtcaaggagggcatgagcgccagcgacgcgctgcgcaacctgatgtcccgcgaccgcaagagcgagatgccgcagggctatgagagcgtgtgagcctgaaataatcgaaaagaggcttccggaatgtctgcgggcattccggaagcctcttttatttggcgggaggtacagcaaaattattaaaactttttacagaaaacagacacaaaagggtagaaggtcggcaaactttctgctatactggaaacgatagaatttttggtcagtgcagccggaacagggcggcgggcgctggcactgcaagaaggaggaatgagaaatgccctctacctacgcacaccgccgctttggcgcaaatgtgctggaccatctgcccgcgccgctgcgggaaaagctggaggcgcaccgggagctgtacgatatcggcctgcacgggccggacctgctgttctattaccatgcggaaaagtccaccacggtcgccgcgctgggcaatgccatgcacgacgagcaaggcagaatgttctttgaccgggcacggcgggtggtgcatgaggaagccgaccgcgaggctgcgctggcctacgcgctgggctatgtgtgccattttgcactggacagcacctgccacccctttgtggaacagtttacccgggaaagcggtgtgacccactgcgagatcgagaccgagttcgacaatatgctgctgcgccgggacggctatgacccgctgaccttctttaccgccagccatatccaccccagcgcagagaacgcccgggtcattgcgccattctacaaggatatttcggagcagaccgcgctggaagccctgaaggggatgatcttggtgcataaggtgctgcaggcttcgaacccggtcaagcgctgggtggtgctgaccggcatgaaggtgctgggcaagtatgatgggatgcacggccttgtcgcaaacccgcagccgaacccgcagtgcaccgagagcaaccgcaagctggatacgctgtacgccaaggctctgccgctggcaaagcggctgatcttagagtatgtggcaaagctggacacggacgagccgctggacgctgcctacgaccatacctttggggaattttaaaaactgcaccgcccggcggtacaaggggaaaagggaaatacgatgaaaactgaaaaattcaaggtgacaccgctggagcgggcatggatcttatacgatgtgggcaactcggcctttgtgttgatgatcgccacgctggtgcctatcttcttcaatgcgctggccgaggccggtggggtgagcaaggtggactatctggcctactggggttacgcaagctccatcgtcacggtggtcaccgccattctgggtcccattctgggcacgctggcggacaccaagggctttaaaaagcccatcttcatgctctgccttttcgtgggcgtcatcggctgctgcgccatgggcttggcgggcacatggctggcctttctggtcatttttatcattgccaagatcggttactccggcagtctggtgttctacgattccatgctgggcgatgtgaccaccccggagcggatggatatggtatcctcccgcgggtacgcgtggggctatatcggcagctgcgtgccctttgtggtctgtctggcgctggtgctgggcagcagtgcggtggggctcagccagatgactgcgctgtccatcgcgctgatcattaccgccgtgtggtggctggtggtcaccctgccgctgctgaaaaaataccgccagatcaactatgtggaggtggagcagcacgccatccgccagagttttgtgcgcatcgggcagaccttgaagcatctgccgcaggacaaacaggtgttctggtttttgctggcgttcttctgctacattgacggcgtgtataccatcattgatatggccaccgcctacggcacggcactggggctggacaccaccggtctgctgctggcgctgctggtcacccagatcgtggccttcccttcggcgctgatctttggccgcctgagccagaaatatgaatccaagaccctgatcccggtgtgcatcgcggcctataccggtattgccgtctttgccttcttcctgaagagtcagtggcagttctgggtgctggccgtggtggtgggtatgttccagggcggtgtgcaggcactgagccgcagccactttgccaaaatcatcccgcaggaaaaatctggcgaatactttggcctgttcgacatctgcggcaagggtgcatccttccttggcaccatgatcgtcagtgtgggcagccagctgaccggcagcgccaacgtgggtgtgggctccattgccatcctgtttgtcatcggctttgtgctgttcggcatttccacccggacggaagagacaaagcaggcctgaccattttatgagaaaatgaagcccggagcgtccgcagacgttccgggcttcgttttttgttcagaggggtcgctgtacaaaatgctgtcgggcggtggcagtacgggcaaaattatcatgcaaaaaatacatccttgaaaaaagtgaaattaacctattgacaaactaggtagaacgggatataatgcaaacatccaatccaccagtcttgtagggaaatgaaacagaggttctccggcgggtggtacatagagggatggaaaagttttaccggaaggagggcacaaagatgaagctgatctggaaagaactgctgcacgcgaattatcgctgtgggcgaatgcataccaaccgggcaccggcatcggatgtgtactgtatgttgccctcggctgcgcgaatgtgcacccgaatgtgacagcagcagctccggtagaccacactgcccggtgcgcctttgaaaacgcatcgggattttttgtacacaataataatacttttggtatattaagagaggaaaataacaatgtctgaatataaatttgagaccctgcagcttcatgtcggtcaggagcaggccgaccccgccaccgatgcccgtgcggtgcccatctaccagaccacgtcttatgtgttccgcaacagccagcacgccgccgaccgcttcggtctggccgatgcaggcaatatctacggccgtctgaccaactccacgcaggatgtgttcgaaaagcgcatcgcagcgctggagggcggcgtggcagcactggctaccgcttccggtgcagccgccatcacctacaccattcaggcgctggcgcaggccggtgaccacatcgtggcacaaaacaccatctacggcggcagctacaacctgctggctcacaccctgacccagttcggcgtcaacaccacctttgtggatgcccacgaccttgcacaggtggaggccgctatccagcccaacaccaaggctgtgtatctggagacgctgggcaaccccaacagtgatatcccggatatcgacgccattgccgccattgcccacaagcacggcctgccgctggtcattgataacaccttcggcaccccgtacctcatccgtcccatcgagcacggcgcagacatcgtggtgcactctgctaccaagttcatcggcggccacggcaccacgctgggcggcatcatcgtggacagcggcaacttcgactggaaggccagcggccgttaccccaacattgctgcccccaaccccagctaccacggcgtctcctttgcggatgccgcaggccctgccgcttttgtcacctacatccgcgctatcctgctgcgtgataccggcgctaccatctcccccttcaacgccttcctgctgctgcagggcaccgagacgctgagcctgcgcattgagcgtcatgtggagaacaccaaaaaggtggtggaattccttgccaaccacccgcaggtggaaaaggtgaaccatccctcgctgccggatcacccggatcacgctttgtaccagaagtatttccccaacggcggcgcatctatctttacctttaacatcaagggcggccgcgaggaggcctttaccttcattgataacctgaagatcttctctctgctggccaacgtagcggacgtgaagagccttgtcatccacccggcctccaccacccacagccagctgaccgatgccgaactggccgagcagcagatctaccagaacaccatccgcctgtccatcggcaccgagcacattgatgacatccttgccgatctggaagccggcttcgcagccgtccgcggcaagtaagcagcgattctctttcccgcaaagggaatgtgatcttccttttattcctgtccaagcctccataagtgtgcgacaagacccccggcgggcagccgggggtcttgtcatcattaaaaaaagtggttcagaaacgcctgtgggcgtttctgaaccacaaattatactgccgtttttccgattagcggccgatcagcaggtcgcggcggcagcgcagacccacagagagggtagcgctgctgcccagatgccgcagggtgacgcgggtgccggacttctgtccctcgcacagcagcgagaggttcagggtggtggtgttcttctcggtcaccagcaccagcgttttcacaccgttggcctgcaaagtctgcatatcctcgatggtggtgcggaaggtagccacctcggcgggcacatccagcgtcagcacgccgtccttctggcgggcggtgtacagcagctgcttgcccagcagacctttgacggtgtagcgcgcctcggtctttgcggtgccggccagctcatcgccggagatcagcataatgtcgccctgaatggggttgccctccggggcaccgtagccgccgtagctggggtctttttcgcccacggcaacgtcaccgctgtgcagtgcgatgtcgccctgcaccatctgctcctgcgggggcagatagccctccacgcaggtagaatccacctcggcggcaaatgcacccacgctcagcatggcagcggcgcacaccgccacagcggcacagctcagggtacggacaaactttttgttcagcatcttcataggaaatacctcctgaaaacggcagccgcagggactgccttgttttttttgcatcataatttttttaaaccatggttcagctgcggcgcattcacaatggaaaaccgccgtatctgctttgtaaacggatacggcggccggattattgcaaaagattcaaaaatttttattttcagggattttctggtttattttcggcatcatcgcggttgaggatatccatgaactcctcgccggtgatggtctctttctggtacaggtactgtgccagctcgtccagctttgcgcggttctcggtcaggatgcggatggccttttcgtgctgggtcttgaccagctctaccaccttccggtcgatctcgcactgggtctgggcactgcaggccagcgaggtatcgccgcccagatactggttattcacggtttccaacgccaccatgtcaaattcatcgctcatgccgtagcgggtcagcatggcgcgggcaagtttggtggcctgctcgatatcattggatgcgccggtggtgatggagttgaaggccacctcctcggcggcacggccgccggtcagggtagcaatcttgttttccagctcggccttgttcatcaggtagtggttgccctcgtccacctgcatggtgtagcccagtgcgccggaggtgcgggggataatagtgatcttctgcaccggtgcagagttggactgcttggctgccacaagggcgtggccgatctcatggtaggctacgatgcacttttcgtggtcggtcaggatggagttcttcttctggtagccggcaatgaccacctcgatgctctcctcaaggtcggcctgcgtcacgctcttgcgacccgcccgcacggcacgcagggcggcttcgttcacaatgttggccagctctgcgccggaggcaccggaggccatgcgtgccacggtgttgaagtccacacccggggcgatcttcacctttttggcgtgtaccttcaagatctcttcgcggcccttcaggtcgggcagctccacgggcacacggcggtcaaaccggccgggacgggtcaaggcagggtcgagggaatccgggcgattggtggctgccagaataatgacgccggtgttgccctcaaagccgtccatctcggtaagcagctggttcagggtctgctcgcgctcatcgttgccgccaaactggccgctgttgcgcttctggccaatggcgtcgatctcatcaatgaatacgatgcagggtgctttttctttggcctgcttgaacaggtcacgcaccttggaggcacccatgcccacgaacatctccacgaactccgagccggagatggagaagaagggcacgttggattcacctgccacggccttggccaacatggttttgccggtgcccggagggcctaccagcagaatgcccttgggcatggaagcaccgatctcctcgtactgcttggggtcgtgcagataattgacgatctcctgcaggttctccttggcttcgtcctcaccggccacatccgcaaagcggatgccgtgggtggactgcacatacacctttgcgttggatttgcccgcgccgccaaacatcatggagcccgggccgccgcctgccttttccatcagctttttgttcatctggttgccgatgaagctgaacagcaggatgggcagcacgaaccacagcaaaaagctgagcaccggcgaaccctgctccacgatctcgctggagaactgtgcacctgcgtcgtacaggcgctcggtcagactggggtcgttcatcaggccggtcttgtagatctgcttgttgtccttatccgtaaaaatgatctggttggactggatatccaccttgccgatgttttcctgctcggtcatgctcataaaggtgccgtagtctacctcctgcacctgacgctcggccagccacggcatgaccacaaggttgatgaccagcagcaccagcagcacgatggcatagtagatagccagcggctttttggatggcttgacttctttcatgggatgttcctccttctatataaagtgggcttccacccgtttgctgcgtccagtataccacaccttaccgcctagcaacagcgcagcgagggcaactttgcaaaaacttagcagtttcttaacaaagagggctaaagccgctcagttaccatattataggtgcgcaaagggcttgccggatgagggggcaggggagcaacgacctcaattttgcatgatttaccccatggtattgtgaaatgctttcatctttatcctgaacgaaacttcttgacactttctggcagtcgtgctaaaattatctcactttcaacaaagtgcaaatgcgttgacggggataaaacgatctttcttctgcgtgcagagagccgccgggtggtgcaaggcgggtgcagagaacttcggatactggcccccgagcggcagaactgaacggacaagtaggttctgacggatgcccaccgttacaagggcagcgattcgctgttttggccgatcgtgcaaagtggctgtacctgaccgtgcagcaaggagagtggtaccacgggtgccctgtaaaagcaatttacaggctctcgtctctcaaggttttcgccttgaaagacgggagccttttttcgtacaacggttgcagtagggcaaaaggcttcccccggtcgggggaagctgtcaccgcaggtgactgatgagggcgcaggcaagcagctgctgccgggaaatcacccctcatccggcgctacgcgccaccttcccccaaggggtgaaggctttatgctatttcaggaggacaacaggatgatggacgctaccaagtacgcaccggggtactacccggtacccgccggttatgacagctgggtaaaaaaggaccatattgaaaaggctcccgcatggtgcagcgtggatctgcgggacggcaatcaggcgctgatcgtgcctatgagccttgcagaaaagctggagttcttccagatgctggtaaagatcggcttcaaggagatcgaggtgggcttccccgccgccagtgagaccgagtacgagttcctgcgcaccctgatcgaaaagaacatgatccccgccgatgtcaccgtgcaggtgctgacccagtgccgcgaccacatcatccgccgcaccttcgaggccgtcaagggcgcaccccgggcggtgatccacttctacaactccacctccgtggcacagcgggagcaggtgttccacaagtccaaggaggagatcaagcagatcgccgtggacggtgcaaagctggtcaagcagctcagtgaggagtacgagggcaacttcctgttcgagtacagccccgaaagctttaccggcaccgaggtggactacgccgtagaggtgtgcaacgccgtgctggatatcatgcagcccaccccggagcgccccatgatcatcaacctgccggtgaccgtggagatgagcatgccccatgtgtatgccaaccagatcgagtactgcgacaagcacctgaaataccgcgacagcgtgatcatctccacccatccccacaacgaccgtggcaccggcgtggcctgcgcagagctggcagtgctggcgggcgcacagcgcgtggagtgctgcctgtttggcaacggcgagcgcaccggcaatgtggacgccgtaacgctggccatgaatatgtacagccacggcgtagaccccaagctggacttctcggatatgcccgctatctgcgccacctacgagcgggtgacccggatgcacatctacgagcgtaccccctacgccgggcagctggtgtttgccgccttctccggcagtcatcaggacgccattgccaagggcatggcgtaccgcaagcagaccggcgaacaccgctggacctgtccctacatcccggtggacccccacgacattggccgcacctacgacgccgatgtcatccgcatcaacagccagagcggcaagggcggcatcggttttgtgctggaacagaactacggctacaatctgccccccaagatgcgggaggcactgggctacaaggtcaagagcgtgtccgaccacagccacaaggagctgagcgccgccgaggtgctgcacatcttcgaggatacctacctcaaccgtgcaaagccgctgaatgtggtggaagcccactttgcacaggtaaacggcattaccgccacagtcacgctggagctgaacgggcagcgcaaggtggtcacctcagtgggcaacggccgtctggatgccgtagccaacgctatccagagcgccaccggcatggacttccatctggaaaactactctgagcacagcttggacgagggctctacctcccgcgcagcctcctatgtggggcttgtctggggagacaacacggtcacatggggtgccggtaccgacaccgacatcatcgtggccggtatccgcgcccttgtcagcgcaatcaacaatcgataaaaaggagaaaactaccatgggaatgaccctgacgcagaagatccttgccgcacacgccggactgccggaggtcaaggcaggccagctgatcaacgcaaagttggacattgtgctgggcaacgatatcaccaccccggtggccatcaacgagtttgaacgcgccggtttcgaccgcgtgtttgataaagagcatatcgctatcgtgctggaccactttgtacccaataaggatatcaagagtgctacccagtccaagcagtgccgggagttcgccaataaatacgatatcctcaacttctacgatgtcggccagatgggcattgagcacgcgctgctgccggaaaaaggcatcgtcaccgccggagactgcgtgatcggcgcggacagccacacctgcacctatggtgcgctgggtgccttctccaccggtgtaggctctaccgatatggccgctggcatggctaccggcatggcatggttcaaggtgccctctgccatcaagttcgtgcttaccggcaagtttaacccccgggtgtccggcaaggacctgattttgcatatcatcggcatgatcggtgtggacggcgcactgtataagtctatggagttcaccggcccgggcgtggcaggccttaccatggacgaccgcctgtgcatctgcaatatggcgattgaggccggtgccaagaacggcatcttcccggtggacgaggtgaccaaggcttatcttgcaggccgcagccagcgcccgccggtgttctacgaagctgaccccgatgccgtgtatgaaaagaccatcgagatcgacctcagcgcactggagcccaccgtcagctacccccacctgcccgagaatacccatgttgccagcgagggcaaggacatcaagatcgatcaggtggtcatcggcagctgcaccaacggccgtctggaggacatggaagccgcctacaacatcctcaagggcaagcacatcgccaagggcgtgcgcggcatcatcatccccgccaccatggctgtttataaggagtgcatcctgcggggctggactaccgcctttatcgatgcgggctgcatcgtatccacccccacctgcggcccctgtctgggcggctacatgggcattctggcagcgggcgagcgctgcgtttccaccaccaaccgcaactttgtgggacgcatgggtcatgtggacagtgaggtctatctagcttctcccgccaccgccgccgccagcgccctgaccggctacatcaccgacccgcgcacggtctgacccgaaaggagcatgagcatgaacgcaagaggttctgttttcaaatacccggataacgtggataccgatgtcatcatcccggcacgccacctgaacacgcaggacgccaaggagcttgccagccactgcatggaggatatcgacaaggactttgtgaaccgggtgcagcccggcgatatcatggtgggcggctggaactttggctgcggctcctcccgtgagcacgcacccctgtgcatcaagaccgccggcatcgcggtggtcattgccaaaagctttgcccgtatcttctaccgcaacagcatcaacatcggcctgcccatcatggaatgcccggaggctgtggacgccattgaagcaggggacaccgttcgggtggattttgacaccggcgtcatcaccgacgagaccaacggcaaggtgttccacgccgagcccttcccgccctttatccagaacatcatctccgccggcggcctgatgaaggccatccagaaataagccatccccatccgtgaaaatgtgtttggagcgacccgcgtttgcgtagcaatgaaagccccagtggggcttttaagcggcagagcggtctgcgtgagcagatggaagggccttcgcgctgacaagctccgcaggccgcgacaaacacgaaatataaataaaaattccgctgattatgcgcagagcaacgcggagcgcattttaaatcgtccatcctccaaagagggcgtaaggctttgagagagtggagctatcaggggcgttttgagcatagaaggagtacctcatggaaaaaaatattgctgtcatctggggcgattgctccagcccggagatcgtaaagcagaccctccgggtgctggataaggtggctgaaaagtacggccataccttccactacaccgctgccgccatgggcggcgaggccattgataaatacggcgacccgctgccccagcacgagctggacaagtgtcttgccgccgacagcgtgctgctgggcgcggtaggcggccccaaatgggagggcctgcccggggagcagcggccagaaaagggcctgctgcggctgcgcgccggcatggggctgtacgccaacaaccgccccgccaagatctggccgcagctggccccggcaagccctctgaagcccgagatcgtggcacagggcattgactttatcattgtgcgggagctgatcggcggcgtgtacttcggccagcaccagacccacacgctggaaaacggcgaaaagcaggccgtggacaccatgccctatgcggagcacgagatcgagcgcattggccgcatcggcttcgagactgcccgcaagcgccgcaaaaagctgtgctgtgtggacaaggccaacgtgctggacaccagccgcctgtggcgcactgtgatgcaccggctgcaggccgagtacccggacgtggagtacagcgaaatgttcgtggacaactgcgctatgcagatcgtgaagaaccctgcgcagtttgacgtgatcgtcaccgagaatatgttcggcgacatcctgtcggacgaggcttctatgatcaccggttccatcggtatgatcccgtcctccagccttggcgacggcacccggggtctgtacgagcccatccacggctcggctccggacattgcgggcaaggacatcgtaaaccccactgcctgtatcctgtccgccgccatgatgctgcggtactcctttggcatggcagaggaagccgatgccattgagaacgctgtgagccgtgtgctggataagggtctgcgcaccgccgacaacatgagcgatggctgcacctgccttggctgcaccgccatgggcgacgccattctggcagagctttaagccgcagcactatttttaatgaaacaagcccgaaaggtctaccgaccttccgggcttgaattttatatattattacagcatcttggagaggaaggctttcaggcgggggtgcttggggttggtgaacagctcctgcggcggctcgtcctcctgaatcttgccatcgtcgatgaagatgacccggttggacacctcgcgggcaaagcccatctcatgggtgaccaccagcatggtgatgccggtgtgtgccagctccttcatcagctccagcacctcgcccaccatctcggggtcaagggcgctggtgggctcgtcgaacaggatcacgtccgggtccatagccagcgcgcgggcgatggctatgcgctgctgctgaccaccggacaggctcttggggtagacgttggccttgtcggccagacctacgcgggccagcagctcgtctgcacgggcagagatggcctctttgtcctttagcttcagcaggctgggtgccagctcaaggttctttttcacggtcaggtgggggaacaggttgaagtgctggaacaccatgcccatcttctggcgcacggggtcgatgtgcgcttcgtccacctccacgccttcaaacttgatagagccggaggagggggtctccagccggttcaggcagcgcagaaaggtggacttgccgcagccggaagggccgatcaggcaaaccacatcgccgcggtagatgtcaaggtcgatgcccttcagcacgtccagcgtggggtcggccttttttgcgccgcgcttctttacgccgccataggtcttggtcaggccgcgtacttccaaaatcttatcggtcactttgtgccagcctcctctcaaacttgctcagcagccatgtaaacagcataacaaggatcaggtagatcaatgcaacgcccagcagggggaacatggcgtcgtaggtacggttcataatgccctgtgcagcatacagcagctccttgccgccgatggtggtgatcagggaagtatccttgagcagaatgatgaactcgttgcccagtgcaggcagcaccgcacggatggcctgcgggatgatgatgaccaccatggtggtcatgtagttcaggccaaggctgcgtccggcttccatctggccggggtccacagccatcaggccgccgcggatgatctcggatacatacgcgccagagttgatgcctaaggtcagcgcacctaccatggtaaagttgcggctgttggcaaaaatgaccatactcatgatcagcagctgcaccatcatgggcgtgccgcggatgatggtggtgtacacctgacacaccgcgttaaaaaagcccagcaccgcgtttttgtggccggggcgctgctggtcgtgggtcacgcgcaccagcgccaccacgctgcccagcaccacgcccagcgccagcgccagtgcggtgaccagcagggtggtgcccacaccgctgatgtactgcatccagcggtccttcagcagaaaggcctgataaaacttgaaaaagaaatcctgttcaaagcttagctttgtgccgctgttgagcagctctttgagcagttcgtattgcgcagccattcacatcctcgctttctgtttgtcaataaattgtaaccacttttttctaaaaaaagaggtgccccggagcggggcgcctccttgggtacggaaatggtacagggcacgcagcttagtttgcgttgatgtacttgtccacgatggcctgcagggtgccgtcagccttcagctcctccagagccttgttgacagcgtcctccagtgcagaaccctttgccatgccgatggcgtaatcctcctcggcgtagctggtgtccagcaccttcaggccgaggttggcggcaacgtactccgtagcgggagcgttgtcgatgaccactgcatccacctgaccgttgttcagtgcctgcacagcggtcaggccgctgtcgtaggccacaacagagtcctcgccgaagtcatcggagcagtagatgtagccggtggtgccgcgctgggtgccgatcttcttgccggccagatcgtcgggagaagcaatgtcggaatcgttgggcacgatgatggactggatgccggtggcgtagctgtcggagaagtccatcacagccttgcgctcgtcggtcacggtaacgccagccatcacgatgtcggccttgccctgctgcacgctgagcagtgcggcatcaaactccatgtcatcgatctgcagctccagacccagcttttcagcaatggccttggcggtgtccacatcgatgccctcgatctcaccggagtcggtggtcatctcgtacggagggaaggtggcgttggtggccatggtcagcttaccagcctccacggtggtcagctcagcggcagcggcggaagaaacagcctcggaggaagcggcagagcttgccacagaggaagcagcagagcttgcggaaccaccgcaggcggtcatagccagagcagcaacggaaacagcagcggcagccatgaagctgcggcgagagatctttttcatattcaaacactcctcaatctatgcaatatagtttgctttgccccgatgggatgcgattcatcgcgctttcggggaacgcacttagtatagtttgtacaaaacgaaaagtcaatacttgtgcataataatccgtgaaattgaaacgattttgcaaacatttatgcaataacggggaaaatgtgtgaatatatgcagtataaactccctcagtcaaagcctgacggctttgccagctccctcggggagggagcctctggcgcgcccggacactttgcacttgagccggtaactttgccgccatgccaaaggccccatctcagagggggctggcatcgcgtagcgatgactgggggagttcagcctgagagggcgaacttgcactgcggcgcttatacgcttcttgcgatctcctccgcgctgcgcttgggcacgcagtagtcgcggttttcgtccagatagtactttacgccggtctgctcggtcatgggtacgatgcgggctttgtgggtggggtagccaaaagccaccataaaggccagcttctgcggctcctcgatgcccagcagcgcggtcagggcgggcttattgattgcgcccatgatgcagctgcccacgcccttgtcccatgcggcaagggtcatgttggccagtgcaatgccggtgtcggtggcaaggtcgccggggatggcggtatcctgcaccacagctgcataaaaggtgggcagttcgtccgctttgggcgtgccctgctccggcggcagatagccagcccacttgaccagcggctgtaccttggccaccatctccgggctttgcaccagcaccagacgcaccgcctgccggtttgccccgcaggaggacagccgcacggcctgtacgatatcatccaccacatcctgcggcacggccttttgtgcaaaccggcggtaggtgcggcgggtagtcagaagttccataacagacattataaatcgctcctttatccggtaaaatacaaaacggaaaaaaactatataaagtataacagatgcaccggcgcacagcaatggctgcggcgtggttttttgcggatacggcggctgtattgtaaaggatagtgacacttattcttgtatccttgtatttttttggtgaatgtttccatgaaatacttgacaatggggggtaggtaaaggtattatataggtgtaaacgcgttacatgcagtgtaaggcgtgcttgaaagaaagattgtgaggttgattattatgtctaatatctctcgtcgtcagttcctgaagggcgcaggtgtcgctactctggctgttgctgctgctggcgtgctggctggctgctccaaggaggatgttcctgtgattcctgaagtgaccactcgtcctgtgatggtcatctttatggcagacaaaggcaatggcgagaccgtggttgtgggtgagactgccaagattgatgttctgaagaccgaggactctgtgaaggttgctgacatcgataagaagctgttgcccgaaggttaccatctggagaacgaaaaggcagtcgtcgagattcgcaaggatgcctctaagggcgagcacatcatcgtctttgtgactgatgtgacctacacgcctgctaccaaggaagttgatattaaggtggctatcaccaatccgaaggctggcgaagctgtcatgactactgtgaaggctaacgttaagaaggatgcaaccactatttccgcagctgagatcactctgccggatggctttacttgggcagagggtaccgagatggatcgtcagtacgatatcgctacctacgttttccccattaagcacatcgcttgattgtgcgcgtagtaacttaataggttaataagcactaaatgggcatctgcatttgcagatgcccatttttaacgaaatgacgtatataagggttgaacccttgttctgccacttcttcggcaacgggcaaccgcttccgtcaaagcctgcggctttgcaaaccctctcaggctcactgcgttcgcaaggcgagatgactgagagggtcttactttctcttcggcagcggtacgcacagcaccagactgatgccgatagccagcgccaccgcaattttaaaggtgctgatgcccttggcaagggcaagggcgttttcgttctggatgaaatagtaggcggtgtagtagatgcccgcgcccggcacaagcgggaaaatgccggtcagcaaaaacaccgtgaccggcgttttttgggtaatggcaaacacgcgggtaaggatggtaagcggaatgaccgccagcagggaggccgtggcggcgtctgcgcccagcagggtcagcaactcgtaccacagccagcccacagcgcctaccagcgcgcagtagggcaggcagcgccgggggcacgcaaacagaatggcaaagctcagcgtgcccgccgcggccagaaaaaactgcgcggtcagctcgctgatctgtacagctgtaagggacatcataccacgaccacccccgtaagtactgtgtacagccgcagcacaagaccggtgcctatggcaatgctggcggcaatgagcaaggcgtcgatcatgcggatggtgccggaaaggtaatcgccctgcacaaagtcccggatgcccatggtaaaggcgatgcccggggtcaggatcatcagcgtgccgatgatagcgtggctggcagaggtgtgcagcagattgcacagcagaatgcacaccagcgtgatcagcgcggcggtgctgatcttctggaagccgccgggcacctcatgccgcccgcaccacagcagataccagctggccaccagccccgccccggcagctgccagtgcactgcgcaggttgccgccgaacatcatggcaaagcagaacgccccgcacagcccggaaagcagctgcacatgatctttggggaagggcagctgccgcgccagcaccagacggctctcggcttcgtccaaggtcatccctgtctgggcgatctggcgggaaagctcgttcaccgccgccacccgccccagatgggtggtgcgcaccggtacgttgcgcacctcgctgatctcggcagtgccggcactggcaaaaatgccgttggtcagcacataaacgtggaactcccgcagatggaagctgcgcgccatgatctccatggtctgctccacccggaacacctccgcaccattttccagcagggtctgccctgcggccatgataaaatccatgatgcggcggcgcagctcttcatcgggaaaatggtctctgctgttcattgcctgcgctccttgcaaaagatgataccctattttatcatgtgcaccagccgcatacaagggcgtataataaaaagctctggaaacaccagagctttcttgcgaaaagggtcggaatatgttataattgtcctgtcgctgaaaagcgatcgaaaggtactgcacatacggcaggcggttggctctcacttccggaaggaggtgagaacatgcctattactttgacattccacttgtttggatttacgtttacgatcaaggtaagaaagtaaaaaccgccaccccccacaggtgacggtttttctttggataaaagttaaactaaaaacctaaagggccaaccgcttgtcgcagtgccttttgtagttatagtataaccctttttgtgcgcattgtcaagcaaaacgggcgcggcaaaaggccggaagccatatccctacccaaaaacttcgttgaaggtgttgacaaatgccgccgatgggtttattatagtgtcaatatcacaaaaatggctgtgaagagaagagtaggccttcgcattgatccttaccagagagcccgggcggtggaaaagggcaggaagcaggaagctgaaaatggtctcggagccgtgcggacgaggcgcaggagtgctaagcccgcaacgggatgcgcccgttacagcgtccggctgtaagcagtacacgctgccgcagcatcgaggctgtatccgtaagggtacagtgaaccaaggtggtaccacggaagtatgttcatgcctccgtccttgcagagtctaaggctcgtaaggacgggggcattttttcattcatccgttcaaggctgcgcgcggaaaggtgccgtgcgggccgcagtacataatagagaacaatagagagggaacaaaaccatgattactcgtcgcgattttctgaaagttaccggtgtggcagccgcagccgctgccctgactgcctgcggtggttcttcttccactgcttcttccgccgctgcatccggcagcgtggcatcttctgccgctgctaagctggataagatcaaggtggctgtgcccaacgataccaccaacgaggcccgcgccctgaccctgctggagaagaacggcttcttcaagctgaaggcagacgcaggcctgaccgccaccaagaacgacattgaggagaaccccctgaacgtcaccgtggacgaggtggaggccgctcaggtgcccaacgtcctgcaggacgaggactacgccgtcatcaactccaactacgccatctctgccggtctgaaccccatgaccgatgcactggccatggaggacggctcttctgcttacgtcaacattctggtgtgcaaggacggcaatcaggaggagcctaagatcaaggctctggctgctgccctgcagagccagaaggtgaaggacttcatggacgagacctacaagggctccgtggtgtccgttgtggagaaccccaccgacggctatgattccactgtggattatgacgctctgaacggccagaccgtcagctgcgccgctactcccgctccccactgcgaggtgctggaggtgtgcaaggagatccttgccgccaagggcatcacgctggacatccaggagtacgacgactatgtgatccccaaccagatcgtcgaggacggtcaggtagacaccaactacttccagcatcagccgtatctggacaacttcaacgccgaaaagggtacccatctggtatctgttgccggtattcacgtagagcccatgggcgtctacggcggcaagcaggacagtctggcacccatcgagggataagctaaaggagcaatttctgtgatcgaactcaagtatctttccaagacctttcagatgaaggatggcgcggtgaaagcgctgcagaacatcaacctcaccattcccgatggctccatctacggcatcatcggtatgtccggtgcgggcaaatccacgctggtgcgctgcatcaacctgttggaacgccccaccggcggcagcgtggtgatcgacggcgtggctatggagactttgtctcccgcctcgctgcgcaagcgccgtcgggagatcaccatgatcttccagcagttcaacctgcttatgcagcgcacctgcctgaagaacgtctgcttccctatggagctggcaggcgtaaagaaggcggaggccgaaaagcgcgccatggaactgctggagatggtgggtctgccggataaggccaacgcctacccggcacagctgtccggcggtcagaagcagcgcatcgccattgcccgcgcactggccaccaaccccaaggtgctgctgtgcgacgaggccaccagtgcgctggaccccaacaccacccactccatcctgaccctgattaaggatatcaaccgcaagctgggcatcaccgtggtggtcattacccaccagatgagcgtggtggaggaaatctgcgacagcgtggccattctggacggcggtgtggtcgtggaacagggctcggtacaggaaatttttgcaaaccccaaaacggcagccgccaagcgtctggtggctcccaacggcggcagcgcagcgcgggatctttcctgctttgcgccggatgaccatgtggtgcgcgttacctttaatggttcctccactgcaaagccgctggtggcaagccttgccgccgaaaagggcattttggtgtcggtgctcagtgccgatacccgcgatctgagcggccagtgctacggctccatgctgctcaagctgcccgcagaacttgcggtcgcacagcaggctgtggaatatatgcgcagccagtccggcgtaacggtagaggaggtgaccggtatatgaatatcgcagcttacggctttgccatctgggagaccttttatgtaacggtgctctccaccgcttttgcgctggtgttgggtctgccgctgggcgtgctgctggtagccggtgacaaggatggcattctgcccctgcccggctggctgatgcatctgatcaatatcgtcatcaacatcctgcgcagcgtgcccttcctcatcctgatgatctgcgtgttcccgcttacccgcgccatcgtgggcactacggtgggcaccaaggccaccatcgttccgctggtggtcgccgccttcccctttgtggcacgtctggtggagaccagcctgcgggaactggacgagggtgtggtggaagctgctcagagcatgggcgctaccccgttccagatcatcaccaaggtcatgatcccggagtgcctgcccggcctgatctccagcatgaccaccgcactgaccaccattctgggctactcggccatgtccggcgtcatcggcggcggcggtctgggcaagatcgccctgtcctacggctactaccgctaccagaccaacatcatgatcgtctgtgtggtgctgctggtgctgatggtgcaggcgttccagtctgtgggtaccctgtgggccaccaagagcgataagcgcctgcggaaataagaagctttgatttttcgattccccgccggaggcagcccctcctgcggggaatcgtccttcccgaccaaaaaacaagcaaaggagtatgttgtatgaaccgtgataccatctgtgtgcagggcggctacacccccggcaacggcgagccccgtcagatccccatcatccagtccaccaccttcaagtacgccaccagcgaggacatgggcaagctgtttgatctggaggcaaacggctatttctattcccgcctgcagaaccccacctgcgacatggtagccaaaaagatctgcgagctggaaggcggcaccgccgctatgcttacctccagcggacaggccgcaaacttctttgccctgttcaatatctgcgaggcaggggaccacatcgtggcctccagcaccatctacggcggcaccttcaacctcatctcggtcaccatggctaaaatgggtatcaccgccaccttcgtagaccccctgtgcaccgaggaggagctgaatgccgccttccggcccaacaccaaggtggtgttcggcgagaccatcgcaaaccccgccctgaccgtgctggacattgaaaagtttgccaaggccgcccacgcccacggcgtgccgctgatggtggacaacaccttccccacaccggtcaactgccgcccctttgagtggggcgcggacatcgtgacccactccaccaccaagtacatggacggccacggcgcagtgctgggcggtgccatcgtggacggcggcaagttcgactggatggcgcacgctgagaagttcccgggtctgtgcaccccggatgacagctaccacggtatcacctacgccgagcgcttcggcaaggagggggctttcattacaaaggccactgcgcagctcatgcgggacttcggctccatgcagtcccccatgaacgcctatatgctgaaccttggtctagaaagcctgcacgttcggatgcagcgccactgcgccaacggtatggcggtggcacagttcttggaaaaccaccccaaggtggcctatgtgaactactgcgggctggaaagcagcccctaccacgcactggcgcagaagtacctgccaaacggcagctgcggcgtcgtgagctttggtctggccggcggacgtcaggccgccagcacctttatgaaggagctgaagcttgccgccatcgagacccatgtggccgatgcccgcacctgctgcctgaaccccgcctccagcacccaccgtcagatgaacgacgagcagctggctgccgccggtgtgcccgccgagctggtgcgcatgagctgcggtctggaatccgccgaggatctcatcgccgatatcgcgcaggcactggataaggtctgatgccttcccgtgaaatcaaaaatcatgatacccctgaagatggcaaagcgaacgcggtgccatttttgaatcgtctagcaaaggagcgactttcctatgccgctgatcatccctaagaccttacccgcctttgatgctctgtatgaagaaaacgtctttgtcatgcaccgggagcgggcgctggcgcagcatatccgcccgctggaaattttgatcctgaacctgatgcccaccaagatcgccaccgagacccagatcgcccggctgctggcaaacaccccgctgcaggtgcacatgaccctgctgcaaactgccagccactctgccacccatgtgtcggctgcccaccttgaggccttttacaagacctttgacgaggtaaagaacaaccgctacgatggcatgatcatcaccggcgcgccggtggagaccatggattttgagcaggtggactactggaacgaactgtgcgagatcatggacttcagcgaaacgaacgtctactccaccctccatgtctgctggggcgcacaggcagggttgtactaccattatggcgtgcgcaagcagctgctgccggaaaagatgttcggcgtgttcgagcaccgggtcacccgcccggcaaacccgcttgtacgcggctttgatgaggtgttctacgctccccacagccgccacaccggcatctgccgggaggatgtggacaactgcgccgcactgcgcattctggccgagagcgacgccgccggacccttcctcatgagcaccgagaacgggcggcagatctttgttaccggtcacccggagtacgataagtatacgctggatgccgagtataagcgggacgtagccaagggtctgcccatccatgtgcccgtcaactattacccggatgacgaccccgcaaagccgccgctgttccgctggcgcgcccacgcccacctgctgtatgaaaactggctgaactattacgtctaccaaaacaccccctacgatttgggagatatccaacgggtaaaacacgagaaataaataacaaaaaggactgccgcgaaacagcgtcaacgaaaaatgtaaaaaagctgagcacctgatctttcacagatgctcagctttttttacccttttttgagaagctgtcttggagctttcaatattttgaaggtatgctattctgcggcagccctctgccggatgtttttaccctctggggtggccggtatatgtcagcgctacggtgtcggggccggtgttggcagagaccacgccgcccagctcaaacacggccagcggcggcttgccaaaggccttgcggcaggccttttccagatctgcggcttgcgggatgttggtgtggccgatcatatactcaaaatcctccacatccccggcgcgcttctggcacagatccaccatggcgggcacgactttttcatcgccgcgcaccttggcctctaccttggttttgccgtcgatcagggtaatgatggggcggatacccatcagttcgcccatgacggctgctgcggcagagatgcggccgctctttttcatctgcctcaggctgtaaggtcccagcacgacctccatgcagttcatctgccgttcaaattcgtggatgacatggcggatctctgcgccgttctgcagtttgcgtgccatctcgcacagataccagccgaacaccatagaataggtgtgggggtccagcagatggatgttcagatggtgctccgggcgctcttcccgcagcatcccctgtgccatcagggcgttgttgtaggtggaggagccggatttgttaatgggcacatggatgacatccgtgtagccctcgtccacatattggcagtatttttcacagaactggatgggcgtaatggcggcggtagagggcacaccctttgccgcacgcattttatcgtagaactcggtgttggtgcagtccacacgctcaacgtagtccacatcatccagcaggatgtggaaactcatgatatcaatgccgtatttttcggccatctcctgcgggatatcgcaggaggaatcggtcaggatcgcgatcttgctcataatttccctcatttccattcataatctcgtaggtggccgtggtccagcagctccgggaaatcccactgccgcagcacctcgtacacgcccaccgccacgctgttggaaaggttcagactgcggcaggtgtcccgcatgggcatccggatgcagtgctcctgattttccacaagcagcgcctccggcaacccggcgtcctcgcggccgaacaccagataagccccgtccgggtactgtacatcggtgtagcgctggggtgccttggtggtaaagtagtagtagggtccgttgttgcgggcaaaaaagtccgcaaggccgtcgtagtaggtaatgtccagatagtgccagtagtccagcccggcgtgcttgagctttttgtcatcaatggcaaagcccatggggcccaccagatgcagacggcaggccgtgcaggcacaggtgcgcgccacgttgccggtgttctgggggatgcggggctctaccagcacgatattcaaagtcggcttgtccatcataaaatgccctccggttcctcccgcagggggcacaggcggggcagcagcggctcaaaccacacgccgaatcgggtgtcctgcgtgcagggcgtgccctgaatggccagcgaaacaaactccgcagcgttatcagcggcggcgctcagggcgttgccctgcagcagcgagccgatgagcacggcaccatacagatcccccgtgccggggaagctgcggctgatatgcagctttttgatgacgaagcggtctgcgccggtaccggcacagccgatgtacttgcccagcggcaatccggtgaccaccgcgttggaggccagcggctgcaaagcatctgccagtgcctgcgcggcggtatcgtccagctcatcggtgaccggctgctgctgcaaaagcagctgcgcctcggtgtagttgggcaaaatcagatctgccgcgcggcacaggctgcggatgcgctcgaccagtgccggggtaacggtggaataggccttgccgttatcgcccattacggggtccaccactttgtaggcggcaggccacagggcaaaggctttttcagccagcgctacctgtgcctcgccgcccagatagccggtatagatacaatcaaattgcagtccaagggtctggtagtgctccagtgcggccatgccgtaggcactgccgtccatccgggcgggggtgccaaggccgccggtgtgggtggagagcaccaccgtgggcagcgccaccggctggaagcccatgactgacagcacaggcaggatcaccgcaaggctgcaccggcccacgccggacagatcgtggatgcaaaggatcttttttggttcaacgggtttttgcaaataggaaaacctccttgctgaaaagccgcgcacagcggcttataaaaagcatcatagaacagtataccacaaattgctgcataaaaaaagcgtataccagattcttttgcggaaataatagcactgcaagccctgtcatgacaggccgaaaggagaaattcaggatgaaacagcgagaaaattccgccgcaggcatggtggtgggcatggccaccggtgcagtccttggggctgccggtgccatgatggctacccagagcaagcgccagatgcgccgcaatgtgcgcaaggtgatgaagggcgcggaaaatgcggtgatgcagctggataaaatggccgccgactttgtggaaaagcacatcgattgctgaacagcaaaaagcgccgtcccaggtggaacggcgcttttgttatcgtgctgtttattttgcccagatgcacatccgggcggtggtgttgatctcgcccagcaggctcagatccatctggatgttgcaggtcacggtcagcgccttactcacatcgctgccggtcagcaccgaggcaggcaggttcttgatggtcaggatgccgctgcccttttcgatctcgccggtcagggtgccggtgtaggtcacatcgccgatggtcaggccggtcagacagccggtcacattgagcttggtcacctgcttgacgggcagcatcagggtgtaggtgccgttggactggcgggcaagggtagcctcgcggtcagaatcaatgccggagttggccatggattccttgtcggagttttccttccagaatttgaccccaacgggggtatttgcggcggcagaagcgcccagtgtgagcatacagaacatcagcagcgtcagcagggcagcgccggtacgttttaaggcggtagtcatggttttatcctttctgccgcagctacggcatggtgaaacagagtatataatgctccataaggtgctaatttgtcaatactaacatagcatgaccggacggccttgtcaatgtgccttggcagtctttcacaaaaatgtttcggatccgtcacagaatatggaaagtgtgatgaaaaaggacgctgcaacattgcagcgtccttttgggtggttaccttatagcggctcagacctcaaagttgggatcgtccttcagcatgtggatgttggacataaaggcgctctgctcggggtcggtgaactcggcatccttcacatacttgttcagcacagctgcggtgcgcacggggtcggcaatggtaccggcaccgccgatgcagccgccggggcagcccatgccttccagcaggtagccgttgtacttaccggccttggccagcatcagcagcttcttgcagtcggccagaccctgtgcggaggcgatcttcacctccatgtcgggacgccattccttgatcttgtcggcaacggccttggcaacgccgccggactgtgcaaagccgcggcctgcagcagaagcgtagcacagatccatctcggcgggatccacttccagattgtccagatccagatcctttgcctcgatgatgccggccagctcttcaaaggtcagcacgaagtcaacgtcagagcggacggtgcggcgggaggcctctagcttcttggcggcgcagggtccgatgaagcacatacgggcctcggggtcggcctgcttcatcatgcgggcggtgaacaccatgggggtcatggtcatggagatgttcttggcaaggccggggaaggtggtctttgccatcatgctccatgccgggcagcaggaggtagccatgaagtccagcttctcgggcacttcctccaggaagtcgtgtgcttcgtccacggtgcacaggtcggcaccgatggcaacctccaccacatcacagaagccgatggccttcagggcggacttcagtttgccggtggaagccagagaggggaactggttgataaaggcgggagcgaccagcgcatagatgcggtcgccgcggttgaagccctgaatgagctgatagatctgacccttgtcggcaatggcaccgaaggggcagtttaccagacactgaccgcaggacacgcacttgctgtaatcgatctcggcacggcccagctcgtcagagtggatagcgcccatgccgcaggcagcagcgcagggacgctcggtcttgacgatggcgttgtaggggcagacggtgacgcagcggccgcacttgatgcacttgtcctgatcgatggtggaacggccgctctcccaagtaatggccttcttggggcacacttccatacaggggtgtgcaaggcagccctgacacaggtcagaaaccttgacccgcttttcagggcagcggttgcaggcaaacttgatcacgttgaccagcgggggatcatagtacttatcggcgatggaggcatcctccagaccggagaccacgctgttgtgctcgtccatgcggcgggtgggcagacccatagccagacgcacgcgctcctcaacgatggcgcgctccaggaagatgtccttgcgcagcttgccctcctcaccggggatgatggtgtaggggatcttgcgcatcaggtggttggcctgctcgcccttgacattggcgtaagccatgcgggcgacctcggtaaacacctgacggcggatctggatgaccgtagtattgattcctctgaaactcattccaatctctccttgctcagaaacagccaaaaaacggagccgtctgccctgtgtgcagagcataaaaacggcactatacgggcacggatggtaccgtgctggttgcttacagcacgccggacccgataaatccatcttcattttaacataaagacgtgcgtatggaaagagcaaaacacaaaatttgttaaaaatttattgtattcatgcggatgcacagaatgtacaagtaaaatgaaaaaatttcagcaaagtgctgcacgcacccgctcgccatcgtagcggccaagctttacccgcacgatctgcccgctctcgcagccgggggcagagaccaccaccggaatgtacagccgggtgtagccggtgaacagcgtaccggacaggggcgtttccagcagcacctcatcctcggtgccctcaaaggcggccagtgcctcgcagcgcacctgctcggctacggcgttcatgcggcggctgcgctcctgcttttcccgctcgtggatctgatccgggaaatcataagccggggtgccgctgcggcgggagtaggggaacacatgcactttaaggaaaccgatctttttcaaaaatgcgcagctctcctcaaagtcctctgtcgtctcgccggggaagccgcagatgcagtcggtggtaaagctgaccgggcggctgccgtaggcggcgcggatctgctccaccacctgtgcgtactcctgcgcggtgtacacccggcgcatccggcgcagggtggcggtgcagccgctctgcaaactcaggtggaactgggggcaaagcttgtccaccgctgccaagcgggagatgaattccggggtgagcatatcggggtcaaggctgcccagacgaatgcgctcgatgcccggcacctgtgcgcatttttccaccagctccacaaggttcgtgccggtgtccagcccgtagctgggcagggagatggcgctgagcaccacctcgcggtagcccgcagcggccagctggtgcagctcggccagaatgctctcctcggcgcggctgcgcaccggcccgcgggcgcgggggatgacgcagtaggcgcactgccggttgcagccgtcctctaccttgataaaggcgcgggtgtgggtctcgaaccgctccaccggcagctcctcgaactgctcgccgcgctggtgcggggcaatggctacgatgcgctcgtggccgtccagcagcttttgtacgttctccaagatggccttgcggtcgccgttgccgcacacaaggtcggcttccatgaactgtgcggcctcctccgggaaagcctgcgggtagcagccggtcagcaccgtcaccgcacccggattttcgcgctttttgcggcgcagccacttgcggctcttctggtcgccgaagttggtcacggtacagctgttcacaatgaacacatccgctgcttcgccttcctgcgcaatggtaaagccgttggcgcggaacaactgttccagcgcgccggtctcgttcaggttgaccttgcagcccaaggtataaaaacaaactcgcatggggaacgatcctttcgataaaaacgggggtgttttgcatttcttctcattatataacagaagcccaccggggtgcaagactgtttttgcacggagacaccggtcttttgcagtgcgtcaaaacaaaaagggacgcgaaaaatctcgcgtcccaaagctgcaggaaggaatgacgagccgttagctgtttttcagggtaacgaacagataatcggtctccttgccgtccagtgtatcggtcttgcgctcaatgaaatcgacctcgtacatagacaggggaagctgacgtctcacaaaagcgttgatggcgttctcctgggcgtccggcttcaggctggccacgacagaaaactgcttggtgtccagagccttctggatatctttaccgatcacggtagcagagaaccggacgggcagcatgagctgaccggagcagccggtgaacagggcggcacctgcaacagcagcagcggacagaccggcgatctttataaagttacggcgagaaagattcataatgagaccctccttgtgattgcatgattgtatgaaactgggcttgctcccttctgggaacagttcaattttacaagttttgccgtgaaaagtcaagggacaggtaccaaagttaacagaaaacgaacacaatgtgaaaaatagtacggcaaaattgacgagcggcatgcctgaaaagaccactgcatacagtagcagcaagagacttcgcacggggagggacggaaatggaacggagaaatctggcgctgctgtgcgcgggggtggtctgcttctggctgtttgcgctggccttcggcacggcacagggcaaggggctgcgcatccagccggtggtgcaggcacaggcagaaccggcagtgcagaccctgacggtcaccccgccgcagcttaccctgccctgccgcgcggcgatcctcatcgaccagaccagcggcgcggtgctttacgagatgaatgccgaccagaccatgcccatcgcctccattaccaaggtgatgaccctgctgctcacctttgaggcggtgcacgccgggcggctgaccatggataccgccgtgccggtcagtgaacacgcctaccatatgggcggcagccaaatctggctggagcccggggagcagttcacgctggacgagatgctcaaggccatctgtgtgtcctctgccaacgatgcagcagtggcggtggcagagcttgtgggcggcagcgagcctgcctttgtgcagcagatgaacgcccgcgccgcagagctgggcatggagcacaccaccttccgcaacgcctgcgggctggacacagaagggcatctttccaccgcacgggatgtagccatcatgagccgcaccatcctgaacacctgcccggaggtgctgcactataccggcatctggacggacaccctgcggggcgggcagacccagctggtgaacaccaataagctgctgcggcggtacaacggcattaccgggcttaagaccggcaccaccggcggagcgggcgtgtgcattaccgccagcgccacccgggacgggctgaacctcatcgcggtggtgctgggtgcaccctccagcaaggaacggttcgaagccgccaccaccctgctggactacggctttgcggcctaccgcgccgcaccggtgcccctgccgcaggagcgcccgctgcaattaaaggtaaagggcagcaccgaggagaccgtgccgctggattacgccgcgctgcccgccaccgcgttgctgcccgccgaaagcgccggtcagctgaccgtgcagctggaactgcccgacacgctggaagccccggtgacccggggacagacggtaggcaaggcgcagctgctgtgcggcgaagcagtacagggagagtacccggtgtgcgccgccgccgatgcgccccgcatggagtttggcaccgcgttgcagctgctgtgggacagcctgcggggaacagcagcctgaccctgtgccgaaaaaggcgcttcagcgcataaaagcgcgctggacgcccggcggggctgttggatacctgaacaaatctggatgaagaaacaaaaaaacactattaaaattgtatgaaatctaaggaatttgaccttgactttacccggagggaacggtacacttataccaagatatttcctcgcagggcaaaggcccggcagatcgtttggaggttttaataaaatgagtgtcgcactgaacacgaaacacctctccagcttcatcagcgaagaggaatatgcagctatctacccgcaggtagaagccgcccacaagcagctggaagccaagaacggccccggcagcgattttctgggctggatgaccctgccccgggattatgacaaggaagagttcgcccgcatcaaggcagccgctgccaagatccgcgaggactccgacgttctggtcgtggccggtatcggcggcagctatctgggcgcacgcgctgttgtggaggccgttaagggtatgtaccacaacgagctggaggatggtctgaagatctacttctgcggcaacagcatcagccccacctacttgaacaatatcatcagcctgtgcaagggcaagcgcttctccatcaacgtcatctccaagtccggcaccaccaccgagacctctctggccttccgtgtgctgcgcgagctgctggaaaaggagatgggcgtggaggaagccaacaagcgcatctacgccactaccgaccgtgccaagggcactttgaagcagctggctgacgcacagggctggcctacctttgtagttcccgatgacgtgggcggccgctactccgtgctgagcgccgtgggtctgctgcccatcgccgctgccggcatcgacattgacgctctgatgcagggcgctgccgatgctatggagcgcttctccgtgctgagccccgacaacgatgcttataagtacgccgccatccgcaacatcctgtaccgcaagggcaaggctgtggagattttggagtgctacgagccggacttcaccctgatgaacgagtggtacaagcagctgttcggcgagagcgagggcaaggacaacaagggtctgttccccgcaagctgcatcttctccaccgacctgcactccatgggtcagttcattcaggaaggtgcccgcatcatgttcgagaccatcgtggacgtgaagaagcccgcacaggatctgttcatcgacccgctggagggcaattttgacggtctgaacttccttgcaaaccagaacatgagtgtggtcaaccgcaaggctatggaaggcaccattctggcacacaccgatggcggtgtgcccgaggtgctgatcgaggtggacgacctgtctgcttataatgtgggctacctgatctacttcttctggcgtgcctgcgcctgcagcggctatctgctgagcgtgaaccccttcaaccagcccggcgtggaaagctacaagaagaatatgtttgccctgctgggcaagcccggctatgagggcctgaccgcagagctggaagcaaagctgaagtaaaagctgaacgtaaaaatgatctcccgccgcaaggcgtggaaaatacaggaggactgaactatgattaaactgattgttggtaccaagggctccggcaagaccaaggctatgatcgaccagatcaacgacgcggtcaagacctccaaaggcaatgttgttgttgtggaaaagggcatgaagctcacctacgacatcgctcctgcagcacgtctgatcgatctggacgagtacaagatctccggcggcgaaatgctgtacggctttgtggccggcctgatggcaagcaactacgacatcaccgacctgtacattgacggcatcctgaaggtgctggaccacgatatcaaccgtctgggcgttgtgctggacgagatggcagccattgccggcgacagcgtgaaggtcaccgtgaccgtcagcgcagacgaggccgcactgccccacgatgtgaagaagtacctgtgatctgataaaagaacagggctaaaggcttttccaacaggcagaagaccggagaaaaataaattttttcggttttctgcctgttttggtgttgacaaagggttgctttggcgctatactaacaaagcagccttttcagaggtgtactatgcaatttgacctgagaaagtttatcacagccggcgcaaaaccgtaccatgcagagtttcagtgtgatttatctgcgtacgattatgccggtgcaaggatcccgcagccggtcacagccgtctttgacgcgcagaccgatggcgacgaggttcagataacgttgcgggcaaaggcatcggtgcacggagagtgcgcccgctgtctggacccggtcatccgggaagagacagtcgatacggagtggatcgtcaaggagcgggatctggatgacccggatttcgatcttccgctggacgaaaaaggacacttggacgtggacgaatggctcaatcaggagtttatgttccagatccctacggtgctgctttgcagccccgactgcgccgggctttgcccgcagtgcggtaagaaaaaggcggaatgcacctgcccaccggcagagcagaccgatgcccccgtagacactaggctcgcgatccttaaatcactgctgaacagataaacccatcaaggaggtgcaaaaatatggcagtacctaagagacatctttccaaggcccgccgcgacaagcgtcgcagcaatgtttggaagctggaggcccccgcactggtgaagtgcagcaactgcggctctctgaagctcccccaccaggcatgtggcaactgcggttactacaagggcgaggaagtcatcaagaaggcctaatttgcgcgtaattggtggcataatggtgttatgtacagaaggggagggcgcaaagccttccccttcttgtgctttaaaggaggtggatgcagatggcgatccggatcgagcaggtggatgccggcagcgaggccgaggctcttggccttgcccctggcgacgagctgctgagcgtggacgacaacgagctgaacgacacgctggactacgatttttataccgacagcagcagcttccacctgaaagcccgggtagcggacggcatccgggagtgggaggtgcagcggccgcagcgcggcccctttggctgcgggttcaagacctatctgggcgatgcaaagcattcctgctccaaccactgcatgttctgcttcatcgaccagctgcccccgggcatgcgcgagagcctgtatttcaaggatgatgacgagcgactgagctttttgttcggtaactacatcaccatgaccaatatgcaggatcacgagatcgaccgcatcatcaagatgcacatctcgcctatcaatatctcggtgcacaccaccaacccccagctgcgggtgcggatgctggccaataagcgcggcggcgaggtgctcaagtacctgccccgtctggtggagggcggcattgccgtcaactgtcagctggtgctctgccgcggcgtgaacgacggcgacgagctgcgccgcacccttgccgacctgctggagctgacccccatggtgcaaagcattgcagccgtaccctgcggtattacggattatcgcaaaaatctgtacccgcaggtgccctacgatgcaaaaaccagcgccgaggtcatcgacattatggaagaattcggtgatgaatgcaagcgccgccacggcaagcgcatcatctaccccagcgatgaatggtacctcaaggcaggccgccccatccctgcggcggcgttctacgaggactacgaccagctggaaaacggcgtgggcatgatgcgcctgtttgaggaagaatttctggccgagctggacaagccccaccgcatctacggcaccaaggaactggacgtggtcaccggcaccatggcagcgcccctcatcacccgcatgatggaggagctgcaccggcaataccccatgatcactgtgcacgtccacaccatccagaaccgctttttcggcggcaatgtgggtgtgaccggcctgattaccgccaccgatatcatcgcccagtgcgatggcaagcttgccacaaaaacgctgggcatcccggctgtgatgctgcgggaggaaaaagataccttcttggatgatatcacggtggagcagctgggacagcagctgggcgtaaaagtggaggtgctgcccacggcaggtggggacgaagcccgcgccttgttgcgcagcggcctgcacattgcccgcagaaggaagagcggcagctgataacgccatttttattgtattttaccccttttaagaaaggaggagaccccatgagcaaaccgatcgtagcagtggtgggacgccccaacgtgggcaaatccaccctgttcaataagctgtgcggccagcgccttgccattgtggaggataccccgggcattacccgcgaccgcatttttgccaactgcgagtggaacggccacgagtttttgctggtggacaccggcggcatcgagcccaaggccaccgagggcattctggcccacatgcgcgagcaggcgcagatcgccattgacaccgccgactgcatcatcatggtcacggacgtgcgcaacggcctgaccgcagccgacgaggacgtggcacacatgctgcgccgcagccataagcccatcattcttgccgtgaacaagtgcgacaaggtgggcgaggctcccatggagctgtacgagttctacaacctcggctttgacgaggtgatgcccatttcttccgtgcacggtcacggtacgggcgatctgctggatgcagtgtgcgcccatctggacttcagcgagactgtggtggaggaggaccgtatccccgttgccatcatcggccgccccaacgtgggcaagtccagcctgaccaaccgcattctgggcgagaaccgcatgatcgtggccaacgaggccggcaccacccgtgatgccatcgacaccccggtggacaacgcctacggcaagttcatctttaccgataccgccggtctgcgcaagcgcagcaacatcagcgatggtctggagcgctacatggtggtgcgcgcactggccgctgtggagcgcagccgcgtggcactgatccttgtggatgccactgttggctttaccgagcaggacagcaaggtggcaggctacgcccacgagcagggcaaggcctgcatcatcgtggtgaacaagtgggatgccgtggaaggcaaggagaccaacaccatggaactgcagcgccgcggctatgccgagtgcttcagctttatgggctatgcacccattatcttcatctctgcccagaccggctacaacgtgaacaagctgatgcagctgatccgggatgtggatgccgagaacggtgcccgcgtgcccaccggcgtgctgaacgagatgcttgcccgcgctactgcccggatgcagccccccagcgacaagggccgccgcctgaagatctactacctgacacaggcttccacccgtccccccacgttcgtggccttcgtgaacgcaaagcacctgttccacttcagctatcagcggtatctcatcaaccagatccgcgaaaactttggtctggagcatacgcccatccgtctggtcgtgcgggagcgcggctccggcgaggtgggtgccaaggacgtataacacgtcagggaggctcagatgatgaaatctgttctcatcgctgcggtgtccgctgtacaggcgtatctgctgggcagcatcgacaccggtatcctcgtcagcaagtttttgtaccacgatgacgtacgcaagtacggcagcggcgctgcaggcatgaccaatatgctgcgcaccttcggcaaaaaggcggcggcacttaccgcttttggtgatgtgctcaagggtgtgctggccgtgtgcatcggccgctggctgttcaccctgatgccggaaagcaccacgctctcgccctatcttgcggtgtatctggctgcgatctttgccattatcggccatttgaagcccctgtatttcggcttcaagggcggcaaaggcgtgctggtggcgggcggcactattctggccatccagccggtgctgatcccttttctggcggtcatctttctggcctgcctgctgcccaccggcatggtgtcactgggcagcgtgaccatggcagcactctacccggtgctcaccatcctgtacggggtgttccggggctattctgccgccgaccttaccgtgtgcaccatcggctcggtgattatggccgcaatggtcatttatatgcaccgctccaatatccagcgcatccgcgagggcaaggagtaccgctttggccgtcacggcaaaaagtaacagaaaatagtaaaccaccccgcagcagccgttcaccggccgctgcggggtggtttttgtatatgcttattcctttgtctcggtctcttcctcaggctttgcttcggaatgccgccgacggaaccagtcggcggggatgccgctctgggcgggggtaagatccggcgcaggatgaccgtccggcaggtgtgcgccaaaggccgggacaaagaagaacttgcgcacaatgaagatcagcgcaatcgcgccaacgctgagcaggttctccacggcggaatcgtgtcccaccaccagatggcgggcaatggcgtacagcagcacctcaaggctgctgccggggctgtgcttggccagcatcttgatgaactcaatgccgatcacaatgtccaagctgcgctccagaaaggtgcggatctctgcctcgttgccatcgaacagcaggccgggcatccagcggatcaggggcacaacgctgagcagcagaccaatcagcaccagcccggataacagcacttccagcagactggaagcctgaataatgcggttgcgcagggaggtacgccagtggctttctaccgggtgagagggatgttccatagtaagaccttcctttcggcattctgctgcataaagatcgacaaaatcctgcctttattgtagcagacgagagaaggtctgtcaatttcaatccacgatggtgacggtggtctgcgggccgacggccacatagccggactttttgatgcagtcctgcccggcgtcggtatccagccagtcgtacagacggcgctccgggctgtcggcggcggcatctgggtggatgacggcgtagaaatcgttgcacagggggtagctgccgtcggcaagagtgtcgttgctgggggtcacaccgtccaccgccagcagccgcagcccgggcttggaatacatctggtcgatgtagtaatacacggagaaaccgatggcgttggcgctgttgttgtaatcggcaatgctgtccaccagctcgcccatggcggcaggtgccagctcagagggtggggtcatcaactctccgccctgaatgagcagctttttgaacagggtctggctgccggagtcctcgccgcgctggaaggcaacgatttcctgatccttgccgcctacatccttccagttggtgatcttcccggcgtagatgtcccgcagctgctgctggctaagcgcctgcaccgggttgtcctcgttgacgatgaacaccagcgcgtccaccccgatgggtttctgctccagctccacattggccttttgcagctcttcctttacatagtccggcgcttcgtacaccaccagcatccgggtggtggtgtcgtacaggccaaagttttcccatgcgtaggcggtggtgcttaccgtaatgctgctgcgggcttcctccaagtccatgccggtggtatcggccagcatctgcgccatcagcggaatgcaggcggtgctgccgtccagcgggggaaactccgcttcggtcaggaacggctcaggctgctgcacagtcgaggacgctgcagaggacgcgggcggctctgcggcagaggaagcggtgctgccggagggcgcatccgtgcccttgcaggcggtcagcaccccggcggcggagcaggcagctagccccagcagaaaactgcggcgggaaattttagcgtttttcataagaaagccctcctaactcaatagccataactcggtacatcgtccgcagtggcagacgagaaaatgctctggcagtacagccagttgccgctcgtgtccatccagcccacatagaagccccgctgtgcggcaaacacatggtcgggcagggcattcagactgttggaatagtacccggtgcagctggaaagtccctgcagcaccaccttgccgtctgcattcagcacatcgcatacgctgccgtaggcgctgcccgcagcggcgcggctgccgtagaacatgggtctgccgtcggggtcggtggtcaggtagttgacgtaactgtacttgccctgcagggcggtcaggtcgctgacaagcccctgcgggccgtacagccgggtggcggtggtctcgtagcggtcgttatcctgcaattccagccagacgtagccggtgccgcagttgctcatccgtactcgctgctggtgctccaccggttctacggtggtgtcggtcagcagcttgccgttgtccttactgtacacccgcagactgccgtccagcgcgtagacggctacggtgttgtcggtggcgtccacatcgtacagcggggtctttgcgcctgtctccaaatcatagagttcgtagccatggccctcgccgctgtgccatgttaccacatagcccgggaaatactggctgggctgctcgtcaaaggtggagatcagtccgcggtcctctgtggtcatgtcccgcagttcgtaccggccgtcactggtggaaaagctggcaagaccacccggatagacctgcaaaaagcccgtgtactgctcgccggtctgggtgttgtacaggatttggtcggtggtttcctctccggtggcaacgtccagcttcacccagtcgctcagggtgtcgctgtcgtagaaaaggcggtatgccgaggcggcctcggcgcggtagacgggggtgccgtccttctcctgcaccaccacccagcggttctgctggtagtcggtatcccagtcgtaatcgtccagtccctccgggcgggcgtagcagctgaacaccagcttatcgccgcatagggtgcagctgtatgcaccttccggtaccggcagcgctgcgccggtggcaaggtcgatgacctgacaggtgccataaccggactccgggacgtatccgccatcgatcaggcggctctcctgcagcaccagcaggccgttttgcagggtggcgctctgctcgccctcaaaggacattacttcggtgccggtcttgtcgtacagggcggtgcggcgtccgccccggccggtggggtcggaccaactgcgcagccagtagtctgcggtgccggtgacactgtcctccaccagcgagacgttctcactgcgggtagactggtgcagcggggtgctgccgcacaggatggtggtgctgcttccggaacggctgtcgcagtacagcacccgcaaacggctatcgttcagcacggcagggtcgtacaggggtttgccgttgtcgtccgtaggtaccgaaaccgcagagcttgcagcgcccggcacgccggtggcgggcggcagcagggtacagccgcagcctaaagtaagggcaagggcagtgcagactgccccgcagccgatacgcaagacaacacgcttcataaaaaccactcctttgcaaaaaacagggaggaaattttttccgttcactcagaatacgaaacagccgcatttttcattgcagaacttgcagaaaaatgcggctaaaaacggttacaattgcattacagctgcgccggggcatgggacgcttctgccttgtccatctgctccagctgccgcagaaaggccagcaaaaagggtagagaaatgaagcaggtgagcgtatccgcaatgggctggcaaagctccacgcccacaagccccagcacccggggaagtacaagaatcaacgggataaagcacacgccctgccggcagcaggccagaaaggtggcacgcccggccttgcccacgctctggaaggtcatgttggtcaccacgatcaccggctgcagaaggatggcaaagcactggtagcggaaggcgggcagcgccacagcggtgaccgccgggtcatcccggaacaggcggatcaggttttcatcgttccaccagcacaccgcgatcagcaccaccagcagcgcaaaggcggctttcagggtaaagacggcggcctgccgcactcggtggtatttgcgggcgccgtagttgaaggacgccaccggctgcaagccctgtcccacgccgatggccactgagaggatgaacataaaaatgcgggacacaatgctcatgcccgccacggcggcatcgccgtagctgcgggcggcaatgttcagcagcatcccgccgatgctgttcagcccctgacggccaaagctgggcgcgccgcctgcaaggatctgcaaaaactcgcgcggctcccgggtgacggcagaaagccggaactggctgaccgttttgccccgcaggaacatatacagcagaatgccaaagctgatggtctgactgagggcagtggcgatcccggcaccggcagtgcccagccctaaagcgaacatgaacagcgggtccagtgcaatgttcagcagtccgccggtgaccagcccgaccatggcaaggtttgctttgccctcataccgcaggatgttgttcatcaccagactggagatcatcagcggtgcggcaagcaggatgggccgggcgtaggcgcaggcgtggggcagaatggttttggtactgcccagcagcatcataaagtccggcagggtggcaaggccgaccaccgccagcactacgccaaaggccagcgccgtaaaaaagctggtggaagcaaagcgggtggcggcgtgggtatcctgactgcccaagcggcggctgatgatggtgccggagccgtgccccagcataaagcccagcgcctgaatgatggccatcaggctggaaacgacacccaccgcgccggaagcgctggtggagatgcgccctacaaaaaaggtatcggccagattgtagatgctggtgatcagcatactcaaaatcgtgggcgcggcaaggctgaggatcagccgggggatcggagtctcggtcattttatgatactgcaccgcagtgcggtcctgctgggtcatgggaaaatatcctccttcaaaaacgagaaagccgccccttccagagcggcagatagtcctgatgaaaacagtataacgcagttgcgacaaaatgtcgagagggagtaaaaacggcctttcgcccctgcgaaggggcgaaaaagcaggcgaaaacaggatggattctatataaagtgctaaagaattgtcgaattgcttgtgaaaaatcacgatatgtggtattctttataagaaggaattggaaaaatctgtgcattttatgattgggagggatttgtacatgaaatccgtagcacaaactgtgatcgaggccgaccgcttttataccattgccgctcacaccggcaatgtcattcaggcagtggagggcagcaaggacggcggcactgtccgtctgggcaagtatgaccacaagcccgaacaggagtggagctttgtccgcgagggcgatggtgtgtaccgcatccgcaaccgtgcctccggcaagctgctggatctgaccatgaccggcactgccaacggcacatggctgcacctgtgggaggacgtgggcggcacgtcccagatgtggaaggtggagcacaccccggagggcaccgtgcgtctgcgctcttcttgggcaggcggcaagtgcgtggacaccgtgggcattggcgccgaggtgggcgctgtgctgcagatctggcaggaggtgcccggcggtggtgaccagctgtgggtcatctctgaggtaaaggaccgcgtaaagcgtgccgccaaggttgaacaagcagcacccgctgccgagacgaaggccgcaccggccaaggaagccgctcccgccaagaagcccgcagcccgcaagccccgcaccgccaagaaggtggaggagaagcccgctgctcccaccgcaaaggctgcagagccggtcaaggcagaaaagcccgctgcaaagaaggctgctaaggcaaaggctgagcctgctgctcccgcagtagaggtgaaggcagctcccgccgtggcaaccaaggccgagcctgttactaaggctgaaccggctgccaaggcagcgcccgcagcggaagccaagactgcccctgccgccgcaaagcccaaggcaaagcgtgcatcctgcaaaaagaccgtaaagaagtaaaaaaacttttaaacagcaaaaaaatcggacagaccgcagtctgtccgattttttgcgtttatagaagctttttatgcagcaggggcggcagcatcatcgctctgggcagcggtctgcacgaactgcacgatgctctcgatggtcttgcgcagctgcacaaggctttccacgtcagagtcctgcatccgggaagtaggggcggtcaccacggtctgggaggcagtcaccgtgccggaaagttctgcatggatgtggtgggcgggcacgtccagcaggatgtgcaccttgggggacagggtcttgagcagaccctgcttttcgatgccaagaatcagctgcggcgcgtcctccccggcggcgaggttcggcagctgaaggtagaggtaaccctccttggcgttggcgggctgcacggttttgagctgtttcaagtccagctggaagtcgttcacctgctgcaagccggtggcggcggggtctacccccagcagggtggccagctggtcttgggagatatagctgcccagcgaccagcccggtagcagcaggcttgccagcggatactcggctacaactgtgctgcgcagcttgttgtacagctgcccggcgtcgtacagggtctcttcctcgctgatgtacatccgggtcagaggggcatcgttgacggtgctggtgcccgtcgggtacagcgccagctgcactgcccggggggtgtactggccggtcaggctgccggtggtgccgccgaacttgtccagcagggcgtaaagagcagggggttcggcctcggtggaggtgatggtgtagtccagtgcaaagctggcaccgctctggaatgccttgaccttgcggctgaccaagctgtacagcactgccgcagccaccgcgcacaccagaaccagacacagcagaacaattagcgccgcccgcagaccggtgcgctttttgtgggaagatgccatgggaaacctctccttccggtaaaacgtatttgcttcagcataacggaactgcccgcaaatgtcaagcgccgcaaactgcggacaaaacaaaaaacctgaaacatttctgtttcaggtttctggcggaaagatggggattcgaaccccagaacgcttttgacacgttacacgatttccagtcgtgcgccttagaccaactcagccatctttccacatcttttgttctgcctttgggcgggtgcccttggcgctccactataatacctgaaagcaggctttttgtcaaggatttttttgaaaaaaatcagacttttttaaaaatgacgaaaaaacgcgagaaagtattctgccgcatggatggaaagcacaaaaagcccttgacgcacctttaaaataggtctatattgagggcaaagagcactgcggtgggtcattttgtgccgcagcggcgggaaatataaggaggatgcttttatgacttatcctgaagtacttgccaatgcccgtacctgcattggtcaatactgcaaggcctgcccggtgtgcaacggcgtggcctgtaaaaaccagatccccggtccgggtgccaagggtgtgggcgataccgctatccgcaattataataagtgggcagatatccgggtgaacatggacaccctgtgccccggcggtgcaccggacaccacgctggagctgttcggcaaaagcttccgctatcccttctttgcgggccctgtgggtgcagtgaacctgcactactccgatacctacaccgatatgacttataatgatgtgctggtgcgcgcctgcgcagaaaacggcattgctgcctttactggcgacggcaccaaccccaccgtgatggagatggctacccgcgccattggcgctgcgggcggctgcggcgtgcccaccatcaagccgtggaacattgataccatccgggaaaagatggcacaggccaaggccagcggctgttttgccgtagctatggacgtggatgcagcgggtctgcccttcctgaagaacatgaccccgcccgccggcagcaagagtgtggaggaactggccgagatcgtgcagctggcggagcgtcccttcatcgtcaagggcgtgatgaccgttaagggcgcactgaaggcaaagcaggccggtgccgccgccatcgtggtgtccaaccacggcggccgcgtgctggatcagtgccctgccaccgccgaggtgctgccggagatcgccgcagccctcaagggcaccggcgtgaaggtgctggtggacggcggcatccgcaccggtgtggatgtgttcaaggcgctggcactgggcgcagacggcgttctgatctgccgccccttcgtgaccgctgtctacggcggcggcgcagagggcgtaaagtgctacatcgacaagctggccggggaactggccgacaccatgcagatgtgcggtgcccatacgctggcggagatcaccccggatatggtgcgggtctgatttttctgcgtagagaacgattttaatggcctccgccttgctctggccatattcagcggaaagaatcttatttatagaacaatgccgggcagactgcggtctgcccggcat

SEQ ID NO: 13743 - DNA, 40432 bp, Unknown
  gut microbiota DNA sequence
gtaaggcgggaattgtgcggtgttgccctaagccttttcacccgcccatgggctggtagcgggtaagcaccgtgtgcagccccagctcccgggcgcgcgccagtaagtaccggtagcggcacaaaagcgcctgccgctcgtagatgcgctgctcgatcaggtccgtatccacctccatgtcaaacatcatctcgttgcgcttcaaacagaacaggcattccttcagctcctcctccagctccgggtggtagcgctcgtgctcggtatcccgcgggacgcggggcgaaagcagggtctgggcattctgtgtggttcgttccggcataggcatcctccttctggtgctttgtaaggttttgtaccttccagtataggcggtgcggtgcgcagaacctgccgaagcgtggcagcgctccggcatagattatccggcgctgctgcggcattttccaaaaaagtacaacttttttcaaaaatatgcttgacaactccgggcttttcccgtataatagcacacgttgagcggctcaccccgcaaaacgcaacagaatattggggatttgcatagtggtagtgcggtagactctgactctacttgtgggagttcgattctctcatccccaaccagaacaaagccatctgaggaaactcgggtggcttttctgtttgtatgattccgcgcggaaaaactattatagatagagcgaacccggaaagtccgcaggactttccgggttcgccttttcacgggaaatataaatttacagaatggtgatgcggcctgcgccgtagggctgctcgtagttgagcaggtagccggggtatgcggccagcgggctattggcgctggacaggtgcggcagacccgcagcatctgcgccgtcaaaggtcatggcgtaggtagacatcaccagataatcctcggacacatagtccttgatcagctctgcgccgtcaaacatggcaaagccatcgcccagattgcgcagggtgtagttcatgccggccagtgcgtaagtagcgcccgggtccagcggcagatagctgccggaagccttatcgtagatcttcacgttctgcacgcgcggggtgccggtggcgctgccgatccagacgttcttctcgtcggtctgcacagtgttggggatatcggtgtggatctcgtaggtagcaccggccacctgcaggaagccgccgttctccttgccgtcctcgcctgcaaagcgggctgcaaactccaatgcgtcctggatctgcttgccggtaaccgacatcaggcaggccacgttgccaaaggggctgacctgcttgcaggtcttgaaggtccagtcgcctgcgggcacatcggcgcggatgccgccgccattcatgatggccacatcacagtgcagcttttccacctcgttgaagtaggtgtagatgccgtcagccacaaagtcgccgaggtttgtctcggcagagcggatgcggcgcttgccggtggcggggtcagagacgtagaaatcgctgtcgcccacagcaatcttctcgcccagcatatcgtccacggtgttcacccagctggtctgcatggcggcgatgcctgcgtccatgccctcgtgggtgggaatgagtttggtggtaatggtgccgtccgcagcgatggtcatctcgccaacgttggcaaagtaagaaccggtctgggtcagggtgacagccttgccggaggcatcctgcacctgcttgttctccattacggtatgggagtggccatcgataaaggcgtcaaagccgctggtgtgggcaatgacttcctcactggtccacggagaggaagaggggtctacgcccagatggcccagaccgatgaccacatccgccagaagctttgccttatcaatggccttctgcacggcgtcatagagctttttgccatcctcaccaccctgaatatcgtagatgtacttgcgctgtgccttatccataaagtaggccggggtggacttggtaaaggtctcgggggtggtcacgcccacaaaggcgatgcgtctgccgccgcgcacgaacaccttgacggagggcaacacccgcagcgtagtgcgcaggtctacccagttgcaggacaggtacgggaagtccgcttccttcatgatggccttggcacggtccataccgtagtcaaactcgtggttgccgggggtggcgacatcgtaaccggcagcgttcatcagcttgatgatggaagcaccctcgtccatggagccgtaggcagtgccctgcacatggtcgcctgcatccaccagcagcacatccttgccggcgttctgatagctctgcttcaggtcggcaatggcagcgtaggtcagcttggggctctgcttgtcgatgtaggtatggacatcgttggtgtacaggatggtaacgtcagacttgtcaccataccagcaggccgatgcggcaggcgcaccgatggccatggatgcagcggcagcggtcacaccagcagcctttaaaaagctgcgacgggaaataagttgtttcacaggaaaacgacctccttttatttttggcgtatcgcatttgggcaggctcttccctcctgccctttcaatagctctagcatagcacagaacgccgccgcaaacaagccaaaatcatccttttggcacaaattattttcacgttccgctttattttgacgcatattgtaccatttttacacaaaaaagacctccctgtgccctgtcgcagagcagcggagaggtcttttttaggggggtgttgacccgttgccggatctatcggaggagagggaaatatcagatagcgttatactccttgaggaacttctcaaggtcggtgccctcgatcttcttcaaggcttccttcaaagccagacgcgggatcagcggcagatccatgtcggtgatcttcttgccgtcgcgcagcttcacggtggcatcgatcagggcgcgcacatcgtaggtgctgccccagacctcgggcacgccgcggtcaatattcagcagggtgtacacggcctccataccggtgcgcatggagtactcggtggtgaagatggtatcgcgggcggtctcggcaaactgaccgaggaaggcaaagttcaccgcgccctcgggcacaacatcggggcggtcgcccatggcacggggcatgaagaaagcgtcgatatagggcatcatcacaggcacggtgttggcgctgtgctctgccagttccgcgatctgatcctcgggcacaccgatgtggtacagccactccatgcagatctcgcggccggtgcagtcgcgcatgggcttcttgacgtaatcgccgggcttatcgctgaacaggccgtacacccagacgcacagctggttcttgggctgatccttgaactgctgctgacggttcagcgtccagctgagcagccagctggagtccttgacggtgacgatgccaccggtgacggtatggccgctgaaggggtcgcgcttgcagatcttgcggatatactgagggatcttgtcgtccagcgtggtgatggtggcgctctcccagttgctcagttccggctcggagcagaacttctccgggtgaccgaaggagggatcctgtgcggcgatcttcttccacagatcccagccgttgccgggctggatggtggggtcaaagccggtggccttatcctgtgcacccacggtgcagctttccacgcagccgccgttggtgatgaacagcagatcgttctcggtcagatcaatgttggtggtctcgccctcgtgctccacggtaacagagcttgccagcttgcggcccttctggatatcgaacttcacatccgtgaccttggtgttgtagtggaactgcacgccaaagccttccagatagcgcaccatgggcaggatgatggattcgtactgattataacgggtaaagcgcagggcggtaaagtccggcagaccgccgatgtggtggatatagcgcttgaggtacagcttcatctccagtgcgctgtgccagttctcgaaggcgaacatggtgcgccagtacatccagaagttggtgttgagcacctcgtcatcgaagaaatcggtgatctttttatcctgcagctgctcgtccggggtgaagaacagcttcatgatctccatggcacccttatcggacaggccgaacttaccatcggtgtgggcatcctcgccgcggttgacggtggcacggcacaaggaaaagttgggatcctccttgttcagccagtaatactcgtccagcacgctggcaccctcggtctccagagacgggatggagtgcagcatatcccacataacttcgaagtggttatccatctcgcggccgccgcgcatcacatagccgatatcgtacttgtagccatcgcaggcaccgccggccagtgcgttcttttcaaacacatggacgtgctcgcccttcatctggccatcgcgcaccagatagcaggcagcggtcagcgcagccagaccggagccgatgatataagcggatttatgatccacgccctccggctttttggggtgtgcaaaagcttcataattgccactggaatagtacataaaaaagcctccctgcttccatattttcgtttcacagccttcatcgtgctgttctctatggcaacagtataccccgcaaagtgaaccggaacaacaaacaaactttgcccggtgtatagtttttttacatccgcccttatttgctggaattgcgtacaaattgtgacataaagcgcagcgcaaaatcatttaaaacgctccctcaaaagtgcaatgccgggcagcccgcaggctgcccggcattgcactaattcaaaataattttccgctattcatgcccagagcatagcggcgggcattcaaaatcgtccccgcgcaaaaagagagccgccacacaaggttctgtgcagcggctctccggtggattttagttcatctgttccagagcctttttcaggttctttgcaatctggtccgggcagctggtgctgcggaagccgcacagcgtgccgtccagacgggcaatggcatcctctgccttcatgccggtaagcagctggcagatgcccttcaggttgccgttgcagccgccgatgacctcgatggaagaaatggtgtggtcatcgttcagcacaaagttggtctgcttggagcaggtacccttgttcgggaaagaaaattccttgctcatggtctttacgtcctctctcttttacgtttttcggcgatggcgcgcagctgcgctgcggcttcgtctggtgcggtgcaggtgccgatggggtgggggtgcttgtggttgcggccatggaagtccgtgcccgcagtagccacaaggccgtactgtttgcacagggcaaggcactcggcgctgtcctccgggctgttgctggggtggtacacctctatgccgtccactgcgccctctgccgccagttcgcgcagcaggggcatacttttatacaccgtggggtgggcaaacgccaccgcgccgccgcttgccttggcggtagccagcacctgccgcaccggcagatactccggcgaatgcagcacgataccccgggggttccacccgaacagcttgtggtaggtctcgccgtagatgctgccatcggtcagacccagcagttccagtgcctgcatcagcccgcttttgaacagcaccccgctggccttagtggtctcccatgcaaggtcggtggtaaactgcgggtacagctgctccagctcctttgcgctctgcaaagcgcaggcgttgcggcgctccttcatgatggcgcaatgctcgcgcagcgccgggcagtcaatgtccgggtagtagcacagcagatgcacccggtgctggcgctcaaagtcgtagccggtcagctccacggcggggatcagctctaccccgtcctgcccggtgtgggcataggcgtactgggcgctgagcagggtgtcgtggtccgaaagggcgatggcgtgcagcccggtgcgggcggcgatgggtgccagccactcaatgggcacagcaccgtcggagcaggtggaatggatatgcaggtcacaggacatagcgggttacttccttagtgcttatagaaattgatcaggcagccgtcggccaggatctggcgctcgtcggtggtgagcggagccatgtacagctcaaactccttgacggtatcgcccagaacataggccttgatgttctgcaggtcgcccttgagtgcctcccgcacattggggatgagcacataatcccccagaccaaagggggtggcacctgccagctgcaggggcagcatgccccagttgatcaggttggagcggtaacgcttagtagcgtactcggtaacgatattggcaccggcacccagcacacgctggcagctggcggcctgctcacgggcagagccgtcgccgggcttgaccgcaaagatggtagaggcgatctggatatcgttccagctcagcttctcgcagccgggcacggcgttcacctttgccagcagagcagcgtcccctgcaccggcgcggcgggcgttttcttcggcctgcacagccttggcgcggcccacatactccgggtccttgcggctgagggtgaactcagccagacccaaggggttggaacggtaagaggacgtctcaccggaggggatcagctcatcggtggtggtgacggggtctgtgatataagaagccaccttcagcagcagattgtcgcccagcggtgcgatctccggccagtccttgatgttggggccaaatttgagcagggcatcgtaatcgcccttgccaaagccctgatacacgcgggtgtcgtagctggaagcatcgtactggtactccggcacggtgggatcataatcaatgtcggtggcgggggtcagaatgccgccgtttgcggtggtggctgcaatgctgcgggcatccatcagtgccacaccggccagctggccgctgccgggcttggagccctcgcggctggggaagttgcgggtggtgtgacggatggacagtgcgccgttggcgggcacatcgcctgcgccgaagcaggggccgcagaaggcggtgcggatggtagcaccgctggccatcaactcgccgatgacgccggtgcgcaccagttccatcatgatgggctggctgccggggtaaacgctcagggcgtagtcgccgcagccgccggtatgacccttgaggatggaagcagcctcgtagatgctgtcgtacagaccgcctgcgcagcctgcaatgacgccctgatccacacgcagcttgccgttttcgatcttgctgcacagatccagctgcacgtccttgcggccgatcagcttctgcacatcctgttcgcaggcgtggaggatgtcctccaggtttgcgttcagctcctcaatggtaaaggcattggaggggtgcatgggcagggcgatcatgggacggatggcagaaagatccacctccaccacgccatcgtagtaggcaaggtcagccggtgtcagctttttatagtctgctgcacggccatgcactgccagaaaacgctgagtgacttcgtcggtctcccagatggaggacagacaggtggtctcggtggtcatggcatcaatggcgttgcgggtatcctgccgcagggaggcaatgccggggcccacgaactccatgaccttgtttttgacgtagccgctcttgaacagcttgcccacaagggcaatggctacatcgtgggggccgcagcccgccggcagactgccggtcaggtagatggccaccacgcccgggcgggcaacatcataggtgcggcccagcagctgctttgccagttcgccgccgccttcaccgatagccatggtgcccagtgcgccgtagcgtgtgtgggagtccgagccaaggatcattttgccgcagccggcaaagcgctcgcgcatatactggtggatgactgccatgtgcgggggcacaaagataccgccgtactttttggcagcggacaggccaaagcggtggtcgtcctcgttgatggtgccgcccacagcgcacaggctgttgtggcagttggtaagcacataaggaatgggaaacttttccagcccggaagcacgggcggtctggatgatgcccacaaaggtgatgtcatggcttgccatggcatcaaacttgatcttcaggttctcggcatcgccgctggtgttgtgtgcctgcataatattgtaggccatggtaccggtcttagccgcggcaacggcagcggcatcaaagccctttgctgccagtgctgcgggtgcattgccatctgcgggcacccactctccgcgcgcatagtacgcaccgccagtgctgcatttgatcatatccaacatctcgattcgcctctctttttgtattttcccgcccgccgcaattgcgggcattgccccggcagtgcggctattcatcccgaaaacagccgtccccttagccttcaccccttgggggggaagccattaagcaaaccagcttttcaaagacttataacccctgccctgttacggcaaaagccgtatttaatttttattatagcatgaaagggcgaaaagaaaaagcattttttatgaacccttactgcacctttgcggcggcttcctgctgcttttccttttgcagtctgcggaacaccacaaaataggccgggatcaggaagaagcaggcaaagagccatgccaccgggcttgcgatgcaggcggcaaagtagccccacagcggcacgaaccagaagcccaccatggcgcgggcgatcatctcggccacaccggcaaacatggcaaggccggagtgtcccagaccctgaatggtgtagcggtagatgataagcactgccagcgggatgtagaacacactgttccagaagatgaagtcctgcgcattggccataatggcggtctcgcctgcatccagaaacaggccgatcaggggcttgtccagcacgcgcaggatgaggaaggaggccacgctgtacacgcagccgatgcccagtgcggtgttcacgccgcggttcacgcggcccagatccttcgcgcccatattctggctggtgtaggtggtcatggcggtgccgatgctctccagcggcacgctgaggaactgcgcagccttgccgccggcggtctgcgcggctacgatatcgctgcccagaccgttcaccgcgccctgcagcaccacgctgccgatggcagtaatactgcactgcagacccatggggaggcccatggcgcaaagctttgcgcagtgcggagcgctgatgcgcccttcttccttattccagcgcagttccgggtagtggcgcatgatgtaaataaggctgccgatgcctgccacagcctgactgaacacggtggcaaaagccgcgccgaacacgcccatgttgaacaggatgatgcaggcaaggtccagcccgatgttcagcacgctggccaccagcaggaaatacagcgggcgcttgctgtcgcccagtgcacgcatcagggcgctggtcacattataaagcagcgtgaaggggatgcctgcaaaaatggtgcggatatagatatccgcaaggtcgatgatgtcagccggggtgttcgtccacaccagcaccagatgggtcattgccaccgtaacgatggtaagcaccgtggcaaaggcgatggacagccacacggtattggcggtgtagcggcgcatctcgtggtggtcgtgggcaccgaaggtccatgagatggggatggaaaagccgcaggcaatgccgttgacaaagcccagcaccagatagttcaggccgcccacgctgcctaccgctgccagcgcttccacgcccacgaaccgccccacgatgatggtatcggccagattgtagaactgctggaacaggctgcccagcatcagcggcacagcaaaggcaagcagcagcttcagcgggctgccctgcgtcatatctttggtcatggaaatatacctcctgcccacacaaaaaagatggatgttcgcatttttgccgtgaaaaacgccctgccggaaaagcggcaggacgttgataaagattcatgagtggtattatagcggagcagcgccggttttacaagacttggtttgcatcaacatttccatttttttgcccaaagaattggtgattttgctcattccgcgtagtgtgccaagaactgtttggtgcgctgttcccgcgggtggtcgatcagctgctttgcagggccttcctccaccaccacgccgccgtccataaacaggatgcggtcggccacatcccgggcaaagtgcatctcgtgggtcacgatgatcatggtggtcttgcggtcggccagttcccgcagcacccgcagcacctcgccggtcagttccgggtcaagggcgctggtgggctcgtcgaagcagaggatgtccgggtgcagcgccagcgcccgggcaatggccacccgctgctgctgcccgccggaaagctggtgcgggtagcggtctgcccgctccgaaagccccatctgcgccagcagttcccgcgcctgctgttccagctgggcgtgcatcgcctttttgttggcgcggtagtccggacgctcctttgccagcagctcccctgccagcatcacgttctgcaaggcggtatactgcgggaagaggttgaagttctggaacaccagcccgaagtgcagtcgctttttgcggatctctctctcccgctgggtggcggggtcggcggcgtcccacatggtctcgccgttcacccggatgcagccggtgtccggccgctccagaaagttcaggcagcgcagcagggtggtcttgccggagccggacgagccgatgatggccagcgcctcgccctgctctaaggtaagagaaatgtcctttaagacctttgtatctccgaaatttttgccaatgccggaggcctccagtaatgccatattcttaaaaacctcctcagcagcggaaataatccagtttcttttcagcccagttgaacagcagggtgagcgcacctacgaacacaaggaagaacagcgccgtggagaacagcggccagatcagaccttttgcgctgtactccttggccatcatgatgatctccttgttggcaatggtgttcgccagcgaggtgtccttgacaagggtgatgatctcgttgcccatgggcggcaggatgcgcttgaccacctgcaaaagggtgaccttaaaaaagatctgcgtgcgggtcatgcccagcacctgcccggcctcggtctgccctttaggcaccgcctcgatgccgccgcggtagatctcggaaaaatagcaggcgtagttgatggcaaaggccaccaccgccgccaccatgcgtccgccggagccggagggccacgggttattcatgcccagcaggccggggcccagataaatgacgatgatctgcagcatcagcggcgtaccgcggatgacccagacaaaggtctttaccgcaccggacagcagcctgcaccggctcatggagccaaaggccaccaccagccccagcggcagcgcaaacagcagcgtaagggcaaacaactcacagttgagcaggaacgcgccggaaaggcgcccaaggatcacagacacaaaaacacacccatctatcgttttgttttacgcacggctcagtcggccagcgccagctcgtacttctcggccagtgcctgcatggtgccgtcagccttcatcgcgtcaaaggcggcgtccactgcggcggcggcatcactgcccttgcggaaggccacgccgtactcctcggcattcagctcgtccacgatcttcaggcttgcatagtcggtgccttccccgatcatggcgttggcaagggtcagatccagcacagcggcatctgccgtaccggcagccacttccatcaggcagtcggtctgcacgctcttggaaacgtagtctgccttggcaaggttctcgtcgccctgaatggcagcctcaccggcagaacctgcctcagccaccacggtcttaccggcaaggtcggcggtggaggtgtaggcggtgctctccttgaccaccacgacctgtgcgttcttggcgtaggccttggtggtggcggtgttggccatgatatcctcggtcagggtcatgccgttccagatgcagtcgatgctcttggcgtccagctccaccaccttggtgtcccagttgatctctacaaactccggctctacgcccagctttgcacacaccgcagtggcaagttcggtatcaaagccggtaaagttgccgtcggcgtcggtgtagttcatgggctcgtacacggtgtagccgatgaccattttgcccttgcccttgatgtagtccagatcgctgcccgctgcggaagaagtcgaaccggctgcgctgccggaagcagacgccgccgcagaggtggatgcactgccgccgcaggctgcaaggctcagtgccagagcaccggccagaaatgcacttgcaatacgcttgagcttcatatctttttcctcccatgggggacgttctgcgtcccgcttccctcttgattcaccgttttaccatgctaaagtggtaaactgtggttatagaatagcgcgtttgtcgccgttttgcaagaggaaacctttattttttgcacaatgcactgctttgccccgcccgtaagcccgctttttgtgggaaagtgtgcacataccccttccggctttgcgcctgagggggtatccataaaaaatccccccgcactttttgtgcagagggacatcctgtttttatgattactgctccgccatggccttcagcgccgctttttgcaggtcggtaactgagatggtgcacagcgccttcaggtcggcatccgtgccgtctgcggagagcttgccgatctccacggcgtttttgcccttcagatagccgcaccagcctgcgctgtgctcgtaccattccttgcctaacgcgcttgcgctgcgcattccgtaacggtcgcccagctcgtttttggtgtacaccggctcccgcggggcagacacagtaccatccgcgctgacggtcagctccggctcggtcatatcgccgatagcgctggtcacccgggcgttctcgtccatggtcaccaccgccagcgtgatcttagcctgcacctgtgcgtccttgtcgtctgtgcccgtaagcccctgcggcatttctgccacctctacgcccagtttgaccgtatcgccccgggcagcacccagcacctgcgcattctcgcaggcgcggacgatggcatcccggtagcggtccaccgcaatggtgcagccggacaaaaggtctgcatcggtaggcttgccgtctgcatccgttttcagctttttcacctcgtccggggtcttgcctttaagccaatcgccaaaggcatcggcctgctctgcccagccttttttcaggccggacacctctgccagcgggtagtctttccccttctggcgcttggtacgggtgtcggtgggggtggtcaccttgccggtgccgtccgcgctgactgaaagctccagctcatccagtgtcaccccggccagcttaccgtccgcgtccagcagcacggcagccgccaccgtgcggatattccctacacggtctgtgccggccgcttcggtcaggacccccagcccggtgcgccacgctgcgccttgcgccgcgctgctgcccgcagaggtactgccgctcatagtaccggagctgctgccggaacttcccccgccacagccggtcaatgtcagtgctgccgccagcgtacagcacaaaaaccatcgcgatgcctgtttcatatcgtcacatacgctccctttccgtgcctgcattgcagatgcaggctttggagctagtgtgccccgccgcgcgggattttatgagcagacagttacatcaaaggacttaacagccgcagcacgctgtccagcaccgtacccaccagaccggtgcggcagtccgcgcactgcacctcccggcactggggcagggtgcggcgcacatcgtcccgcagggtcagcacctggctgttttgcagcagcagcaccccgcactcgaagtgcagaaacatactgcggtagtccatattgatgctgcccaccaccgccgcgcggtcatcgctgacgcagcacttggcgtggagaaagcccggggtgtactcgtagatacgcacccccgcccgcagcaggggcagatagtacgagcggctcagccggaacaccagctttttgtccgggatgcccggcagcaccagccgcacatccaccccgcgcttggcggcgttgcgcagcgcgtccagcatctcctcgccgatggcgagatagggcgtataaaaataaacgtactgctgtgcttgtgccagaatatccagatagaccgtttctgccaccggctcttcgtccagcgggctgtctgcgtagggctgtactactccatcgctggcgggcagcaccgcaagctgcggacggaaggcgctgtaatcctgctcaaagggccggaaggcgttccagaaatccagaaacattacggtaaagttccacaccgcagtgccctcgatgcgcaggcccgcgtccttccagtagccgaagcgggtgatcgcgttgatatattcgtctgccagattgatgccgccggtgtaggctactttgccgtctatcaccacgatcttgcggtggtcgcggtggttcatcaccagcgagagcagcggcaccaccgggttaaaggggatgcagcggatatgcgcccgctccatgcgcaccacaaagtccttgggcagacccagcaggctgccgaagtcatcgtagatcagccgcacgtccaccccctgcgccgctttgcgccgcagaatgtcctccacgccctgccacatcttgccctgactgatgataaaaaactccagaaagatgctcttctctgccttttcaaggtcggccagcaatgccgggtacatggcctcaccgcaggaaaaataccgggcggtggtgttcttccatgcaggatagcagccgtattgggtcaggtagcggctcacgccccggttttcatcgcacagcccggcggtctgtccgggctgctgggcgcggtctgcccggtgcgcctgctccaccgcctgcattttgctgcgcagacggcgggagggccgcttgttgccaaaggccagatacagtgccccgcccagcagcggcaacagcccgatgagggcgatccaacccaccttataggcgctgttttcatccttgcgcaccagatacagaatgatcagcaggcttaacccgttgagcaccccggtgacccacacccgcgccgtgccggtggtgagggcaaaaaacacccacgccagccatgcaagctgcagcgccaccagcaccaccgtaaccgtgatgcggttgaggatgcggttgaaaaatttgacgatcggcaatcggaacagcataccatctcccctttccgtgtttctaatacggttaagtataacgcggtttttccccctttgcaagcttttggtgtcgggtacaccggcgtgccggccgcctttattccttataaaaaagttcaccggagcgtccgcagatgccccggtgaatcgaaatcatagtatcatattttccgctcagacggtgggtgcttcgttatcctcgtagcccaccatcaggccgccgtactccgcgtagtagctgcacagcgcgccgcagctgcctacctccaccttggcctccgggaacaccgcatggaccatgtgcttcagccgctccgcagcggcagcattgcagcagtggtcgatgtgcacccggccgttggtcaggccgtgcgccttcatttccagcaccatgcgctccagtgcgccgtgctcgccgcgggtcttgcaaagaacctccagatcaccggcatcgctggcctgcccgataacccggatacccagcatccgcgccacagcagccacagcgggcttcacgcggccattgcgtgcaaggtttgccagagattccagtgcaaacagcagatgggtgtgctcatggtacgcccggatctcctcacatacggtatcaaagggcttgccggccttgatcagcgccgccaaacgctccaccagcagccgggactccgcaccagtagacaggctgtccagcacaaagacccgcgcgccctcgtggctctgctcgtactcctcgcccgccagcagtgcagcgttataggcaccggacagcgtaccggtaatggttacaacatacacctcgtctgcgccctcgtaggcggtgagccagtccgagatattggggcaggaggtgctggtgcgtcccttataggtgcgcatcatctcggccagtgcgggggcgtcgatctctgcggtgtccacatactcctgctcgtcggtcaggatcttcagcggcacacaggcaaaccccacatcggggagctcgtacacatttgcagaggaatctacaacgattttgcttttcatatttttctccattttcaagcggcgcacgccgcagtcattcctttgtccgtgaccatcatatcagtttttcaaaaccctgtcaactgttttctcaaattcttttacaaagttttcattgcccgttgaccaattttccaaaatgcggtatactatttcacaggcagaagtacttttgcggaaagcaattgctctgcctttgcacaaaaacaacgttcctgcttgcaaaaagtgcaggagcatgaacggaacaagatactatgaaagctgaaaccaaactccgcgttgcggcgtgtgctgcgggctttgccctgccccggtacaacgatcttccctcggtagggctgtatctggaccagacggtgcagttcgtcaacggctacttccgcagcttctgcggggtagaactgaccccgtccatggtaagcaattatgtcaaaaaaggggtggtggatcaccccatccgcaaaaaatacacccgggatcagatcgcatccctgatgtacattgcagtctccaagaccgtgctctcgatcgaaaacatcgacactctgttcaaaatgcagcgggagcactgctccgccgggacagcctacgatatcttctgcgaggagttagagactagtctttccgtggtgttcggcggcaagacagcccagccggagactacgctcaacgacgagcgtctgctgctgcgcagcaccatttttgccgcggtcaacaaaatatatctggactgctgctttgatgccttgcggcaggagcaggctctgtggtcggatatcctgccggatctggcgtaacagaatagcagatatagcaaaagccacctgaaaaacgtaagttttcaggtggcttttatgttggtggaggcgatgggagtcgaacccatgtccgaaaagagctcagtgtaggtgtctccgggtgcaggcgatctacaacattcccgccgcgccacgccgatcgtcaggctagcgctttggtagcttcatgagttcctgccggtccgcaaagcttaggtccgttcaggtgctgtgtctaaaggacgccccgaccccacacgacacaagagtgggcggaacgcgcagcactcaggctgcgagcaactgataattattgttgtcagttaatttttttggaggagttatagagcagttcccccactgctacccgctgcccagaccttgctccccccgtcgaaacctttacgcccccatataaagcacatcttgcgatgtgcggaaagcttggttttctgcggtgagccgcagtctgcaattggaatgcttaataatacttgccgttggacttcacagcccggtcaatggagcgctttgcatcgcgctgggcggcatcggcacgcttgtcgtacagctttttgcccttgcacaggcccacttccatttttacgcggccatgcttgaaataaagcgagagcggcaccagcgtatagccctgcagtttgcactgctggtgcagacgccgaatctcacttttgtgtgccagaagccgccggacacgcataggatcctgattgaacaggttgccgtggtcgtaagggctgatgtgcattccctttaccagcagctcgccattttcaatatctacccagctgtccttcaggttgaccccgccggcccgcaggcttttcacctcggtgcctttgagctccacaccggtctccagcgcttccagaacaaaatattcgtggcgcgcttcgcggttggtggcgatgctcttggtcgccgggcgctcctttgtgggtgccatgctgcgcgcctcctttctccgttccgtttgttgtttcagtataccattttttcagggtaatgcaagggctgtttctgacagaattgtaaatttttacaaactcacagctctccccggccggaaagtgcccggtacagggtagtctcgtccgcatattccaggctggcgcccaccggcagaccggaggccagccgggtgacccggatgcccagcggcttgatgagctttgccagatacatggcggtagcctcgccctccacggtggggttcatggccatgatgacctccttcaccgtgtcgtccttcagccgcgccagcagctccttgacggtcaactgctctacgcccacaccggccagcgggtccagcagaccatgcagcacatggtacaggccgttatactcccgggtgcgctcaaaagcctgcacgtcccggggcttttccaccacgcagatcaccgaggtgtcccgcttggcgctggcgcacaccgggcacaggtcagcgtccgtaaagttctggcagatgcggcaccggtgcagccgggtgtgcgcaccgcggatggcatcggccagcgccgcagcgtccttatccgacatactcagcacctgataggccatgcgggtagcgcccttgcggcccacgccctgaaacttgccgaactcttcgatcagcttttccagcggtgcggcagtgtagtccatggtatctccccttcccggctcagagacccggaatgttcaggccgccggtcagcttgcccatctcggcctcggcggtctcatccacctgcttcacggtggcgttgatggcagcagccaccatgtcttccagcatctcgatgtcgtccgggtccacagcctcgggcttgatggtgatggacagcacctcatgcttgccgttcatctttacggtcaccatctcaccggcggcgctgccggtgtactcggcggcttccaactcggcctgcttgctcttcatgtcctcctgcatcttctgagcctgacgcatcagggcgttcatatcggggcggccgtagcctgcgggcattcttgctttcataatggtattctcctttattataaacaatttttatcgctttttgcgggcggtatcctcaatgctgacctctaaccccagcttttccagcgccagaagggactgctccgcgttggaggcggtctttccggccgttttgggctcgtaggggccgatgggcaccggcacgccggatacctcggcgatcagctttttgatcagcttctggctgtccttgttcacccggataaaatcccggaaagtcttgccgccatcgatcagcacgcgggtgccgtcaaagtaagccttggacttgcgcagatacatatacagcatggggtcgatgccttccagcttctgcacgatctgcccccagtacgggaaggggttcgtgccctgctgcgccacgctgcggggctttgtcagcaccgggtcggcagggtgctcctgcaccggggcaggcgatttctctgctgccggggcaggctgcacaggctctgcaggggcaggctgctccggctgactgaccggctccggctcctccggcggcggtgcctgcggggcaggctcgtcccacggcagggcggcatcgctctgctgtaccggcggttcctctggcatgggcggcagctcgtccgcaggggcgggcgttgcttccggtgcggcaggctgcggggacacctcctgcgcagcaggggcaggttctgttcctgctgccggggtctggggtgcagttgctgccggtgcgggctgcaccggggcgctggcaaagggctgcaccgctgccgcaaagggacggggtgcttccgactgtgccgtgcgggcaggggctgcctgtaccgttaccgcctgcatctgctggggcggctcggacaggctgaacagtgccagttccagctcgatgcgctggtcgctgccacgggtcatgtgctccagcgccgtgcccaaagtgcggatggcgcggatggcttctcgctgccccatctccgggcctttttgcaggtacagcgcctcttcctccggcgatacaccggacagcagcgcctgcccgccgggcagcgctgccagcatcagagcgcggtagtgagcaatcaattcctcggtcaggcgcttcacgtccaccgactgctgccgcagctgcgccagctgtgccagcgcggcggcggcgtcctgtgcttccagagcgtccgaaatttggaacaggtagctgcggtcggtcacacccgccatgcggcgcaccacgtccgcgtcgatctttgcagtgacgccggcgcaggtatccagaatggacagtgcatcgcgcagcgcaccatcggccagacgggcgatcagctctgcgccgtcggaggtcagctccagcttttcttccccggcgatatactccacccgccgggcgatatcctccggcccgatgcgggtaaaatcgtaccgctggcagcgggagaggatggtggcgggcactttctggatctcggtggtcgccagaatgaagatgacatgtgcgggcggctcttccagcgttttcagcagcgcattaaaggccgctgtggacagcatgtgcacctcgtcgatgatatacaccttatactgacaggcgctgggggtgtaggcggtctcgtcccgcaggtcgcggatatcgtccacgccgttgttggaggctgcgtccatctccaccacgtccagcaggctgccgttgtcgatgcccttgcagatctcgcactccccgcaggggtcgccatttaccgggtgcaggcagttgaccgccttggcaaaaattttggcgcaggtggtcttgccggtgccgcgcacgccggtaaacagatacgcatggcccacgcgccctgcggtgatctggtttttcagggcggtcacaatggcacgctggcccaccacatcctcaaaccgctggggtctccatttgcggtaaagcgcacgatacatggcgatctctctcctttcccggcctttgcggcaaaaataaaaggacagcgctcgacggggttttgtccccgccttgcgtaactcggcatacggatgcaggcttactgaaacgcacgaacgcactgcttaaggctgcttggttccccacctgacctggttcacagcgagcccatcgtacaggacccgcatccgtatgccgaaccacgcagcaggcgctgtccgacacatccttgtggatgctaagatattgtaccataaaccccgccggattgcaagagggggcaaaacaaaaaggagaagcccgaaggcttctcctcgtttgtgctaaaactgtttaagactggcaagcggtgatcaggctcatcttgtacacctcgtctgcattgcagccgcgggacaggtcgttgatgggtgcgttcagaccctgcaggatggggccgtaggcagcgtagccgcccagacgctgtgcgatcttatagccgatgttgccggcctcgatgcaggggaagatgaaggtgttggcctgaccagccaccttgctgcccttgcacttgacctgtgcgacctcgggagcaacggctgcgtcaaactgcagctcgccgtccacagccagctcgggatccatctcctgtgccttgatggtagcatcgtggctcagtgccacggtgccgcccttgccggagcccttggtggagaagctcagcacagccaccttcgggtcgatgccgaacagctttgcggtgcgggcagtctccacagccacctctgccagcttggaagcggcagagatcttgacctcgccggtagccttatcgacggtatcggtgtaatcaatgttgacggcgcagtcgcccatggcaatgcgcttcaggccctcttcgccgcagtcgcggtccagaataaagcaagagctcaccagatgtgcgcccttcttggtcttgaccagctgcagagcgggacggatggtgtcggcggtggagtaggtagcgccgcccagcaggcagtctgccttgcccatcttcaccagcatggtgccaaagtagttggacttcttcagcagggcggtgcactcctcagcggactgcttgcccttgcgcagctccaccatggtgctgaccatctcatcaaaaccggcgtagttctccgggtcgatgatctcggcagcggaaatatcaaagttaccggcggcggcagcagccttgcactctgcctcgttgcccaccataacgaccttcagcacgccctcggccagcagcttgcttgcggcctccagaatgcgggggtcattgccctcggtgaacacgatcgtcttgggatttgccttcagctgtgctaccagcggtgcaaacatatcagccattgtgattacctccgaaaatgctttccaaaatttgcattccgtgtctgttggacacaaggatgcctttcttctttattctagcacagacggcaaaaagttcaagacaaaattgtgtttttgtgctatattttaggggagaagccgccatttgatttgtgaataaaatatcatactgattttaaaggagatgttctccatggatatggatactttaaaggccgaatgccttgcctgcacccggtgcgagctgtgcgccacccggacgaacgtggtgttcgggcagggcgtgccggacgctgaggtgctgtttgtgggcgagggccccggccagagcgaggacgagcagggtctgccctttgtggggcgcagcggccagctgctggacaaatacctgtttgccatcgaccttgaccgcaaaaagaactgctatattgccaacatcgtcaagtgccgcccgccccagaaccgcgacccgctgcccgccgagagcgaagcctgtatgccgtggctgcgggagcagttccggctgctgcatcccaagatcgtggtctgccttgggcgtgttgccgcccagcggatgatccggcaggatttttccgtcacccgggagcacggacagatcattgagaagggtggcattttgttcatgggcaccttccaccccgccgccctgctgcgccaaccccagaacaagcctgaagcctttgcggactttaccgtactgcgggacaccattgccgccgtgtgcgagcatacctatcataaataaggacaggaaccaaccgcgccgcttttgcatactgtaaagcaaaagtgaggtgtttttgtatggaaagttccgtgcatccttctgtggatttctttttgggcgctacaacgcccgccgggttcaagggctactttgcgccgctgcgccgggagcccggaatgcagctggtgctgctcaaaagcgggccgggctgcggcaagtctactttgatgaagcgtctggcgcgcgccgcacaggataagggcgaacctatccagcgcatccactgcgccagcgaccccgacagtctggacggggtggtgttcctgcggcagaaacgcgccatcatcgacgccaccgcgccccatgtggtggagccggaagcccccggcgcagacgagcgggtgttgagtttgtaccacaccattgacgccgatgccctgcacccccacaaggacgaggtgaccgccctgtttgcccgcaaccagctgctgcgcagccgggcggcgcggtatgtggcctcggcgggcagcctgctgctggacagccgccgcgccgaagcgtgcagcgccaactttgaaaaagtgcgccgctacgtcaagcggctgtgcatccgcctgttgccccgcaccgaggagatgggctctgaagagctgcggctgctctcggccatcacgcccaagggcgaggtgttctatcagggcacggtgcaggcactggcagacaaatgcatcctcttccgggacgactacggggcagtctcccgcctgctgctggaactcatccgcgccgaggcactggcgcggggctaccacatcatcacctgcccctgcgccatgcacccggaggataaaatcgaccacattatcattccctccctgcggctggcgttcctgaccgacaaccgctggcatccggtgcggctgtctgcggcgcagaccgtgcggtgcagccgctttgtggaccgggagaacctttctgcctgccgtgcacggctgcgcttcaacgagcgcgccgccgccgagctgctggaacaggcctgtgccctgatggcacaagcaaaaagctgccacgatgaactggagacctactaccgcaccgccgtggactttgcacaggtggatgccgcagccgcccagtgcatggagttgttcggggtaggataacgaaaaaacggaggtgaaacgccttggcaagcatccatctgcccatccggcagctggtggagtttttgctgcgcaccggcagcatcgacagccgctttgccggctttgaccgcgccaacgagggcgcacgcatccaccgcaagctgcaaaaggccgccggggagggctatcaggccgaggtattcctcagcgcggagcgggaagcctgcggcatcgcctttacgctggaaggccgggcagacggcattttcaccgatgaaaacggcaccgtgactattgatgagatcaagaccactaccgtcccctatgaggagatcaccgaggaactgaacccctgccactgggcgcagggcatggtatatgccgccattttcagcagccagcagggactggatgcgcttgccgtgcgtctgacctattatcaggtcgataccgaccagattcagcgctttacccggcagttcactcagcagcagctggagcagtttttgcggcagcttttaatgcagtatgccccgtgggcgcagcggcagctggactgggacacccggcgcagccaaagccttgcggcgctgcaatttccctttgcggagtaccgccccgggcagcgggcgctggcgggcgaggtgtaccgcgcctgccgcgccgggaagagcgccgaccgcaagggcggcacccgcgttttttgtcaggcccctaccggcatcggcaagaccatgagcgcgctcttccctgctttaaaagccatgggcgagggctgcggcgcaaaactgttctatctgaccgcccgcaacaccacccaagccgccgccgaggacgcagtggcgcggctgcgtgccgcacaacccggtctcgccttgcgcagcgtgaccctgaccgccaaggaaaaggcttgtctgcacccggacgccgaagggcaccccgcctgtctgccggaggtgtgcccctttgccaacggctactacgaccgccgcaaggatgcgctggcggctctgctggacggcagcggcagtttcagccgtgccgcgctggcggacaccgcccggcagttctcggtgtgtccctttgagctggggctggacttgagcgagtggtgcgatgtggtcatcggagactacaactatctgtttgaccctgtggtgcacctcaagcgctttttcgatgccgccggggactggctattcctcattgacgaggcgcacaacctgccggacagagcccgtgccatgtactcggcgcagtttgccaaaagcagcctgaccgaggcaaagcgggcgctgggcaagggcaaaagcagcctgaaaaccgcgctgaccaaggcggataaggtctttctggcggcgcgcaaagcctgcgcacaggctgcgccccgcacaggtgcagagcccgccggggagaccgagcctacgcaggtgagcctgctgcccgccgagaccgccccggattttgccttaccggagccactgtatgcccgggatggcaccgtgtttttgcagcagctgcccgccgctttgcccgctgccctgcgggcggtgcacacccctttgcaggactggctggaacaaaaccccgaggaccccgcccacgcccagctgctggaactctactttgccttgcaggatatcgcccgcgcggccgaccggtacgacagccattttgtcacccagctcaccgcccggggcagtgagttggagctgcatctgctctgcttagaccccgcgccttttgtggacgccagtctggcggcagggcgcagcgcggcgctgttcagtgccacattgaccccgcctgccttttaccgcagcgtgctgggctgcgccgatgcccgggcggtggcgctgcccagccccttcccgccggaaaatctggggctgttctgtctgccgggcatctccacccgctaccgtcagcgggaagccagtgtgcccgccgtagccgatgcgctggcggcgctggcaaagggcaagaccggcaattatctggcgtttttccccagctacgcctatttgcagcaggtgtacgaagcctttgccgcccgctggccggacatccctacccttgtgcagcagcgcagcttggacgatgccgggcgcgcggagtttctggcgcagtttgtgccccaccccgccaaaacgctgctgggttttgccgtgatgggcggcatcttcggcgagggagtagaccttgtgggtgaccggctcatcggctgtgccatcgtgggggtgggcctgccgcaggtgaacccccggcaggagatgctgcgccggtattacgaggagcagtccggctgcggcttcgactatgcctaccgctacccgggcatgaacaaggtactgcaagccgccgggcgggtggtgcgcaccccacaggacaaaggcgtggtgctgcttttggacgaccgctttgcgcagcccgacaccgcccgtctgttcccgccgcactggcagcacatccggtatctgcccggtaccgccgcgctggaagcggcgctaaaagggttctgggatgtataaaactgcaaaaggagttgttgcatcatgcgcaacaactccttttgctataaccttaatactccacgcctttccgtgcggcgatgcccttctggtaggggtggcggcggcagcacatctctgtgaggtaatctgcggcatccagcatccacccaggggctgcgtgggcggtcaggacgcactcctgcccggcggggcggtgcagcaccgcctgctgcaacagggctttatccaccatgtccagttcccacgcgctgccggcttcgtccagcaccagcatatcacagggctgcgccagcgccgccgcaaggtttttgttttgcaaatcgcgggtagcggccttttccgcctcgttcatctgaaaaacaaatttctgcccggccttgccccggtaaacgacagcgcccagctgctccagcagcgggatctcgccgctctgcccgccctttaaaaactgcacgatgaccacacgttttccgctgcccagcgcccgcagggcaagccccatggcggctgtggtcttgcccttaccatcgccgtaatacagatgcaaaaggcctaaactttccatcgtctttctcctttttggctctcccggttttgtaacaaaaggcacccgcagccctgtatgcttagcagaacggctgcggatgccttgttatttatggtttgcttttactggtacagcgggaactcccgggtcaggcgcagaacgcgctcgctgatctcgtccttcttttcctcatagtgccagatgcagtctgcaatgcagtccgcgatcacctgcatctcggctgcgcccataccgcgggtggtgacagccggggtacccagacgcacgccggaagtcacaaaggggctgcgggtctcgccggggacggtgttcttgttggcggtgatgtgcacgctgtccagacgctgctccaagtccttgccagtgcactcctcgtcccgcaggtcaatgagcatcaggtggttgtcggtgccgccggataccaacttgacgccgcgctgctgcaaagccgcagccagtgcctgtgcattttctacgatcttgcgggcatattccttgaactccggcttcagtgcctcgccaaagcagacagcttttgctgcaatcacgtgctccagcgggccgccctgcgtgccggggaacactgccgagttgatgcgcttggcaatgatggggttgttggtcaaaatcaggccgccgcgggggccgcgcagggtcttgtgagtggtggtggtcaccacatcggcgtagggtacggggctctggtgctgaccgcccgccaccagaccggcaatgtgcgccatatccaccatcaggtatgcgccgtagccgtgggcgatctcggccagtttttcaaagtcgatggcgcgggggtaggcagaagcgcccgccaccagcatcttggggcgcaccttgcgcacctgcttttccagctcagcgtagtcgatcacgccgtctgcgccgacaccgtaggagatgaagtggtagtttttaccggacatattcaccggggaaccatgggtcaggtgaccgccctgcgaaaggtccatgcccataacggtatcgcccagctccagcagggcaaaatacacggcaaggttggcctgtgcgccggaatggggctggacgttggcatactttgccccgaacagctggcaggcgcgccggatggcaatattctccacctcgtccacatagacgcagccgccgtagtagcgcttgccgggcagaccctcggcgtacttgttggtcagcacgctgcccatggctgccatcatggcgggcgaaacgatattctcgctggcgatcaattcaatattctcgcgctgacgggtcagttcccgctccatggctgcgcccagttccgggtcggctgcattgaccatgccgatggtgtccatcatatccttgtacattttacttgcccctctccacaaaatgttgcaggttctctcagcgcagcgcccgcgcggcgcttgctgctgtaagataatcatagcagaaagcggcggcggcttcaatcctcttttcgccaaaaggcttgctttttttgtctgaagtgtttattatgtttgtataaaaatgcgctgtcgattttgtatatttttcaagtatcccctttcacaggtgaagcgaggtgttttgtatgaccattgccgaggaaaaacaggcgcagcgtaccgctggccgtgccgcccgcaaggcgctggatgcgccgcagcgcgccgccgccaatgcagccctttgccgccgggtgctggaactggacgcctaccgcgccgcctgcacccttttgctctacgcagcctttgggggcgaagccgaccttgccgccgtggctgccgaagctgtccggcagggtaagacggtagcctacccggtgtgcggcgaaggcttttcccttaccgcagccgtgcctagcgcggacggctgggcgatgggacagtacggtatccgcacgcctgtgctggaacgctctgcccttttgcagccggagcagctggatctggtgctggtgccctgcaccgcctttgacgcaggctgctaccgggtaggcatgggcaagggctactacgaccgctacctgccctactgcacccgggcggtgaagatcggcattgcattggaggttcagcgcgtcccccgcgccgccgtggacgcccacgaccagcggctggacgcctttgtaacagagaggggtatctacacatggaaatgaacgatttaagctgcgcgcagtttctggcacagcttgccagcaaagcgcccacgccgggcggcggcggcacggccgcgctggtgggcgctgccggtgtggcactgggcaacatggtgggctgcctgaccaccggcaaaaaaaagtatgccgtcgtggaagcggacattcaggcactgaacgcccgggctgaagcccttcggctggagctggaagcgctggtgcaggccgatgctgacgcctttacgccgctggctgcggcctacggcctgcccaaggacaccccggagcaggccgcgcacaaggcttctgtgctggaagccgcactggacggtgcaagcgccgtgccgctgcaaattatggaaaagtgcgccgagggcatcgcgctggcggggcagtacgccgccaaaggcagcgtgctggcagtatcggacgcaggctgcgccgccgtgctgtgcaaggccgccttgcaggccgcaagcctgaatgtgtttattaacaccaagctgatggcagaccgcagccgcgcagccgcgctggacgcccgggcagacgcattgctggcagagtttgtgccccgggcagacgaaaccttcaccgccgtcagcgggaaactccgcaataaataatatcacaaatgagggaaagtatatggcaacgattttaaagggcgcgccggtggtggccgccatgaacgagcgcaacgctttgctctgcgagcagttgaaagccaagggcatcacccccacgctggccgtggtgcgggtgggtgagcgggaggatgacctctcctacgagcggggcgtaatgacccgctgcggcaaggtgggcgtcgccgtccggcagttcgtgctgcctgccgatgccacgcaggagcagctgctccgggtactggacgaggtgaacacagacgacagcatccacggctgtcttttgttccgtcccctgcccaagcagttcgatgaccgcaccgtccgcgccgccctgcgcccggaaaaggacatcgacggcattacggacggttcgctggccggggtgttcaccaacaccgatctgggctatgctccctgcaccgcgcaggcctgcatggaaattttgaagtattacaacgtccccctttccggcaagcgtgccgtggtggtggggcgcagccttgtggtgggcaagcccgctgccatgatgctggaccgggaaaacgccaccgtcaccctgtgcaactcccgcacccggaatctgccggaagtgtgccggcaggccgacatcgtggtggtggccatgggcaaaatggcggctgtgggcgcggactgcctgcgggcaggccagacggtcgtggacgtaggcatccatgtaaacgaggagggcaagctgtgcggtgacgtgcagtttgacgccgcagagccggtggtggacgccatcacccctgtgcccggcggcgtaggcaccgtgaccacctcggtgctggtaggccatgtggtgcaggcggcgtgcaaaaaagccggagtagaatgctgagaagatcattttaagacagagcaagcccggaaagtccgcagactttccgggcttgcatttttacgggcggaattgtaacgggtatcagccccgcacaaggagcagcagcagggccgaggccacacactgcaggatcagccagcgggctaccacctgctcatcactccagcccttgcgcttgcgcacatggtcgtggagaggggtcagggtgtttttcaagatccagatgtgcagaaaacgcttcaggctgatcttcagaatgcccaaactgccatctgcgatgaacacgatagccgccagcaggaaggcgaaggggtggccgcacttgagcgacagcatggcgatgaaaaagcccatggcgcggctgccggcatcgcccatcagcaggctggagggcttggcattcaaccacaggtaggccagcagcgcaccgatgaacaccacaccagccgtagcatacgcacccagttcggtcttataagccagcaggtaggtgccaatggtaaccactgccagactggcggaaaggccgtccacaccatcggtgcagttgaccacgttgatgcttgcccagatcaggatgacgatgagcagcaggtacactgcatacggcagggtgaagctccactgcaaaaagtgtacgccgcagccattgaagttcaggtaggtgacgcccgccagcaccgcgatgacaaaatcgatgatgccttttttgtactcattccaggcggtttcggcggcatcgtccagataaccggagagcatggaggcgatcagcagcacattgtacaccacatactctgtgttgaagggcaaaaacgccagcgacaccagtgcgatgcacagcacaaagatcaatccggagcctcgcgccttgcccttggaaagctcgccgttcaccgcaaaggcgcggccgtgatcgtggggcagtttatcgcggaaaatggaatctgtcagggcggtcagggcaaatgccagcaaaaatgccatggcatccacgccccgctgcccgatgacagaggtcagcatttggatcataagataacattcctctttctttctgtatagtacgttgtgagtgtatcacgccctagaccaaaaatcaatcccggcggcaaaattcactttggattgacttttctcccgcagctctctataataatgtattagtctgtaattttcacccacaacgcaggaggttccatgtccattacacttgagcagctctctgcccggatgcggcagggcgagcaggtgccgctgcgccacaccgcacaggtggcgctgacgctgagcatcccttccattttgcagcagatcgtggttaccgccatggagtacatcgatgccgccatggtggggcatatcggcgccgccgcaacagcctccattggcatcgtcagctccagcacatggctgctgcacgggatgctggccgggctgtgcatggcgttttccattcaggtggcacagtatctgggcgcagaccgtcagcaggacgcccgtggcgttttgcggcagtccatgctgttcaatctggcggtgggtctggcggcagcggcctttggcgtgggcatcagccggtttctgcccgggtggctgggcgcagacacggcactgcaggcaaacgcttcggcctattttgccatctggtcggcttccctgccctttatcatggctatgggcacctatgccgccatgttgcgctctacgggtgatgcgcttaccccgggcctcatcagcatcttcacctgcgtactggacatcatcttcaactttttcctcatcaaccccacccgggaaatgacggtgttcggtcaaaacctcacggtttggggtctgggatggggcgtgccgggcgcagcgctgggcacagcccttgccaatgcagtgggcggcacgctggcgttgggcgttctgctgctgagggatggcccgctgtgcatccgcaagcccggctcgtggcacattacccgcgcctgcctgcataacgtgtggaaggtaggcgcgccgctggcggcagagcgcgccgccctgtcctcggcacaggtgctgctggtgcgcatcgtgtccgggctgggcactaccgccattgccgccaacagtctgggggtcagcgccgagagcctgtgctacatggcgggctacggcattcaggacgccgcccttgcgctggtgggacaggccgtgggcgcaaaccgccgggacatggccaagcgctttgcatggctgtgcaccgccatgggcatgggcatcatggcgcttaccggcgtggggctgtatgtgtttgccccgcagctgatgggcatcttcaccgccgacgccgccgtcattgcactgggcgcgcgggtgctgcgcatcgaagcctttgccgagccgatgttcggggcaagcatcgtagccagcggctccatgcagggcgcgggcgacagcaccggctgctttattctgaaccttgtcagtatgtggggcgtgcggctgaccttggctgttctgctggctccccgctttgggctggtgggcgtatgggtggccatgtgcgccgagctttgcacccgcggcgcactgtttttgctgcgcatggctcggggcaaatggctggataaaggcgcgctggcgtaaagtttcttataaattcagagagccggaaagtccgcggactttccggctctctgttatctcagcagcttacttgcggccgtgcaggatgggagacaggggcttatagatcagcaggcacagcaccgcgtccagcagacccttgaccagcgtgaagggcatgttgaagatcacaaggcacttgatcaggctgtcagcagaaggcaggatggcctgatacatgcccaaaatagcttccagcggcatgtggtagaactgcacataggccgggtaggtgatgaagtagttggagggcacgctgaacacggccatgacggctgcaccggcaatggcgcccagaatagcggtcttgcggctcttgtgacgcttgtagacaaagcccgccacagcagagaacaccgcgcccagcataaagttgcacagctcgcccacgcaggcggtggaggtgcccttgatgatgatgtgcagcaggttcttcataaagctgatgaccacgccgtacaccgggcccagtgcaaaggcacccagcagggcgggcaggtcggagaagtccatcttgacaaaggacgggatgagcatcggcagcgggaactcgatgaacatcaggataaaggcgaccgcgctgagcatggcggcaacggtcaggttgtgggtggtattctttttcatggtagttgtcctccccggggtgtactccccgttcaaatttgttcggaaagcccttttcgcgctggattgaaccggaaagacaaaccaaaaagcgccctgctgcaaccaaaaactgcaacagggcgcacagacgcaatttgcctgccgtttcttgcatccggactataccgttggtcccggagttgcaccgggtcagcacccttgcgggtggtcgcggactttaccgccagtggggaattgcaccccgccctgaaacgaactttctgaccaagagtataacgcggtactgcggcgctgtcaagccccctttccaaaaagtttgcacattttttgtcaaagtgcgttttcacctttctttccttgccccgggcggcagagtatgctatcataatatgcgttgtgaaaaaacacaggaggttttccatgattttctcgatccgtaaccttggcttcgagcttggctcgctgctgttggaaggctgggcagcctttgccgcccgcgtggtgtgcgcggcgctgctgctggtgcttggctggctggcgcggcagcttttgtcccgcagggtgttccctgccctgctgcgccgcaactggcggctggccggtacgcccattctgctgcgcagctttgccgtaccgctgcagcggctcacccttgcagcgttcatctatgccgcagcggccagcctgccgtgggcaattgccggcgtaaataaatttctgctcacagtctttgagctggccgccaccttttttgtgtgtcaggggctgtacgccgccgccgatctcaccgaccttttgctggcgagctgcggcgaggaggtgcgcactaaccgcaccctgaccaccctgctgaacaaggtgtacaaagttctcatcgtggttctgggcgttatgaccatggcacaggagagcggcctgccggtgggcagcatcgtagccagtgcgggtcttgtcggtctgaccatctctctggcggcgcaggacagcgccaaaaacctgttcagcgggctggtcatcctgctggaccgccctttttccatcggcgactggatcaccgtaggcgacgtttccggcgaagtggtggacatcaacttccgctccaccaaagtccgcgcgttggataactcggtgtacatcctgaccaacagcacagtcagctctgccaccatcaacaacggcaccctgcgcaacaagcggctgtaccgcttcaccctcggggtcacctacgatacctcccgtcctcagctggaacagctgatgaccgacctgactgccatgctcaaggccagcccctacacctacgaggactcggtgctggtggagctgaacggcttcagcgcttccagcatcgacctgctggtgtccgcctacctacgcaccgccgacatgacccgctttttgcagatgcagaacgatctgaacctcgacctgatggacgtgatgcagaaaaacggcgtagacttcgccttcccctccaccaccgtgtatttggaaaagaacaactgaacttttttggagggctccttcctatgacacagcttttgctgcctattatttacttagcctttatcagtcttggcctgccggattctctgctggggtctgcatggcccaccatgtacccccagctgggcgtccccttttcctacgcgggtatcctgtccatgatcatctcgctgggcaccatcgtttccagcctgaacagcgaccggctcacccgggcgctgggcactggcagggtgaccgccctcagcgtgggcatgaccgctgcggcgctgttcggcttctcggtctccggccggttctggatgctctgcctgtgggctgtgccctacggtttgggcgcgggcagcgtggatgccgccctgaacaactacgttgccctgcattacgaaagccgccacatgagttggctgcactgtatgtggggcgtgggcaccaccatcggccctgtggtgatgggcgcggcgctttccggcgggctgggctggaacagcggctaccggtacatcgccctgttccagatcgcactttctgccgtgcttttttgcagcctgcccctgtggcataaacgccccgacgctgccccggacggtactgtgccaaaggcgctgaccctgccgcaggtgttcgcgctgccgggcgcgaaggaagtgatgctttgcttcttctgctactgtgcactggagaccaccgccggactttgggccagcagctacctgacccttgtgcggcaggtgcccgcccagacggctgccagctttgccagcctgttctatatcggcatcacggtggggcggggcgtctgcggctttttgaccttaaagctgagtgatgaccagatgatccgtctggggtttgcggtgctgggcgtgggcattgccgccctgctgctgcccggtgcgcaggtctttgcgctggcagggcttgtactggtagggctgggctgtgcgcccatctaccccagcgtcatccactccaccccggcgcatttcggcgtacagaattctcaggccgtcatcggcatccagatgagcagcgcctatgtgggcaatcttgccatgccgccgctgttcggcgtgcttgccaacaacatcaccccggcgctgttccccttctacctgctggtatttctggtgctgatggcgctgatgcaccggcagctggtgcgcaaaacggcgcacacctgaaagggtccagcctgctaaaattaaagggactgccgtacctcatttggtgcggcagtccctttgctatttattcagttatttgtaaagaactgcgttcaaaacttattgagcatctttttcagctttgccagttcctctgcatcgcgggtatcatccagcagggtgagggcatcgttgaaatagttgcggtccagataagagtgggtggcattggcgtgggcagccatagcctccagcacggcataaccggagcgcaccagcgggtgggtggcaggcacactgccgccctcggccaccagcgcaaacttgctttccgccatatcctccagcagggcgctgtaagcgttgttggggtcggtgccgtggttctgcagaccctgatacagcagctgtgccacaaaacccagcgtagaagccgtataccagttaccattgaaattattggggttcgcggccttaccggtgaccggggagttgatcttgttggtcaggtacaccaccaccagattctccacggggtcgatcatggtcaacgtaccggtccagccctgatggccaatggtattggagggtgcctgcgtaccgaaataccagcagcgctggttgtcgccctcacgccaccagcccagaccccagttggcagcgtcctccttcttgggtgcggtaaaggcgtccatcacgttgcgggagaagtagcggttctcgccgtagccgccggtcagcatgacagaggccagttttgccaactcggtagcgttggagaacaggcctgcatggccggaaataccgcccatcgcgtagtagcacttctcgtcgtgcacctggccctgaatggtggcggtgcgcacgccggtgaaggagatggcaccatcacgggtgttgccgttcagctcagtggcggcgcagtcgttggcggcaaagccgttcagcagggggttataggtggtgtgggtcagacccatggggtcccagaaggtctccttcaggaaggcgtccaaacccttgccggtgatggcttcaatagcgaaggccagcagcatatagtccacgtcggagtaaacggtcttggtgcccggcttatacatcagcggggtcttgaagatggacttgagggtcgcggcgcgggttgcagcgctgccgtcccaaccggagaagagcacgttggtggcaccgggaacggtcttttgagcgcactggtcaaaggaatcgttgtggtactgggggtctgcagggaagcctgcctgatggcgcaggatatcgcgcagggtcagttctgctttccactgcttgttgaccttcaggcccgggttctcgtagccgttgtaggtaatgtcgatggtgtcctccacaaaggcgctgcccagcaggtctaccagacggctgtccaaattggccttgccctgcgtgacgaggtactgtaatgcgtagtttgcagtgtacatcttggtgttggaggccagatcgtacagggtatcgttggtcacagccgggctgtcggtcttgggggtgccgtccggattataggagttcaccttgccccatgcgttctgatacaccagcttgccgtttttcacaatggccatctgtgcgctggggaagccgttgttcacatctgcctgaatgatctgctccaacagctccagtgcatcgcggtcgatgcccacgtcctgcaggctgccctcctgcacggtggggtagcccacccgcacggtcacctttttgccgcggggacggatgccgcccacctgaatggtgttgcggccgttgatggtctggccggaaatatccacattccacacgccgcctgccgccatggcagcggtgttgatctggcggttattgacgaacaggttaaagccggtcacgcccgcctcgggctccacgcacagcgttccctgccctgcgtagcccacaaaggtgtacatgtggttcatggccagcgtatcgtcggtgtagcccttccagttggggaacaccggctcgccctgccagccgccgctcacgctgccgcggctggtcaccttgaccgaggccgcctttttagggacgaggttcagggagttggtatcctccgctgcggcggctgcgggctcggcagcagaggctgccccggcggtgcacacgttgagcgccatcatgcccagaccggcaacgctgcccttcaggaacgttttacgggaaaatttggttgacatggtaaggtcctcccattctttttgccgcaatgcgacaatatacctgtattcgtgcttttttgtcccgcagcagcgggactgccttgtgccccgaattgtacgcgagacgaaacaaaatgtcaatcatgtttttatcttgtggcacaaagttttgcgtttctcagttttttgcctattttggcacattgttttgcgttttgtttcaaattttcatgcgttttgtatacaaccagccgcaaaaatgcgtaaaaaaagccgccgcacaaacccttgtgcagcggcttcggttcataatttttcttacaggatgcgggcgctgatagcgtttgccacctgaaacaggtccttctgcccaataaagccaaacttggcctcgtggccgtccgcaaagcagactgtcagctgggacgcctgcagcggatcgccaaaacccgccgtctgaatgccatagtgcagcaccttgcggtagggcagcacaaaaagctgctgccgcgtgcccgtgaccccctgcatatccaccatgatgatgcggtggctggtgaacaccacctgatcgcgcaccgtcttgtatgcgcccacgatctgctcgccctccagcagcagggcgttaacatttttgcagatatccttctcctgcaggcgcatgaggttctccatcggtttatcgcggaattccattgtagcgttcccctttcagcggttttatggctctattgtagcatttccgccgccggtttgcaagatgactgcccagtgcaggacaaaaagaaaagacccggaccgttcaaggttcaggtcttttggagcgggtaatgggaatcgaacccacctcctcagcttggaaggctgatatactagccgatgtactatacccgcaattgcagaaagaattataccataactttccgcaaatgtccagcatgaatttagcagctgcatagctgggcagacacaacaaaaaagcaccgcacattcctgtgcagtgcttttctttctggtggagcaatcaggagtcaaaacgaacattttggcatct

SEQ ID NO: 13744 - DNA, 1722 bp, Unknown
  gut microbiota DNA sequence
gctctccctttgggagagctggcgcgttagcgcctgagagggcgagcccgtcaccacatacagcagccattcgtcaatttcttataaaaacggcaaagccgccgcaggggaaaacgctcctgcggcggtgccgccggcaacgatgccggtgtgagaacctgcgtgtgaaagtgtgaaaacacacgcaggcgaaaatgttgcggttacttgacctccggccagttcttggacagctttgcgcgctccttgatggacaggccgaacaggttgatgaagcctgcggcatcggcctgattgtagtcctcgtcctcaccgaaggaagcggtctgctcgtcgtacaaggtgtacggagaggtgacgccggcgttgatcatgttgcccttgtagagcttcagcttcacatcgccggtcacggtcttttccagactgtcggcaaaggcatccagtgcttcgcgcagcggggtgaaccactggccgttgtacacgatatcagcgtacttctgtgccagctgtgccttgaagtgagagctttccttgtccagcgtgatggtctccagcacgtcgatggccttgtacaagatagcgccgccgggagtctcgtacacgccgcggctcttcatgcccaccagacggttctccacgatgtccagcagaccaatgccgtttgcaccgcccagcttgttcaggtactccaccagctccacagcgcccatctccttgccgtccacggcggtggggatgcccttttcaaagtggatggtcacataggtgggctcatcgggtgcctgctcggggctgacacccagttccaggaagccgggcttattgtactggggctcgttggcggggttctccagatccagaccctcgtggctcaggtgccacaggttcttgtccttggagtagttggtctcgcggttgatcttcagggggatgtggtgtgcctcggcgtagtcgatctcctcgtcacggctcttgatgtcccactcacgccacggagcgatgatggccatatccgggcacagtgccttgagggtcagctcaaaacgcacctgatcattgcccttgccggtgcagccgtggcagatggcatctgcaccctccttgatggcgatatcagccagtgccttggcgatgcacggacgtgcaaagctggtgcccagcaggtagtcctcgtacttcgcgccgaacttcagggtggggaagatgtagttctccacaaagtccttcttcaggtccagcacatacagcttggatgcgccggtagccttggccttttcttccagaccgtccagctcggtgccctgacctacgtcaccggaaacagcgatgacctcgcagttgttgtagttttccttcagccagggaatgatgatggaggtatccagaccgccggagtaagccagcacaacttttttgatgttttcctttttcatgataaacgcgctccttttaataaaaatacacttttgttctctgatgcgcatttcccttcgcatcctctgtctttcgtttgcggttgatgcttttattatacgcagcgcgggttttccgtcaatgctaaaaactgccaaacataacgcccgtttcgcttttcttttggtttaatctgtatctttatgcaaacatttttaaatatatgcgaattttatgcaatctgagtgtattttttcatggggttttggagactccctcaggcaaaaccgcttgccgtggtacccc

SEQ ID NO: 13745 - DNA, 11513 bp, Unknown
  gut microbiota DNA sequence
ccatgtagctgctggctgcggcggtgaactcacggttaatgtcaatgaacttcatgctgttaccctcttgtctttctggccttactctgttaaaatagagggcggccggggtaaggctcccggctcgccgttggttcggtgttgaagatcagttgctttggacggtggctggtcttctttttttactcttccataatcttcttgacgctctcacggagctcttccagcgtgtcgcatttctcgatgagttcgaggattgctttgagcaacgccttggttacgttcatgtcttccattcacctcactcctttctgtaaggggctttcgctctctgccttacatctacattgtacacctttttggtttacttgtcaatagttttgataaacttttttgatttactttgaaataaaagaggttgacaagtaattgattttggtgtaccctatacatgaaaggagtggatgaacacatgacagtgtcggacatcatcaaggggctgctttccatgacagggaagaagcagacagatctggctgaagtcctcggtatgagcagcaagcaggcgatgagcaacaaggtgcgcatgaaccgctggtcggcggatgaccttatcaaggcagcagaactgtgcggcggcaaggttgcaatcatcatgccggatgggcagaccatccagctgcgcaatgatgaagatgaaaaaagcccggacgcataacgtgcatccgggcaggagatggggggttacttcttgcgggacttgctcacggtctgggggatatggcgcacctctttgaccctgcgctcgatgttgggctctcgcacaatgaggtcttcgaggtcacagtccagtgcctcacagatgaggtcgaggtcgtccagatttacacgctccgcaaaatcgtggtacaactcgttgatagtctgactgcgaatccctgtgacacgagcaaggtcgctctgtgtcatccgccgttcgccaaggcgggttgacagcaaaatcctaatcatagcctttggtctcctttgttgctgattttagccgatttgtggtcggcttgtctgcattttggcaggaaactctctatttcggcaagtttttccgaaatacggaaaattctaacacaaaaaaggaaaatgcccgcacaatccaaaatggaaagtgcgggcattttttgtttgtctgatcttgcttagaacttgattaaaacttgcttaaacgcttggaatctcacaaaacaaaacgaacacgttgccgaccatttgaatggtgacctcgtgttcgttttgctcttcattggtggagattaccgggatcgaaccggtgacctcttgcatgccatgcaagcgctctcccagctgagctaaacccccagatgcttggcttcatgcctgacgacatgggttattataccagctggtgggacgcttgtcaacggttttttacaaaaatctctcctcttttttcagcggcgcagtgcacctgcaagcttttgacgctgctgcgtttttcccgggctgctctgctgcaaaaggccgcagcattacctgtcccatttgtcgcacagagcgttgatctggtcggcaaatttggccagatccttgttggcaccgccctcgttgtgctcaatgacccgcagcaggcgcttgccggcgctgagcagccgctggaacacggtagcggcgcggtttgcaccctcgcctgtcctctgctccacacggacctttgtgccctcctgcaggcagactgcaccctcggcaccgatggcccactgcgcaccattgtagggtgcacaggcggtaaagccctgctcggtcagggtgtccacaaagcggttctccacctcgtcctcgccgtggatcacgaacacccgccggggcttttccgtaaaggcgttcacccagcgcagcagaccgtccttgtccgcgtggccggacatgccggtcagctgacagatctcggcctttacctcgatgggctcaccgaacagcttaaccgagtccactccctcgatgagggtgcgccccaaggtgcccacggcctgaaagcccacgaacagaatggtacattccggccgccacaggttgtgcttgaggtggtggcggatgcgtccggcttcgcacatgccgctggcggacaggatgaccttgggcgtgcggtcggtgttgatcatgcgggagtcatcgctggtcacgctgatgcgcagccccggcacgttgatggggtcgatgcccttttccagcagcgcacgggtctgggcgtcaaagcagtcggggtctgtatcccggaagatgcgggtagcctcggtggccagcgggctgtcgatgtagaccgggaagttgccgtgtcctttgacaaggcctttttccttgatctcccgcaaaaaatacagcatctcctgcgtgcggcccaccgcaaagctgggcaccaccacgttgccgccccggtcaaaggtgcgctgcaaaatttttgccagttctgccacatagtccggccgtggggcgtggttgcggtcaccgtaggtggactccatgaacacatagtctgcctgttggatgtaggtagggtcctttatgatgggctgctccagattgccgatatcgccggagaacaccagctttgtggtggtgctgccctcggtgatccacagttcaatgctggcagagcccagcaggtgccccacgtccacgaaccgtgcctcgatgcccggggcaagctcgatacgcttgctgtactccacaccccggaacaagcggcaggcggcttcggcatcctgtatggtgtacatgggctccaccggctctgcgccggcgcgcttgcccttgcggtttttccactcggcttcaaactcctgaatatgcgccgagtcccgcagcatgatgccgcagagctccactgtggggatggtggcgtagatcctgccccggaagccattgtgcgccagcaacggcaaaagaccggtatggtcgatatgggcatgggtgatgagcacaaagtcgatctcgccgggggctacgggcaagggctggttctcgtacacatttttgccctgctccatgccgtagtcgatgaggaaacgctgccccgccgcttccagcatggtgcagctgccggtcacctcgtggttcgcgcctaaaaatgtcagcttcaatgcaaaacacctccggttcgttttatggttttagtatagcatatttttaaggtacacgccgcacaaatctgcgggaagtttacgggcataatgctgaattgcagaaaaaatttttatacaatcttgacaaaccaccctgttctgttataaacttaggattgtatgacgttcgttcgtattttatgagtctttttaaatagagaggtagaaatttatggttcgtaacgatttgcgcaacgttgccattatcgctcacgttgaccacggcaagaccaccctggtggatgccttgctgcgtcagagcggcgctttccgcgacaatcaggccgtggccgagcgcgtgatggacagcggcgatatcgagcgtgagcgcggcatcaccattctggctaagaactgctcctgcacctacaagggcgtcaagatcaacatcgtcgacaccccgggccacgccgactttggcggcgaggtggagcgcgtgctgaagatggtcaacggcgtgctgctgctggtggacgctgccgagggctgcatgccccagacccgctttgtgctgcagaaggctttgcagcagaacctgagccttgtggtggctatcaacaagatcgaccgtcccgatgcccgcatcaaggaggtcatcgacgaggtgctgtacctgctgatggacctgggcgctaccgacgaacagctggactgccccattctgttctgctgcggccgtgacggcaccgccagcctggacccggatgtgccgggcaccgacctgatccccctgttcgacaccctgctgagcaccatcaagccgcccgagggcgaccctgaagctcccttccagatgctggtctcctctgtggactacaacgagttcgtgggccgcatcggcatcggccgtatccagaacggcgttgccaaggtgggtgaggaagtggtcgtgtgcgactggcacaaccccgacctgaagatgcgcggccgtctgaccaagctgtacgacttccaggccaacggccgtcagccgtgcgacaacatcaccgcaggtgatatcgtggcattctccggtctgccggacgtgaccatcggcaacaccctgtgcagcccctccaacgtggagccgctgcccttcgtcaagatcaacgaccccaccgtggagatgaccttctcggtcaacgacagcccgctggccggccgtgagggcaagttcgtcaccagccgtcagatccgcgaccgtctgcagaaggaactgctgaaggacgtggccctgaaggtggaggactccgccaccactgattccttccgtgtcatgggccgtggtgagatgcacctgtccatcctgatcgagaccatgcgccgcgagggctacgagctgcaggtttctcccccgcacgttctgaccaaggtcatcgacggcaagacctacgagcctatggagcacgttgtcatcgacgtgcccacccagtatcagggtgccgtcatgaccggtctgggccagcgcaaggccatcctgcagcagatggagtccctgggctctgaccgtgtgcgtctggagttccggatgcccagccgcggcctgttcggctaccgcaaccagttcctgaccgatacccacggcgagggcatcatcaaccagatctttgacggctacgatgtctgggctggcatgatcgccaaccgctccaccggttctctggtcagctttgagaccggcgaggccgtcacctacggcctgttcaacgctcagcagcgcggcaccctgctggtgggccccggcgaaaaggtgtacgagggcatggtcatcggctacaccgcttccggcgaggatgtggacgtgaacgtctgcaagaccaagcacctgaccaacacccgttcttccggctccgacgacgctctgcgcctgatccccatcagcaagctgagcctggagggctgcctggagttcctggcacaggacgagctgctggaggtcaccccggagaatctgcgcatccgcaagcagatcctgaaccacgaccagcgcatgaaggccaagagcaagctgaagtaatttcaaaaaagcatccttttatagcagcgcagaagcacctacgggcgtttctgcgctatttttttcatgtttagcaaatcacccccatgttttttgcaaaaaaggcttgcaaaagcgcggtgactgcggtataatatttctcgcagtcactgatatgcctctttagctcagtcggttagagcacctgactgttaatcagggtgtcgcctgttcgagtcaggcaagaggcgccagcaagcgatggatattcttccatcgcttttttgtttatctgcatctttttcaccctttctttacggttcttaaaaaatatcgccttgaagaaccctagtggttgtggtatacttttataagtttataggcgtggaaaaggtactgtgcaggctgcacagtcttttctgcccacagacaggcgctccccggtcagaagactgccgtgcaggagcgcaattttttcgttggtcaaatcagcaggcaggccggtggtcttgtgcggcaaacgcagggcggcagggcggcttggtgtcgtttgaataaatcttgagagtaaaaggaaacatctatgcgttatacctacgtccggcagcacgataccaccgactgtgcggctgcctgtctggccatggtgtgcctgcactacaaaaaggaagttaccattacccgcctgcgggatatgatgggcaccgacctgaaaggcaccaaccttgtaggcctgcaaaaagccgccaatgaacttggttttaccaccgccgcagtccgcgtggaccgcgaaaactttctgagcgatttctcgcttccctgtattgcacaggtcatcaccgatcagggtctggctcactttgttgtggtgttcaaaaagaccaccatcaaggatgatggcgcacgccgcaagcatatgctgcaggacgccgagagccgcaaggaagaagaggaaaagggcaaaaagcataagtgcaaggattacgtcatcatcggcgaccccggcacggaactgaaaaagatcagtctggacgagttctacaagaactttaccggtgttctgctgcttttgaaccccacctcggagttcaagggcggcaagattgaaaagggcggcatgatgaagcggtatatcaacctgctgctgccccagaaaaagctgttcttctacgccatcctcagttcgatcatcaccaccattctgggcatcgcgtcctccatgttcaataagattctgatggatgaggtgctgccctacgggttgaacagcctgctggtcacattgatcctggtgttcagtgtggtcagcattaccagcacgctgatcggctttgtgcgccaatgggtgctgatccatctgtccattaagatcgatatcccgctgatgctgggttacttcgggcacatcttcaacctgcccatgaagttctttgccacccgcaagaccggtgatatcaccacccgttactcggacgcaaacaccatcaaatctatctttaccagcatcgcgctgagccttgtgatggatatctccatggctgtcatcaccggcatcattctgttccgcatgaacgccatgctgttctccatctcgctgttcatggcgctggtcagcatccttctggtgctggtgtacaaacagccttataaaaagatcaacgaagagagcatggcacagtcggctgcgctgaacagccagatgatcgagagcctgcgcggcatcgagaccgtcaagtgcaatgccaacgagcagaccgagctggataatctggaacgcgagtacatgaagagcctgaagatcagcctgcgctccagccgcatcagcaccacgcagggcctgatctcttccttcatctccaccggtttcagtatgcttaccacctacgtgggcatcacgcaggtgctgaacggcgagatgacgctgggcggctttatggccttcagcaccctgtccggctacttcacctcccccctgagcaacctgatcggtctgcagatgcagattcaggaagccagcatctccatgaagcgtctgaccgagatcatggattacccctctgagtacgagaccgccgagggtgtggagcagagcgagctggacaaggtggagggcgacattgagttcaaggacgttaccttccgctacggcaaccgcgctcccgcgctggatcacatcagcttcaccattcccgccggtaaaaaggtggcgctggtgggcggcagcggcagcggcaaatccaccatcaccaaactgctgctgaagtactacgaccccgaggacggcgagatcgacataaacggcgcaaatctggccgagtacaccaacagttcggtgcgccgcgccattgcctatgtgccccagaacatcgagctgttcagtaagaccatctacgacaacatccgcatctcccgcatggatgccacgctggacgaggtgaaggaagctgccaagaaggccgatgcccatgagtttatccgtcacctgccgctgcagtacaacacctatctggaggaagccggcaacggcctgtccggcggtgagaagcagcgtatcgcactggcacgcgccttcctgaaggactctaacctctacattctggacgagtctaccagtaatctggactttgccaccgagacgctgatcttcaacatgatctacgagcaactggcagaccgctccatgctgatcgtggcacaccgcctttctaccatccgtgactgcgacctgatccttgtgatggatcacggcaagatcgtggagcgcggcaaccatgaggaactgatggcaaagaatggccgctatgccgagctgtggaatatgcagcagggcatcttccgcaagcgcaagtccgagcccgctccgcaggtaccttctgctgtggtggaagaggacgacgacggcgagtccatcacctactgaccgcaccgcatccgcagcctttgcccggatgcagcataagcgctttcccgctggggaaaccaaaaaatgcctcgttatggtgtgcccggaggcagacgcttccgggcacctttttgtttcggttcacattaaaaatataacaggattaggggtaatttatcatgaatgagatcaaagttgctgaaaacaagaccctcaagctgaccaatgtcctctcccgcctcgtgcgccctgaggaactgggcaatctgccggtcatcctgacccagatgcagaactttatgaagagcaacggcgcacagcctatcggcccgctggtgcaggcggtaaagatgggtaccggcccggatcatgtgccggaactgtacatgatgcagcaggctacccagatgatcacccagatggagcccggctaccacatggacgctgtgctgcgggtgaaaaactgcctgtacgcccactacactggtccgatgagccacaaccagctggctaccgccaagctgcagatcatggcctttgaaaacgacatcaagctgaccggcgacaactataccatctatgtcaatcaggacgatgacgatgccgtgatcgacgtatttatggagaccaaataattatgacgacaaccattcagaacctttcggatctgcaggaccgccggatcatgatggacaaaaagctgcccccctacgggtatgcttttgtcattctgaccggtctgttcatgatttttctggtgatctggagcacccagaccaaccgcatctatgtcagccagaacagcggtgtggtgcaggccgccaacaagacctacatcatgtccagctactccggctccatcaccgaactgtatgtctctgagggcagctatgtgaacgaaggcgacctgatcgcccggctgaagagcaccgatctggatatgcagaaggataacctgcaaagccagctggatatctaccagaagcagctggatcagtacaacaagctgctcaaatgcattcaggacgacaccaactatttcgacgagacgaatgccgaggaccagccctactactaccagtaccagacctacaaaagccaggtagcgcaaaagacctttgacgccaccacctatcaggctgccggttactccgacacccagatcaaggctttgatggagcagaaccagagcgagctggagtctttgtactactctaccatgcagtccatctcccagagcattaccagtgcacaggtcaacgtggataacctgcaggcgcagctggattccctgaacactggtgccaacgattacttcatctatgcgcccacctccggcgtgatccacatggacagcccttacaaggagggcatggtgctgagtgccggttctgcactggctaccgttgccagcgagaacgatgatctggagatcatggccatggtgacggtgaacgaccgccccctactgcatgtcggcgacccctgcaagatcgccatcaccggcctgtcggagtattcctacggcacgctgaccggcacggtcacctccattgacagcgatgtgacctccagcaacaacggctcctactacaagatgaccatcaagcccgacgccacctatgtggtgagccgcaacggcgacaaggtggatctttccaacggtatgagcgtgaccgcccgcgtggaatacgatcaggtcacctattttgagtatgctatggaggctctgggcgtgctgttccgctaaaaacggattacgcagcacggcaggatgcccccttctacaccaccccaaagaggtacaaacaacatgattcgaaccgcaaagaaactggccgcctgtgtgctgatgctgggtgtgctggtatgcggcaccgcactaagcgctgccgcagccagtctgcccgttgaagagcagaacggcgtttcactgccatggctcaaggacgtgcccgccgagagcattgccaccggcagttactctgccaatatgctgctgggcgcttctcagcagctgtcccccgtggtcagccccagttacagcaccgactctgtggtctttttgaccgatgacagcagcgtgctgaccgtaagcagcagcggcgtggtacaggctgtgggcgttggcactgccaccgttacggcagcagccggcaaccagatctgcgcctacaccatcgtggtatccatggactcctccatgatcgtgaccgagatggacctttccctctcctccaacaccatctatgtgggcaactcggtgtcggcttcgctgcaggtgcgccccagctctgcttccaactacgccactgtcaccctgacctcctctaacgagaagattgctacggtgaacagctttggccgtgtgaccggcgtagctcccggcaaagccaccattaccgcaacctgcggctcggtggtagccaccaccaccgttacggtgcttgccctgcccacggattcctccaccggcacaagcggcaccacctccaacaacagcggacaggtgatcacccccaacaccaactacatcgtgctcaagcccggtgccacccgcaccattacggccaaggccacccctgccagtgcatcccagtccttcaccttcaagtccggcaacagcagcattgccacggtcagccccacgggcgtggtcacggcggtaggcaccggttctacctccattaccatctccaacggcaaggctactgccatggtcaccgtcatcgtgaaccgctcggcagatgccgcctccggcagcgacagcagcaatgacggcacgaacaccccggacgacagcaccactatcccgctggaccctgtggtgcagactattcaggacagcaccgaggatcaggtggtgttcgcccagtctgaggttcccatcgtgaccggcgagattctgaacgccctgcgcaccaccggcaaaaccctgtgcgtggtgggcgatggctataccctgaacgtttccggtaaggaggtgaagagtaccaccagcgagatcgacaccgccatcaccttcaccgagagcgaagaggggctggagtttgagctggataacggccgtacccttccctgcgcggtgcagctggaactggacgtgagcacctactcccgcctgtacctgtacaacaccatcagcaacaagtggcagttcctgaacagctacaaggacggcgtcatcaccgccgacactgccggccgctacctgctgaccaaccagaacctgcggttcggtgatatcaactggaccttcttcatcgcaggcggcgtggtggtgatcctcatcgccattgcctacatcgtgctcaagaagcgctactggttctggtaagctcctcttcccctgcatatacgaccgcccgctgcacaacatttcgtgcaacgggcggttttgtgttttagacgattttgagatgatttttactgtggttcagaa

SEQ ID NO: 13746 - DNA, 17783 bp, Unknown
  gut microbiota DNA sequence
aagagatgccctttaggggatggtttttcctgtgaaaaaacaagtctggaaaatccgcagattttccagacttgtaaaattaaaaaatattcttccactaaaaatggtcagagcacacagcggagaccattctaaatcttattctccccggtcactccaccgttacgctcttggcaaggttgcggggcttatccacatcgcagccgcgcagaacagccatatagtaagcgaacaattgcagcggcacgatgagctgcaacggcatcagaatgtcgtcatactcgtccaagcggatgacctcggtggcaacgccctccggcacctccgcgtccttggtggtgaacagcagcacccgcgccccacggctgcgggtctccttggcgttggagatggtcttttcgtagacgtttttctgggtagccagcgcaatcaccggcacaccgtccgtgatcaggctgatggtaccgtgcttcaactcccctgctgcgtaggcatccgagtgcacatagctgatctccttcagcttcaggctgccctccagcgagagggcatagtcgaacccgcgcccgatgaaaaagcagctctgggtgttcacatagcggctggcaaggtacttgatctgctcgcagtccgcaaggcgggacttaatgacctctggcgcgtgcagcagctgggcggtgtaatactttgtcttttcctcggtcagctgcccccgcgcgtaggccagacgcagggcaaacaggtacagcacgcacagctgcaccatataggccttggtggacgctaccgcgatctccggccctgcgtaggtgtacatgacgtaatccgctgcccgggcaatgctgctgcccaccacgtttacaatggccagcaccggcacgccccggctcttggccagcttgagggcggccagcgtatcgctggtctcgccagactggctgatgatgatgaccagatcctccggcttcaggatggggtcgcggtagcggaactcgctggcgatatccacttctgcgggcacccgggccagcgcctcaatggcggtcttgcccaccatgccggcgtgcatggccgtaccgcagcccaccagatgcactgtgcctatgctgcgcagcttttcatccgtcaattccgggatgcgcagctccggcaggccgttctccacccgggggctgaccgttgccgtaatggcggcgggctcctcgttgatctccttgagcataaagtgggggtagccgcccttttccgcggcttccatatcccagtctgcggtcagcttttcgcgctccactgcctcgccgaactcattatagaagcggatgccctgtgccgtgcacacggccatatccccttcctccagcacgctgtagctgcgggtgtacttgagcagcgccgggatatccgacgccacaaagttttcgccctcgccccagcccacgatgagcgggctttcccgcttgaccgcaaagatagtgtccgggtagtccttgaacagcaccgccagcgcatagctgccccgcaccttggcaagcgcagcctgcaaagcctgtaaaggctcgccctgatagcagctgtcgatgagctttaccagcacctcggtgtcggtctcgctggcaaaggtgtagcctttagcaatcagacgctcctttaaagcgccgtagttttcaataatgccgttgtgcacgatgctgacccggggtgtggagtgcgggtggctgttcacgtcgctgggctcgccgtgggtcgcccagcgggtatgaccgatgccacagctactctggggcagcgccagctcttccagcttactgcgcagggtggaaagccgccccttgcttttgaccacgcggataccgtccctctgggtaagcgccacaccggcagaatcgtacccgcggtactccagtttttccaaaccgtccagcagcacctgctgggcgctgcgcatcccgacataacctacaatgccacacatacaaaatacctccagaccgactgcggcgcgccgaaatgcgctgctgcacagtcagtttcctctatcaaagtctatgttcttgtatggctttctttgcagggttctgtttcggtattgctgccggtttttgccctgttctgcggctggtatagccctcagccggagaaacacccgccgaatctttcgatgattcctctcctcgtcaccctcacggctgtcacccgtgtggcccggcgctttacgtcagcttgtggtacacattccttctttcaatgttttgtggttcagtgcatccccagcattttatgcagtttgggctgccacttcagcttgtacagcagcagtagattgcacagtgcgcggtcgtacagggcaaaggccacgttgcccatgcccagtgtgagcagggacattgccagtgcggtggtgcgcagctcctgcgagacgctgcccgccggtaccagcacaagcagcagaccgtacatggcaagcaccgccgcgttgcacagcagcagcttacacaccagctgcaatgcccggggacggatgcggtcaaaccggggctttaccagcgggtaatagcccagcagcaccgtgaagatcagggcgatctctttatccggcacaaagagcagccccagcaggctgacggcggcgtaggccgtccacgccatggtgatgccgcactccatgcacaccgttgcaatgagaaagctggccaccgcaggcgcgatgaacatggcaatggggatgatggtgcccagcagcatcagtgccacgcacagtgccgctgccatgccgcagtaggccatggaccagcttttgctttttcgtttcttcatgggatctcccatttttcggtatcggcgtcctgctccagcgggtagaccgcgtgctgcaggcctaagatcatgatattgttcagcagggtgtcgttcagcttgagatccagcatcttgtacgcccgcatcagatcgttgaccgctgccagcgcctgccgccgggcgttctctatggcggcagcctgtccgttgagctcattgaccacgaacacgttgtactggccattgcggcggtcggcttcaaagcgctcggccttgtccagcagatagaagatgcggccgatgcagctgccgatgtaccgcatactcttgcgctggttggggtcatccgtagccagcgtggagtacaaagcgccgtagacgttgctcataggctcggcggcaagggcgtagtttttggcgctcaggttcatctgcaccaccgcctgctcccgctcctgcgcaaacagccgctccagtgccgggttctcctgccgtgctttgtcgtaggcgcggcgcagcagcagcttgtccactgcgcggcgcacacgcttcgccgggcgcagctcgctgtacttgcggtcctgcaaattatgccagcccatcaggatctccgtctgcgccgcctgccggatgcccagcgtctggcacatcatgctgcgccgaaaaagcgtaccgggcacccgctgccgtttgcaggtaggcatacgtcctgccagactgtcggataggatggcaaacagtaccccgttggtgcgcagcagatggcaggcgtagaagccgtaagacttatacatctgccgccgcaccccgcggaggtaacgcatataggtattgtagtcccggatcgtcagttccggcagatagggccgcatccgtcccttcataagagccagccatcctttctgtacagtttttgtatcctgcggtcaataaggttagtataatcctttttatgcgccagcgcaactaccggatgcaaaaactgccgtaatttgtcattatgccgaattttgtgaaatcgttttctcttataaaaaaacacccgcagtccgtctcttttgtgtaaaagacaggctgcgggtgtttgtgcttgattttcccggcaaaagacacacttttccgtgcaatgtctgccgagagcgtggtttaaatgcccttacttcttttcaaaatgggtgcgcttgccgtcaaagccggatttgggcatgggctttgccaccttctcggtcttgggggcgttatagtacatatacagctggcaggggatcatgccgttgtacatcttgcggcgcttgttggcgcgcttgccgtagtgcagctcaaagtccatatcggcggtaatggcgtacaggccggcgcaggggctggcttccatctgctgtcccagcgtgcgcgccagcttggcagcgccctcaatagtgcccagacgctcaccatacggagggtttgtcagcacgatggcctccggctttgcggcaaaggtggcaacatcggccacttcaaagtggcagcggttttccacaccggccagcttggcgttgacgttggcctgtgccacggcggcggggtcgatatcgtagccgaaggcctcaaagcccacgtccagcttggactctgccagtgccttctggcgctgctctgcccacagggcagcgggcacaaagctgtaacgctcggcggcaaagcggcgcttcagacccggggcgatgttcatggccttctgtgcggcttcgatcagcaatgtgccgctgccgcagaaggggtcctccaccagactgtcgcggcgcacacggccaaggtcggcgatggtagccgccagcgtctcgcgcaggggggcttccatggcgttgcggcggtaaccgcgcttgtgcagaccctcgccggtggtgtccagcatgatctcgcacacatttttgcgcaacataaagcgcaccttgtactccacgccgctctcgggcagcacggtggtgcggtggcccttcatcaggcgcttgaccaccgcctttttaatgacgctctggcaggcggggatactggtcagctgactgttcagggaagagccggtgaccgggaaagcagcgtccgcaggcagaaactcctcccacgggatggaatacacgccatcgaacagctcgtcgaaggtggtggccttgtagcgtgccagcagcagcatcacgcgctccacggtgcgtaggttgaggtttgcggcggcgatcatctcagccccaccgcagaagctcagacggccatcctccacccggatgttctctgcgccgatgcgggtcagctcaaatttagcggtggattcgcacccaaaaaagcagggggcgatcagttcaaattttgcgggcatggtagttcctttctgttctgtaccgaaaaaacagacctgtccgaccggggacaggcctgcctgtgttccttgtgatcccagctgatacgatggctcagcggccacggcggctgcggggcgcataaccgccgccacggcggttgttggtctcgtgatcgaggtccgccattttttcctcgctctggctcttgaagcggctcatcatgtcctcaaagctcaggttgtcggagcgggcgggtgccttgggctgccacacgcggggtgcagcctcccgggcagggcctctgccgccctcacggggggcacgacctgcgccgcggccgccggagcgtccgccctcctgcccattgcggaagccgcccggacgagggcctgcggggccgcgtccttcccggggctgacgcggagccgggggcagcagccgcttgatagacagcgcgatcttgccgtccggtgcaatgttgatgacctgcacctttactgcatcgccatcgtgcagcactgtgttgatatcttgcacgaactcgttggatacctcggaaatgtggaccatgccgacacgcccctccggcagcgcaacaaatgcgccaaagggctttacaccggtcacgcggccttcgaatacgttccctacctcaattgccaaaactcaatactccttgctttccaaatactctcgacctgccgcgcggtcagttaccggtcacatccacaaagatgcgctcattgggtgcggcgtagttgtaagagtcgcgtgcgacccattcggtgatctggtcggcatcgccgctcagtacgcgctgcagttcctgattttccgtctgttgctgcgccacctgttcgttcagtgtttccagttctgcccgcttggagctgatggtgacctgattggagatataagccgccagcatactcagcaaaagcagcacgaaaaacaggcggaacgccatggtgaccactgcattttttctgcgctttttgcgtcccgtattcgtcattgccttacgctcctgtctgaacagcagaccttctgcgtctgttctcttactttgatacgtttgaattatacaacaatgcccgctggtttggcaagttctttttggatttttttgcggttctttccgcgttccggcgtaatttgcgggcaattttagccgcagcgcggcggcggcacagaggctgcaccgcaaaacggtgcaaaatacggccgggcaggcacaaaacagcccgtatcccccgccccagcgcccgcaacgggatgcccagcaccccggcaacgcaaagggcggctgcaaaggccgtagctaccatgtaccaccgcagcacgcccgctttgctgtacccggcggcgtagctctggcacaccagcagcaccgcaccagaaagcagcacgtccggcacaaaagccgccctgccccgcaccggcagaaatgcccgcgccgcgccaagggcagcgcccagcgcagcacaggcggcggcttcctgcaaaagccgggcgggcagcagcacctgcaccatcagcgcagcagccggtgccaaaagccgccggctgtgcgggcggcggtatactccagcccatcgaaccgcccggtcagcttcgcttccccggcttccagatccagtgtctgcatactgatctgcgcgccggacagatgcagaatgcccttgccagtctccagcgcggcactttcggcgctgcaatgcagcacccgctgcaccccggtgacggtcagcctgctgcggctctccaagatcaggtcatggggcagcggcggctttgcggcagctttttccataggcagtccccctctgccagcattgtatgcgggcaggcagggcggttattccgcgatcacctcgtacatctcgcgggcaacgtctttcgtgcggggctccacatccgagagcacccgcaccttgatgggccggttgccaaaggtgacctcgatgatgtccccggcgttgacggcctgactggccttggccaccttgccgttgatgaggatgcggcctgcatccgccacctcgtttgccacggtgcggcgtttgatgaggcgggagaccttgagatacttatccagacgcatttagagttgttcctttcctttcagcaaaaaagccgccgcaccttgtgcaggcagcggcggcgtgacagaaccgattacagggtgtccttcagggacttgccgggcttgaacacgatgctgcgggaagcagcgatggtgatgggctcgcgggtgcgggggttgatgccctgacgctcggcgcgctcgcgcacctcaaaggtgccgaagccggaaatggtgatcttttcaccctcggtcattgccttgcccagtgcctcaaaaacagcgctgacagcctgctctgcgctcttcttgctcatttcggtgtttgccgcaacctgtgcgatcaagtcggtcttggtcatattatttgcctccatctgatttgtcttaaattctctcgttctatcggagcaggtcattcgacctgagtaccgctttgtttctgttccagacactgctgtgcaaagcgcttggatgcaaaggtcagcgcttcctctgcatccacccctgcaagccgggcggcgttcactgctgcaaacagcagctggcctgcggcttcctgctttgtagtgtcctctgccttgccaaaagcctgcacggcggcttccagctgatgctgcgctgcggctgcatcctgctgcccaaggccgtgcccggcggcacgcttttgcagcttctgcgcccgcatgagcgcgggcagcgtagcgggcacggtagccagctcgtccgcaagggtagtgcgccccttttccttatttttgagcgcatcccagccatttataccagcgttttcctccgcggaggacgcaaagatgttggggtgccggaacaccagcttttcgcagacgttgcggcacacatcctcaaaggtaaagcgtccccgctcttcctccatggcggcgtggaacaccacctgcatcagcacgtcccccagctcctcccggagcagaacggcgtcatctgcgtcaatggcctccagcgcctcgcaggtctcttccagaaagtttttgcggatggacgcatgggtctgcaccttatcccacggacagccattttccgggtcccgcaggatgcggatcacctgcagcagctgctccgccgtatagggcggctgtgggttccagtccagcacacgttccatctccttttgaaaagatactgtaaattgtaccgcagctgttgcggtttttcaagcaaaaagccgcaattttccagcatttttcatggttttctgcgcttttcacaaaaacaggacggtgtcctgtgggggataccgccctgttgcagcttttttccggttaccggcttacagctgtgcgccgcacttattgcagaacagtgcatcgtccgagacgggcgcgccgcactgcgggcaggtcttgcgggcaggctgggcgggctgttccggggcagcttcttctgcctcctccatgggggcttcgtagtccacctcggcggcctcggccggggtcagagtagccttcaggcgggtgatctcctgctcaatggtatcgatcatctcgatgtatttatctaccagcggctggttctcctccttgcccttggcaagactgtacaccagtgcacccagctgacgctgtgccttgagcagcttgccctgctcgttgaccagcagcgcctgcgtcttgcccttttcagccagatccatggcagcgttcttgcccttttcggcatattccagacctatcgctttgatcttgttaaaatccataaaagacacctctcttattctggcagcattctctgcagactgcggcgcacagtgcgccataccggagtcgtattcccattatagcgcagcgttatggcaattgcaacgaatgcaccgcaatttttacagtttggtgccggtttggaaacaaattttacgcatttttcacttgtcaggtgcggctgccgtagaactcgcacagcatactgtcggcgggcagcagttccagcggcagcggattcacctgctcaaagcggcgggcggtctcgtcccacagctcagcgttatggccctccagcgtgaactgacggcgcacctcgcccagcagccgggagatcagtcccagctcgtaggtaaaggaggtgtccagcagaaaatccgcggtggtcttgaaacccttgatataccgggtctcgccgtccagcaccctgtcccacatggaaagggtcttggcggggctgcggccgcgggctgcggcatcccgcagggtgcggcggcacaggcggatatcctgcgtattgatgacccggcggccgtcaatgcagtactcctcccgcagaccggcgtagatgcggtagatctggtcatccggcacaaggccggtcagctccgggttgagggcatggataccctccacgatgcacacaccgccctgcaggtcgatgggttccactgcggcagcgcgctgctcggtggcaaaatcgtagatgggcagttcggtcttgccggtctcgctgagctggtgcaagcactgcttgatgaggggcagatccagcgtttcaaggttttcgtagtccagcgtgccgtccggcattttggggtagtaggcagcacctttaaaaaagttgtccagactgaccacctgcgccggggtgccctgctgcaccagagcctttgccagacagtgggcgctggtggtcttaccgcttgccgaggggccggtcagcataacgatttttgccccggagccgcgcaccttctgggcggcatactgcacccgccgggcgtagctgttctcgctcagctgtgccagcgcctgcggactgcgggctgctacgttatacaggtctacttcaaccagtcgtttcggtacccagattgtgatcataaaactcagccactccttttttccgttccagtacctccgcaaagcgctggatatactcgttcggatacttaaaattgaagatgcgctgcatccgtttgcctccatcggccaccagtttggtgctgccgcccgcaccggccgaaaggatggtctggacttcctccatgatatagatattatagtaaccctcgtgacccggcttgcaccagcccacgttttccagattttgcagcgtattcttctgccggtaaaggtaataagggcggtagcccgcctcggccagcagatggcacttttccagcatggcggctacgtccgcgtagtcgttttccttctggtcctcgatgacgatgcgggacgcccgcttgagggtaagggtgtggacggtgatattctccggctgcaaggcaatggcctgccgcaggctgtgctcaaagccctccaccgtatccccgggcagaccggcaatgaggtccatgttgatgtcctcgtgtccggcgcggcgggcatcggcatagcaatccagaatgtcctgtgccgagtgcttgcggccgatatttgccagcacttcgtccgagaaggtctggggattgatggagatgcgggtagcgccgtattccttgatgaccgccagcttttcagcgtcggtgcagtccggacggccagcctctacggtatattctacgaccttgctcaggtcaaaattctcccgcacagtgcccatgagctgccgcagctgggcggcggaaaggctggtgggggtgccgccgccgatgtagatgctgcataaagtcagcccggcacactcggcctgcgcccggatctctgcaacctccttgcacaggcagtccacatagggctgcaccagcttgcggtcgcggtccagattgcagctgacaaagctgcaatagctgcaccgggagggacagaacgggatgccgatatacaggctatacgtcttgggggcgctgcccagccgcaggatcggctcctgcaagtcggcaatttccttcgccatttcgtattttttctccgagcagtcgaaccgctgcaaaaagaagcggtcgatctgttctgcgctccacccggcggcgcgcttatcgtggataagccgcaccgggcgcacaccggtcattttgccccaaggcgggcggatgcccgtccacgagcgcagcaggtcataagtcaggctggcaagggcaaactccggggtttcgccgccctgctccgccggcagcggcagcggggcctccagcattttgctcttttccccctgccgcaccagcacccgcagaccggtatcggtcttttttgcccacaggcagtcctcagcaggctccggcggggtcagggtcaagggtgccatggggtaaaacaggcgggcaagatgctccacctcgtacccggagggcagcccagtgatatagatcttcatgtcattctctctttaaaaaatgtcgttgccgccgcgcagggcgctgcggatatagtagttgttgtccagctccgcgccaaaggtggaaaattcgccgtggccgggcagcacctgtgtttcgcgggggatgggcagctgtgccagcttgcgcaggctgtctgccatctgtgcgctgctgccgccctcaaggtcggtgcggccgatgcttccggcaaacagcgtatcaccgcagaacagatgctcaccgcacagcagcaccacgctgccgggggtgtggccgggggtgtgccacgcggtaaaacgcaactcgtccaccgcgatctgctcgccttctgtatagccgcagtccgcagcggaaagcgggtacatccggtcgccggcaaggtctgccttttcacagtagagggtggcgttccactctgctttcagcgcagccgcactgcccacatggtcgtagtggccgtgggtgcacagaatggtggtgagggtggcgttgtgctgctttaagatttcgtcgtagctatgcacctctgccgccgggtcgatgaccacggcatggcctgcatcggaaatgagcagaaaggtattggtatacagcggcggtgccgcaggaatgtgaaaaccttgcatcgttactccttctttttccactcgtcggtatcaatgatgatggtgcaggggccctcgttcaccagtgacacctgcatatgggcaccgaactcgccgtgctgcacgtccttgaggccgtgcttcgccatctcggcaaggaacagctcataggcatccaccgagaggggcggctttgcagccttgataaagctgggacggtagccctttttggtgtcaccgtaaagggtgaactggctgaccaccagcgcggaatagcccagatcccgggcgctcaggttcagcttgccctccgcatccgggaaaatgcgcagacccgcgcatttatcggcaagcttgggcacgatgtccagcgtgtcggtatccttgacccccagcaggatcatgattcccggcccgatagcgcggggttcgccgccttccacccgcacactggcggaggatacggcctgaataactgctcgcattgcgttaactccttgtcaccttgagcacgtcccgcaccttggaaaggcgcgccaccacacggttgaggtgctcggtattgttgatgccgatggtcaggctgaccacggcgcagttgttttctacctgacgggcattcatggcatagataggcacccggatatcggccagtgcgctgagcacgtcctgcagcagctcgttgcgattcagggcaatgatctccagcccggccttgtagctgtccttgacgctgtctgcccagtaggccttgacccagcggggagcgttggaggggtccttcatgctggcaacggcgttggcgcaggtctgcttgtggatggaaacgccgaagccgcgggtgataaagcccacgatggggtcaccgggcagcgggctgcagcacttggcaaacttgatgggggtgttatcgaagccctccaccaccacgccgtcggtggcatgaacgcggctcaggtctaccttgggcagatcctccaccgacttattctcctcggcttcggcagccttgagcttctgccactcttccttgagcttgggcagacagttggcaatggtcatgccgccgtagccgatggcggcgtacagctcctccgcgttgttctggcgcatccggcgggagcagccgtcgataaaggcatccagctggtcatccgggatgatgatcatctcccggcgcagctccttggacaaggcgtcccgtccctgctggatattctcttcccggcgcatcttcttgaaccagttgcggatcttgctcttggcctcgctggtgcgcacgatcttgagccaatcgcggctggggcccttatctgccgggcccagcagcacctcaatgatctcgccggtagacaccacatggtcaatgggcaccatccggttgttcaccttacagcccaccatgcggttgcccactgccgaatggatggcgtaggcaaagtcgatgcaggtggcgccggtgggcaggttgatgacatcacccttgggggtaaaggcgaacacctcttccggcaaaaggtcgctcttcagatcgtggagcaggttgccggaatcctcgctcaggcgctggttttccagcagctggctgacccatgccagacggtcgtccagcttatcgtggccttcgcggccttccttgtacttccagtgggcggcaacgccgtactcggcctgctcgtccattttgcgggtacggatctgcacctcaaaggggatgccctcgtgcccgatgacggtggtgtgcaggctctggtagccgttgggcttgggggtggagatatagtccttaaagcggttgggcagcgggtggtacatatcgtggatgaggccaagggtgctgtaacactcggccagagaatccagaatgacacgaactgcatagatatcgtagatctcgtcgaaggacttattctgcatgatggtcttgcggtagatgccgtagatgctcttgacccggcgcttgatggtggccccctcgatgccgctttccaccagacggcgctcaatgacgccggacaccttgatcaaaaactcctcgccggcgcgctcgctgagcatccggctgatctcggcatagcccacagggtccagataatgcaggctgcgatcctccagctcctccttgacgttcaaaataccaaggcggttggcgatgggggcgtacacctccatggtctcgcgggccttatcgcggcgcttctgctccggccaggcgtcgccggtgcgcatattatgcagccggtcgcacagcttgatgatcatcacgcgcacatcccggctcatagccagcagcatcttgcgcaggttctcggcctgcaattcctcaatattggagaactggatcttggtcagcttggtcacgccgtccaccagcagggcgacttcctcgccaaaggcggctttcaggtcgtccagcgtggtgggggtatcctccactacgtcatgcagcagggcggcggcgatgctctcggagtccatgcccagatccagcaccagccgggcgactgccagcggatggcagatatagggctcaccgctgcggcggcatacgccgttgtgggcgttattggccagttcgtaggccttttgaatcatctccatattgtaggccttgccgctggcctgaatggcctcgcacagcttttcccacgttacgatctccgggcgcacctcagagggcagcgccccctccggtgcgtctgccagcaatgccgtagcggctacggtggcggtctcctgcaccggctggtgcagatgggtcttggcagagtagccgtcctcgtcccgtaccggagccgggaccgggacagtatttttctttccctcaggcatttatagttcctccagacatttcaggatgggggcatcggcaaggttctttttgcctgctgtcggcaccagctcccagaactttgccccgcctttttccactgcggtgatcagccccacctgctctaaagcggcaactgccaccagcgttttgccggtctgctcctcgcccagctttgcgcacaggggctgcaggtcctcggcgtgccagcggcgggactgcaattcccggtacacggcaatgatatccgtgcgggcggggacgatctgttttttctgttcttcggtcaggggggtgccccggcgcagtgcctgcaccagtgcagcctgccgcgccagctctgcgcccagccctgccgggtgcaggtcgatgatacggccggagagctgcgcccctcgggcggactcgtagaccgaaaggttcagtgccacgtccaccacatcgcccagcgcgtagggcagctgctcggcgggcatcccgaaccagacggcgtacaggcagctattgccctgccgcagccgcaggcggctgtgccgcccttccgataccgggtatacgccgtccaccacggcactttgcagcaggaacaccggggtggggttctcggctccgtagggtgccaactgctccagatgccgcacgctctccaccgtgatgcggtccagatggatggtcacatcacaggtaaggggcggggtgtgcagcaccgggcattcccgggcagcccagtcgttcaggcggcggcgcagctcgggcagattttcttcccggacggaaagtcccgccgccatggcgtggccgccgtagcgcaccagaaggtcggcacaggagccgatgcaggcgtgcaggttaaagccctgcacgctgcgtccgctgcccttgccctcgccgtgctcgtcaatggtgaccacgatgaccgggcgtccggtgcgctccaccagccgggaagccacgatgccaatgacgccgggatgccagtcccgtccccacagcagcatgatgcggtcatccagacgctcgggctgctgttccagcaattcctcggcagctttgaagatctgctgctcagtctcctgccggtgggcgttgatctcgttcagcttgtgcgccagttcctcggccctgtccgggtcctcacagagcaccagctgcaaggcggtgacggcgttatccatgcggcctgccgcgttgatgcggggtgcgatggcgtagctgatattctcggcggtgatgggcttgcccgcaaggccgacttcctctaaaagtgccccaaagccggggcggtcggtctgttgcagctgccgcagcccggccttgacaagggtgcggttctcccccaccagcggcatcacgtctgccacagtgcccacggcggcaaggtcgccgcagtaatccagcatttcctccggcgggcagccgtccagcgcagcgcagagcttgaaggctacgcccgcgccgcacagacccttgaaagggctgtggtcgtcctctcggcgggggtccaccacggccacggccttgggcaaagtctccggcggcagatggtggtcggtgatgatcaggtccatacccagtgaagccgcaaagtcggcttcctccacggcagaaatgccgttatctacggtcacgatgagggtgcagcccttgttatgcatggactgaatggcgtttttggacaggccgtagccgtccccttcgcggctgggcagcatacacttgacggacgcgcccatgcccttgaggtgctggtacagcagggcggtggcggtcacgccgtccacatcgtagtcgccgaaaaccgcgatggtctcgccgttgtcaatggcctgccagatgcgctgacaagcggcgtccatgtcggtcagcagggcggggtcggaaagttcttcctcccctgccagcaaggtcagcgcttcggcggggtcggtgatgccccgggcggcaaggatacccgccagcagggcgttttccttctgctgcgcagccagcacggccttatatttttcgtctgaccacggcgcttcgtccatggcctgctcttccagctgtgccgccgcttgttcggcaatggcggcggtcagttcccgcacagcggcgcggtccagcggtttttgttcccaagcacggtaggtcattcaaattccctcccggtcaggccatcgttggccagcattccctgcaaagcggcgatctcggaagaaatgtccatggctacgtccgaaagcagattgttgtacaggttctcatacgcctgattcaaggtgtgcaggatacccgcgatatcccggcggatggtctcggcgttttcgccctgctgcccctgcacatcgttataggtgtgcagcagcttgagggtggtgggaatataatattccgcaaaacggcgggtcttgggctggctttccgggtgtgcctccagccagtcgcagatggcggtagtggtcttgtgcatggccgccagctcttcccgcgcctgcgcgtcctgcatgagctgctgctctttttccagcacggcagcaaagcggcgggcggtatcgagattgagcagagcatcgccggtttcttccttttccggctgcggctgcgcggcggctgcggcggctttctccttggcagcgcggtagtcctctgccgtcaggtagagcgtttcagtctcatcgtccagccatgcgttcagccagcccttatggatgtagccgcgcagctttttcagcgcctttttcttggtctggtgggtcaggtctgccagcatctccaccgccagccccttctgcgcgttcagcttttcggctgcatctgccaacgcccccaactttttggaggccgacagccgggaggcaccagcggagat

SEQ ID NO: 13747 - DNA, 2259 bp, Unknown
  gut microbiota DNA sequence
gcttacgcgccacccgttccccgctctgtcgctaccgcgacatctctccccggccggggagagtctttcccgtccgggggaaggcttttgctgcgttgctcctgtgcagaggaaaatcagtgatggaacagccgcaggccgcagaaggccatggcgatgccgtacttgttgcaggtgtcgatgacctgctggtcgcggatggaaccgccgggctgcacgatggcagtcacgccggagcggcgggcgcgctcgatattgtcaccgaaggggaagaaagcgtccgaaccaaggcaaacaccggtcaccttgctgaggtaggccttcttttcctcggcggtcagcggctcgggctggcgggtgaaggtctcggcccagacgtcatcgccgatgacatcctccggggtatcgccgatgtaaacatcaatggcgttgtcgcggttgggctttgccacatcgtcacggaagggcaggttcagcaccttgtccatgtggcgcagctgccagttgtcggccttctgaccggccagacgggtgcagtggatgcggctctgctggccggcacccacgccgatggtctgaccattataggtgtagcacacgctgttggactgggtgtacttcagggtgatgagggcaataatgaggtcgcgcttctgctcctcggtcacatccttgttctcggtgacccagttgttcagcatggtgtctgcgttgatgaccagctcgttgcggccctgctcgaaagtgatgccgtacacctgcttatgctcgatgggcgcgggcttataggcggggtcgatggcgaccacattgtagttgcccttctttttgccggacaggatagccagtgcctccggctcgtagcccggggcgatgataccgtcagagacttcgtgctggatcagctttgcggtgggcacatcgcagatgtcagacagggcgatccagtcgccgaaggaggacatccggtctgcgccgcgggcgcgggcgtaggcgcaagccagcggggagagctcggtctccggggcaatgtggtacatccggcgctccacctcggtcaggggcagacccagtgctgcgcccgccggggaaacgtgcttgaaggaagccgctgcgggcagaccgcaggcggttttcagttccttgaccagctggatggagttgagggcatccagaaagttgatgtagccgggcttgccgttcagcacggtaacaggcaggtcggagccatcttccatataaatgcggctgggcttctggttggggttgcagccgtacttcagtgcgagttcattcattggtgcatcctccttatatcctaaggtttactcttattcttcctcggcgtcaagctttttgagcagttccagctcctcgggcagcagctccggctcctcggggtcgtcaaggtcgctgcacaccggatcatatttattaaagatcatatcgccgctctcgccggtgtccaggtcgatgacccgggcaaacaggctcaccttgttgtccacgttcaggctgctccacatatcgtgggcaaaatcaccgatggtgcgggggcaggcaaagcgcaaaggctcaccttcaaagctggggatggggttgccgttgtgcttgtaggtgctgatgaagtggccctcgcctgcaacgggctggggataatcaaagaaatagcgctgcacgctgtcaccgttgccgtcggcagacttgaggatgctcatctggtagctgccgtcagcgtacaccacagcggagatgcggggggtgtagttggggccgtccggctcaaaggtgcgggtgcgcagggcgtcggcaaaactcttgccctgactcatcaggtcgtagatggtatcggtctggtcgccgttggtcacgatgtgggtcttgccaagggtcagcaccgggttataaatgatcaggctgggatcttccagctttgcggggtcggctgcaacggtgcagatgccgccgcgctcgggcacagggtcaaacacgcggttgcggctgttctcgctgcggcccatgataaagtagccgataaacatctgccgtccgtccggtgccattgccacagcaatgccgcggccggggtactcgttggaggccagatactcgttcaggttgatcttttccattgttgttctcctattcagaccctctcaggctcgcattcgctcgccagctattcccctttttggcttcgccatcttcccccgatcgggggaagtctgtccactcggggggagcttttttctgcgttac

SEQ ID NO: 13748 - DNA, 3481 bp, Unknown
  gut microbiota DNA sequence
aagtcattccgaaaataccttacggctcctccgcaggaggatgttctcgccgctgcaaaagagctgctctcccagcagtttcagaatcttcgggtgctgaacagtcagccccctgctctcgccaagcacacaaaaggcgatctacatagcattgagcagatatcggaaaggatgctctccaccccgacggaatcttctgttgagttcatggttgcagaactggatgatgcgcttcaatcgcttatgttccgctggaatatctgttatgaacggtattccgctttccgcttatccgataacgaaaagaagaaaatcggttcgattatccaatcaggaattgattttctgcaaaaaaagaaggaggttcctttatgatgaacgcagttgtaaaaccttaccatgaaatgtgcctgaacagcagtgagctgatcgtgccgcgcgacacttatcagcgtgctcttcaccccgctcgtgttgcccgtatcgcaaaagaatttgacgagcgggttgccaatgagccgaagatcagcttccgggatggtcactactatgtgatggacgggcagaacaccatcgctgcccggaagttcctgaacggtggtgatgatctgcagattcgctgcaaggtctactttaacatgaccgagcaggaagaagccctcctatttgcacagcagacaggcatttcggaacggctgagtgcagggcagaagctccgtgccctgatttttgcaggggagcctgctgccgttgcattccagcaggccaccgaattggctggcgttcatctttcttttgaagaaggccggggcaagcagcggatcagctgcatcgcaaccgcctatcacgaattcatccggcttggtcctgaactgtatatcgaatcccttgatgttttgctgaatgcgtgggacggagaacctgattccatgagttctgcaaatctgctcggcatctgccgctttgtagaactgtaccactccgaatacagtaaaagccgtctgattgccaaactgcggcaggtcgatgcattcacgatttttcgccttgcacgaaccgcaggcgtaagccttcccggcaagacgaagtaccttcagcaggtctatactatttataatggtggcagccgccgggctgcattgccgctcaagttttaactttaagtatatttaacgaggtattatccaatgattatccatgaagaaccttcgcccaactcggtttcctcccctgtttccacagcaaaggacagccgctgctataccgtagaagacctgatggaaatgctgctcctgagccgtcccactgtctaccgtctactgaagcagaacgaattccgctggttcaaggtaagcggcgcttaccgtatttccaaagccagctttgatgcatggctcaatgatggcactgttgaacgcaatcctgctgtttgacatcctcaacatttcacgcgaaatctgctattctttagccgggatgagaaatcccggctaaacttttacatagatagagaggtgtctttcatggatgatatgcggaatacttcggctcccttatacggaaaagctgaacctgccactaccaaaaccaccatgtcggttcgtgagatgcggcagcttctcggccttggcaaaacagacagctattggctgcttcataagaatctctttgaagtcattctgataaacgacaaaaggcgtatcgttatttccagctttgagaaatggtatgccaatcaggtcaaatatcataaggtcaatggttcgccaccgggcgaggaactttgcaaacggtcctattccgttcctgacgccgccgagatattgaaggtgaaacccgaaacgatctatacactcatccgacagggcaagttgaaaacagaaacggcagacttctgtatgagaattcccaaagaggactttgagcggtggtaccgatcacaaagccgctaccgcacagcagccgaccgtgagcgtgaccgggagattgaagcgcaaaccatctccatcccggaaatggcaaaactactcggtatcccacgcaagaatgtttatgggattcttgattgcaaaaaataccgagattgtttcgtcattgagcgcgtggccgacaggccgcgcattaccaaaaaaagttttaaggcatggcttaaaagccaatctacataccaacttcaaaaaccgaaaaaagaaacgcatgaggagccgccgctaaaactgcaatgtcccaagaatgggaaatactacagttttcaggaaattcaggctttttacggaatcagccgcccaacacttgactcgtgggttctcaaagaaggaattccaacgatgaagttgggaagggtaaaacgcatccaaaaagatgctttcgatgaagttctgaagtccaaacgtaaagtagaggaggatgtataatggctagcattgtcaaacgcaataaccgatactgcgttgtctatacctacaaacacactaatggaacgctaaagcagaaatgggaaacctttaccgaccttgcagatgccaaaaaccgtaagaaagaggtcgaatacaaagaatccgtcggtacctttgtggcaccccagtgccgaactctaaaagacctgcttaaagaatacgtcaccctgtacggaagaaccaaatgggcactttcaacctatcaatcaaacactgcactgatttcaaactacatagaaccgcttatcggctcaatgaagctgcaagatctcaccacccgcgtaattgagggatattatcagcggctgcttaaatacgaagccgttgaccctatgtgtggaaagcgtcagcatcaatacgtttctcccggcacggttcgttcggttcacaaaattttgagaagtgcctttgagcaggctgtaaagtgggaacttatggaaaagaatccctgtatttatgccaccttgcccaaatacactgcaaagaagcgtgatatctggactgccgagaccctgttccatgccttagaagtctgtgatgatccacggctccggctttgcatcaacctctccttctcttgttccctgcgcttaggggaattgctcggtctgacatgggattgtgtggatatctcccccgaaagcattgaagccgggcgagcctccatttacataaataaggaattgcagcgtgtagatattgcttcgctgaacgccttggaaaataaaaatgtcatcactcgttttccctcgctgagttcccgctgcaccacggtccaggttctgaaaagccctaaaacagacagcagtatccgaaccatttttctccccaaaacagttgctgaaatgcttgtccactataaagccgagcaggacatgacaaaggacgcactgggtgcagagtatgcagactataatctcgtggttgccggcccgctgggaatgccgaccgaacaatccaccattaacggtgcattgaagcagctgattgaggaaaacgatctccccaaagtggttttccacagc

SEQ ID NO: 13749 - DNA, 2729 bp, Unknown
  gut microbiota DNA sequence
aaattgaagagttcagttgtttggtacttcgataatgatacttccgtaattcgcggcccggtcagaatgtaggcggggtggctgaaatgccaatgaagcggtacaagtccgctgccagatgttcatgccccactcgcagggggccgagggcgaatatgcgagacctgaacatattttatcaggagtgaccggatgctgttttcggtctccggtcactcctgttcttttacatatttatccgctaatcacctttactaacacggaggactactcaaatggacgagttgaatcctacggtgcgcgaacaggaaatttatgaggagatggaactgaccccggaaatgatcaagtccatccgaaccctctgtgcaacctgtctgcgacatttcgtagaagccaaggctttcaaaattgctatcgtgccgagtgcagacaacagcatggacacttgcactgtctgtcagacccggcgcggttacgattatgttgtaatgcaccgctgatgctggtgcttcatttcaatcatcggaggaagtgatgcgtatcgtataaaaagaattgctcccatacttcaacagaaacccgttgcctaggaggtgcagcgggtttcttacatatccaaacggaggtttcgcaatttggaatctactttgaaattccaacgcggagacatctacttcgttcgacttgacaaccgcacaggttccgaacaaagcggaacccgtccagcagtcattctacaaaatgatgtgggaaactcctgctcaccgacattgatcgttgcgactttgacaagtaagacagaaaagaaagctacgcagccgacgcattgtctggtggaaccggaggggctggagccgtccatcgttcaggctgagcaaatcttcaccatcgacaaaagccgtgttaaaagatttgtcggacacctcaccccagaagagatggggcgggtcgatgatgctgtgaaaatcagccttgctctgaacccaatgggaagcatccaaaagctcaaacctatagtccgttctacggcggcttacgcaccgccagaagtagttgacggtaagccgcctgtctatccctacactcctatcaaatccgattttgaggatgcaggaacagtcgaagaaatgatgttatacaccgaactgcaatccgctgttcacgcaatgatccagcggcttgaatacagcttcacctttaatcccagcttgctcaccagcccgaagcgtaagaagcaagtgactgagattttgaccgaagctgaaaaatacatttggcgaattaaggaggaaatcagatgcgcctgaagaatgacactgaaaattttgcagcttccttcaatatcaccccgccttaccaaatgagggtgattcacagcagtaagctgatctacccccgtgaaatctaccagcggggtgtgcagcgtaagcgggtggaactgattgctgctgacttcaacgaatacgttgcgaatgagccgaagatcagcttccgcaacggcaagtattatgtggtggatggccagcacaccatcgaagcgcgcatccttcgtaacggcggcagagccttgccgattctctgcaaggtctacaccggtatgaccatgcagcaggaagccctgctctttgccgagcagaacggccattctgcccctttgtctgcgggcatcaagctgcgagcaaaggttgcgggcgatgatgctccttccaaagaatttctcgctgctaccaaccgggtggggctggcattcaactatgacagtttgcagttgagcgattaccgcatcagctgcgtgggcaccgcgctcaagttgtataacgagatgggcgaaaagatctactgcgaatccctgcggttgatcgtggctgcgtgggatggcaaacccgattcgttccgtgcatctgtcctgcgaggtatgatgcactttgtggaactgtatcacggcgagttcagcgaggaacggctggttcgtgcgcttggcagcgtccaccccatggagatttaccgtgtcggcagggataaccctgcaaagctgcccggatggaagaaatacgtttttcccatctacatggcttacaacggcaaaggccgcaaggacgctctgccgatgaagttctaaaacatattttctctgccaagaggcacctgcaagctgcgggtgccttttattacataattatatcgcgctatcgctacttttgaaagaagggctagatatgaccaatatgaatgtgattcctgtgtcgcaggattcgtatatcgttaatggctgcaaagtgaaaatcacttatgcagaagatggtgacagcatggaggttcttcagaaactgattcatgataccctccgcgaagaagccaagaattacagttgaatcgacatccttgcaacaaggatagtccagcactaaaataatggtacagttgatgcagcaaccaattcaaacaaacgagtgtgcgcacagtatcgttgttttagtttacataggagtgacaacgatgaaaaaacgtgtatataccttataccgtgtttcgaccattggacaggtcgaaaaggatgacatacccatgcaaaaagaagcctgccacgaatttgcagaacggcagggctgggaaatcgtcaaggagttttccgaaaaaggcgtttccggttttaagaaatctgcaaaagaccgcgatcagctccagttgcttcagcaggcggctgctgccggagagtttgatgttct

SEQ ID NO: 13750 - DNA, 1827 bp, Unknown
  gut microbiota DNA sequence
agcggtgagccagctgaaccggaaaagctttacagcagcaggttcgtgatgcctgccagcaccagcaggtgcaccgggtagaaccagtaaaaggcctttttctgcaatggactgcacgcaccgcgctgcccgttgtagaaccagaccagcacaaaggccagcggggcggtgagctcgaacataaacagcagtgcgcccgcaaggcactgccacttgcggtttgtacgggtgaggtacagggcgcagatgatgatcacgccgctggcgttgtagtcggtgcgggcggccagcgccagcgcggcgcacccgcccgcccacacaagcccctgccagccgggcaggccgttttccttttcaaagcgcttgagccctgccatagccagcacgcccagcgccagcgtccagtaaacgttctgtgcactggggtcaaagggggtgcggaagaacgcaaggtcaaagggtacctcgctcaaaatgccgaacagcaccagccgcccaaggtagcctttgacgttgtgggtgtgcacaaagccctccaccagcagaaagcagaacaggggaaaggccagccgcccggtgaagcgcagcaccatgtccagccggtacagtgggtaggcggaaagggtgtcctgcgagagggtgccggcgtccagcccgggcgtaaggatgcctgcctcgatgcaggacgcgccgatgtggtccaccagcatggtgatgcaggcaatggttttaagagcagtgccgctgaaagtgcggcgcggggatagtgcggtcataaaaaatacctcgttcaggtcgttaaaaatcgttacaggaactataacggaggaaaggcggcatttcctgcaaaaatcgcggcaaaatctgcacagaacgtgcaaaaatcggggcaaaatgcttgacagaaaaggcgcgggatagtacaatcaagaagataattgaactatctcaaatgaaagatgaaaaagattcacagagaatcgggcgtctccgaaccagtaaagacggaaggaggctttgggcatgacgcttttttcctacgaaatttttgatgccgtggcccggcagggcagctttaacaaggcggcacagcagctgcacctgaccccctcggccatcagtcacgccattgccgtaatggaggaggagctgggctttgccctgttcaaccgcggcaaaaacggcgtatccatgaccagttacggcgcttccctgtatccttctatccgcgatgtgctcatcagtgacgaggcgctgaagcagagcatcgcccgcctgaatggcttggaaaagggcaaggtgaagctgggtgtattcaactcggtgtgtgcatcgctgctgcccgggctgctgaaaagctttgcggcgcattatccgcagatcgagatcgaagtatatcagggcacctacgatgatgtcaaggaatggctgcgcaccggtcaggtggatatcgctttcctgtcctccacctgccgggaggaattcaacctcaccgagctgttccgggagccgctgctgtgcatcgtgccgcaggactggccggagccgcaggacggcgtaatgaccccggcgctgatgaacggccagagctttgtggtgcagtgtgacgccaccgacgccgagatgcgccagttcctcaagaaatacaaaatcggcaccgagcgccgctgccacgtcatcgacgaccagtccaatatcgccatggtggaggccggacttggcatctccatcatgccgcagatgctgctgcgggactgcaaagccgccgtcaaggtgtaccccatcgagccggaggagtaccgcgtggtgggtctggccgtgcagcgc

SEQ ID NO: 13751 - DNA, 57077 bp, Unknown
  gut microbiota DNA sequence
acttttcagcgtctattggttcttttcaagggcttcctgctgaggcttcagaagtcattcttttgtctcagcgcttggcgctcacatatagtaccatatcgcaactacttttgcaagccttttttacatttttttcgcctttttttgcgctttgtatacatcatccagtttttcgctcggtttcaggggatgttttgacctttcttccaccatttctgcgctaaaacagccgccgcacaaaaagtgcagcggctgttgccttgggattcagttcttttcttcctgcttcatctcccgcagggtcagccagaccgctgctgccaacatcggcagcgcggcgatcaggccaatgggcatgggtcccagtacattataataggcatctgcaggggtgaccagcacctgcggcagtgctgcaatggcattgaacgcgccgtgcgcaatggcaggcacccagatgctctccgttttctcatagaggatatccaacagagtgttcagggcaaagcagaccacgcaccacaccaccagacccagcaggggggcacccaaatagtcggtgccgtactcgtagcccaccagcagcatcagcggccaatgccagatgccccacacaacgccgcccagcaggcggccattcagcagaccgaactgctccttcaggcggggcatcatgtagccgcgccagccgacctcctcgcccagcgcggggaacatattgatggccggggcaaggagcaccgcaaacaggccattctgcaacaggtagccgagggtggagacccccagctgactgcgcagagtctgggcgtccatctcgccgccgtaggcggctaccagccagctgccggaaaagtccagccgggaggggaacaccgcaaaatacagcaccgcacccagcagggtgagcaccgccgggccgaaccatgccgccagccagaaccgccgcttgccctgcaccttccagccaatgccggtaggttggcgcagaaaggccttttgcaccagcagaaccgccagcagcgggcagaacatggtaacgatgagcgccagctgatacagcacagcgttattctgctgcaaaagtgctatgcagccgccgacctggcacagccacgccatgccgaaggcgaacaggaagtacaggccgaagccctgtttttcttttgctgtcatacaaacttcaccgccgttccgtaagcgatgacctctgccgcgccctgcatgacgctggcagaggcgtatcgcattcccacaatggcatccgcgccaaggctttccgcgtccttgaccatacgtccggtagcgatctgccgcgcttcggtaagcatctcggcatagtcggtcacttcgccgcccacaagggtgcggaaaccggccatcatgtcatggccgaggttgcggctctgcaccgtgctgccccgcaccacgcccagcgcttccagctttttgcccgggatttcgttaatagttacgataagcatcttcttctccctttccgatctcttcgatccgatccagcagcaccttcagggtgcccacgatgcagcccgccgggatgccgaacatcaccaccagcagcggcagcggcggggcatcctgcgggtcggtgtaaactgcccagcccatggtggccattataaaggccatcatagccacaaaaagggcagcaccaatgcaggcgccccgaatgcggcgggtcttttggtcggtacgttcaatgttcacaaaggtcactccctgttcttcccgtgcggtcaggcgcgccagcgtctgttccacatccagttgttccagagggccgttctcctgttggagcagcgcgcagaagccgattgcttcttccaagtcggcgcggcggctgcgcagacgttccagctgcaggctcatgccctcggccagcgtgcactgcccttccagcatctcccggatctctgccagcggcacgtccagcttgcgcagcagcttgatgcggcgcaggcgctccacgtccgcctgcgagtagctgcggtagccgttgcccggctcccggctggggctaatcagcccctcctcctcgtaaaagcggatgttctttttggtcacgccgacggcggcttccacttcgttgatcttcatgggtcacgcccccctccttacgggagtattctacaccttccacaaaggggaaggtcaagcctttttgcaaaaagagccgccgcacaaggtcgtacagcagctccttcctttaaaaatagcacttgatctggaaacggtcggcgttgtcctgctttttctccaccacgatatgctcgtggttgaagtcaaagtgcaccggggtgcacaggtcggtgttgcgggtcaggcgcagcagctcctgcacacgcttcttttcctccggcacatagaacaggtagcttacgccctcctttttggcgcggccggtgcggccgatgcggtgggtgtagtgctcgttctcgctgggcacatcgtagttgataacggcatccacgtccgagacgtcaataccgcgggcagccacatccgtagccaccagaatggccagcttgccgtcccggaaggcctgcatgatctggttgcgctccttctgggagaggtcaccgtgcaggcagtccaccgagaagcccagccgtgccagttggtttgccagcgtggcggtgttgaacttggtatcgcagaacaccatcacccgcttgtagccctcgccgatgatgatctgtgccagatccgacagcttgttgcgaccggaggtttccagcatatactgggtgatcttgggctggctttcctcccggggctgcacggtgatctcctcggcgttatgctggtacagccagccgatatccatcacctcacggctgatggtggcggagaacatggacagcgccttgcgtgccttcatcatctcgatgatgtggcgcacatccttataaaagcccatgttcagcatctcgtcggcttcgtccagcacgatctgggtcacatgggagatatcaatgctgtggtgtttatagtggtccatcagccgtcccggggtagctaccacgatctggcagccctcggccagacgctttgcctgcttttccatattggcaccgccgtacacacaggccacctgcacctcgggcataaagtaggtaaggttggtcagctcctccgcgatctgctgggcaagctcccgggtgggtgccatgatgacggcctgcggatatttattttccggctggatatgctccaccaccgggatgccgaaggcacaggtcttaccggtgccggtgggtgccttggcgatgacatcatgcccggccagcatgagggggatggtcttttcctgaatctcggtcatttcggcaaagcccatgcgttccacagccttgtggatggcttcgctgcactgcaactcgctgtaaagcatttggacaactccgttctttgtggcgttttttctcgttgcaacaagtatagcatgaaatgccgcgcttgtcagcagagaaacaaaaagaaccgcacccggggtcacgggtacggttctcattatgcagggatcaggcggtctcttccacgctcttcttgccggcttccaacttctgcttgaagcggccgctggccttgaagccggggatggaggtggactccagctggctggagaccttggtcttggggttggtgtaagccttcggcttgcgggggcgcatctcaaagcggccaaagccggcgatggtcaccttttcgtcagcgcgcaggcagtccgcgatctggtcaaacattgcatccatcgtggtctcgacctgagcttcggtaaagccggtcttgcgtgccacggtttcgatcatctgggaacgggtcatgtatcgatatcctcctggaatgtccaaaagtaacgtcttttggcaaattttgcgttgttgagtataacatatttatcgcactgttttcgatggattgcgcacgaaatgcagtttattgcacacgaaccgcattcagttccgtgcaccccgcacaaatacagcgcccaccgtttcggcaggcgctgtacagaactattttatgcgggtctcagggcttatttgccgcggtacagagtggcgatatccaccagcgggatgtttgccaggctgtgctcgctgcgcaggcagtccaccagagaagcggcggtatccactgcggtgatgcaggggatgctcagctccacggccttgcggcgcaggcggacagaatcgcgccgggggtcacggcccttggcgctggtggagaacacatagtccaccagaccgctctgcagcagatccacgatgttgggtgcctcgccggagatgttgcgcacctcgttgcaggggaccatgtgcttgttgagccatgcacaggtgccggaggtaccgtagagcttatagcccatatccttcagcttccatgcaatatccacgaactcgggcttgtcgctgtccttcacggtgaagatgcaacagctgcccgggccgggagtcttgaaggtatagcctgcaccgatcagacccttgagcagggcgtcgtggtagttgggcgcaatacccagcacctcgccggtggacttcatctcggggccgaactgggtatccacggcgtgcagcttttcaaagctgaacacgggcacctttaccgccacatagggggcgttggggtgcagaccggtgccgtagcccatatccgtcagcttctcgcccaagcagcagcgcacggccatatccaccatgggcacgccggtgaccttggagatgtaaggcacggtacgggaggagcgggggttcacctcgatgacgtacacacggccatgggagacggcgtactgcacattgaccagaccggtgacatgcagctcgcgggcaaagcgaccggtatagtccaccatggtgtcgatctcgtcctgcgtcaggtgctgtgccgggtagacacagatggagtcgccggagtgcacgccggtacgctctacctgctccatgatgccggggatcaggaagttttcgccatcgcagatggcgtccacctcgcactcggtacccatgatgtacttatccagcagcaccgggtgatccatgtcgacgtgctcggtgataacgcccatgtactcgatgatatctgccttgttgtaggccacgatcatgttctgaccgcccagcacataggaggggcgcatcagcaccggcagaccgatctcctcggcagcggccagagcctcgtccagattgaacacggtacggcccggggcgcgggggatgttgcagcgctccagcagctcgtcaaagcgctcgcggtcctcggcctcgtcgatggcgtccgccggggtgcccagaatgggcagaccgatctcgtccatgtgcttggccagcttgatggcggtctgtccgccgaactgcaccacgcaggcatccggcttttcggtggcaatgatgttgtccacgctctccgggttcagcgggtcgaaatacagacggtcgccggtgtcaaagtcggtggaaacggtctcggggttgttgttgaccagaatggcctcgcagccgtttttcttcagagtccacacgcagtgcacagagcagtagtcgaactcgatgccctgaccaatgcggatggggccggagccaaagaccagaaccttcttctttttaggctcacccttggcagcggtctcggcttccttctcggcgatgaagcttgcagcctcgttgtcgccgtcgtaggtggagtagaagtagggggtgttggcagagaactcggcagcgcaggtatccaccatcttgaagccggcgcggtagttctccacgggcagggtgtccacctgtgccagacggcggatggtcttatcctggaagccgtacttcttggcagtcttgtactgctccagagacagcacaccgttgcactgtgccagacccttttccagatctgccagatgctgcatcttatcaaggaaccaccaatcgatcttggtgatatcgtagatgaccttgtggtcgatgccgcgcttcagcgcctcgtacacgcagaacacgcgctcggcgtcctgaacgtgcatgtgctccaccacttcctcgtcggtcagctcctcaaagggcttgtgggtcagggtgtccatacccagctcaatggaggaaacggccttcatcatggcggcttcgaagctgttgccgatgctcatcacctcgccggtagccatcatctgggtgcccagagacttgtcggcgtagacgaacttatcgaacggccacttcgggtacttgaccacgatgtagtccagcgcaggctcgaagcaggcgcaggtcttgccggtgacatcgttggtgatctcgtccagcgtgtagccgatggcgatcttggttgccaccttggcaatggggtagccggtagccttggaagccagcgcggaggaacgggacacacgggggttgacctcgatgaccgcgtagtcgaagctgtccggcttcagggcgaactggcagttgcagccgccctcgatgcccagctcggtgatgatatccagtgcggcggtacgcagcatctggtactcgtggtcggtcagggtctgggagggagccacgaccaccgagtcgccggtgtggatacccacggggtcgaggttctccatgttacacacggtgatcacgttgcccttgtggtcgcgcatcacctcgtactcgatctctttccagccggcgatgcacttttccaccaggatctgatggatgggagaaaggcgcaggccgttggtgccgatctcgatcaacttttcgcgggtctcgcagatgccgccgccggtgccgcccatggtaaaggccgggcgcacgatgaccgggtagccgatgcggtcggcacagtccagtgcgtcctgcagcgtctccaccacctcagaggggatgatgggctggtgcagcttttccatggtctccttgaacagctcgcggtcctcggcacggtcgatggtctcgggcttgcaggccagcagacggatgccggtgcggtccagatagccggagcgtgccagctccatggacaggttcaagcccatctgaccgccgaggttgggcagcacggagtccggcttttcgatatccagaatgcgctccacgacttccagcgtcatgggctcaatatacacatggtcggccacgtccgggtcggtcatgatggtagcggggttggagttcagcagaacagtctcgatgccctctgctttcagggcgcggcaggcctgcgtgccggagtagtcaaactccgcagcctgaccaatgatgatagggccggagccaatgaccagcacttttttgattctggggtccttcggcatttcagcgtgcctcctttgctgctttgacgttgttcaggaagcggtcgaacaggaattcggtgtccttggggccgccgtttgcttccgggtggaactgcacggtaaagcagttccactttttgtacttgatgccctcgcaggtgccgtcgttggcgttcacctgtgccacctcgcccatctcggcgggcagctcctcgcccacgaccgcatagccgtggttctggctggtgataaaggtgcggccggactcaaagtcggtcacaggctggttggcaccgcggtggccgtacttcagcttcatggtcttggcaccggctgccagtgcggacagctggtgacccagacagatgccgaaggtggggatgttcagctcaaagatgtgcttgaggttctcgatgacctccacaggctcggcggggtcgccggggccgttggacagcatgatgccgtccggagcaagggctttgatttcctctgccgttgcaaaggcgggcatcacggtcaccttgcagccgcgcttgacaaggcagcgcacgatgttgcgcttgcagccgtagtgcattagcacgatatgggtctcgccttccgggttgaacacctcgggggcggcgcaggtcacgttctttacagcatcggtcacggcgtaggcacggatctcggccagcagtgcctcggtctcggccttgttggccgggtcggcggggtcaaaggtggtcaggatagcgccgttcatcacgccgctctcccggatgatgcgggtcaggtggcgggtgtcgatgccctcgatgccgatggtattgttctttttcaaaaagctgtccagcgtctcctcacagcgccagttggagggggtggtgcaggcttcgcgcacgatgtagccctttgcccagatgcggtcggactccatgtcatcgtggttcatgccgtagttgccaatgaggggataggtctgggtgatgatctggccgtaatagctggggtcggtcagggtctcctgaaagcccaccatgccggtggagaacaccacctcgcccacggtcacgccctgcgcgcccacggactgtccggcaaagaccatgccgtttgccaaaagaagatatgcgttcatagttttcctcgtttcaacaaaagctttcagtttacagggtctgctttgcttcctgcttcatcttgcggctgcccagatgcaccagcggcagtttgccctccttgcagatggggcactcctccggggtatagttgggcaggtccagcttcagggcgctggccagaatggggatgggagacggagcctcgggcttggtgcggtccaccacacaggtgatgccaaggcagatgccgccggcctcttcgatgacgcgcttggtctccagtgaggagatgccggtggtcaccacgtcctcggcgatgatgcacttttcacccgggtggatggcaaagcgcttcaggcacatcacgttgtccacgcgttcggtaaagatagcgcgcttgccggtctggcgggccagctcgtaggcgtacacgatgccgcccatggcagggccgacgatgacgtccacgtccatctccttgaccttgtcggccacagccttcatcacctcggcgcagcggtccgggtactgctgcagataagccatctggcagtatgcgccggagtgccggccggaggacagcaggaagtgaccctccagaaatgcgtcacagctcttcagaatttcaagtgcttcactcattgtacttctccctctcttttcagtggtgtatattcctttgggtggtattgtaccacgcttttacactatttgcaaatttatgcgttaagttttattttatgcgcataattgtagatattttatggatatatcagtttttattctgcatgacgggcgcagccgcggatctcgtccagcgttttcacaccgttcttgtccatccatgctgccatctcgtcggcaatggtctccatcgcgcgggggttggcaaagtttgcggcgcccacctgcactgcggtggcacctgccatgatgaactccagtgcatcacggccggtggcaatgccgcccagacccaccaccgggatgttcaccgcacccacggcctgccataccatgcgcagggcgatggggcgcaccgccgggccggacagaccggcaaaaatgttgttgaacaccgggcggcgcttttccagatcaatggcgcaggcctggaaggtgttggtcaggctgatggcgtccgcaccggcggcctccacagccttgcacatctcggggatgctctcggcctgcgggctcagcttgaccatcaggggctttttgcaggcagtgcgcaccatgcgcaccacctcaccggcagcttcggctttcacaccgtaggccatgccgcccaccttgacgttggggcaggagatgttcagctccacgatgtccactgcgctttcgctcagcatcgcagcgccttccacatactcttcctcgctgtggccgccaaggtttgcaatggccaccgtgccgtacttctgcttcagttccagcatctcgggcagctccacgtcaataaagtgctgcacgccggggttctgcaggccgatgctgttgatgagaccggagggggtctcccacaggcgctcgcccttgttgccgtactggccgtgcagggtaagccccttgccggagatgccgccgatctttgcaaaatcggccagttcctcgtactccacaccgtagcccacggtgccggatgcgccgatgaccgggctgttcatcacaaagcccagcaggttggttttcaggtctgccatcagaagaacacctccgttgcgtcaaatacagggccgttcttgcacacgctcttgccctcgccgcccttggtctcgcaggtgcagccaaggcaggcgccaatgccgcaggccatcttcttttccatgctcacaaagcagggggtgcctttttccgcacacaggcgggcggcgttcttcatcatcacggtggggccgcacaccagcaccacgtcgtaatcggcggggtcgtacagctgggtgacaaagccgtggaagcccaccgcaccggtgtcggtggacaccttgacgaggtttgcgatgctgcggtactcctccatgcagtagggggtgtcgcggaagccaaagaacacatccggctttgccccggcagcggccagctcgcgggtgagctggaacatgggcgcagtgccgatgccgccgcccaccacggcgatctttttgtacttgctcacaatgtccggcacatcaaagccgttgcccatggggccggtaagctggaaggtatcctgctgcttgagctgtgccagcttttcggtgccctcgcccaccacctgatacaaaaactcgatggtgctgctgtccgggttccagcggtgcacgctgatgggacgggacaggaagggggcttcgtctgcgccccaggagcgcagggtgaagaactggcctgcgtggggggcgtggtcgcggtccggccataccacggtcagcaggcggatgtccggggcaatgacctcattgcgcaggacggtggcttcacagcaggctgcacgcatgagcaatggcctccttcatgttcacacactcgttgtaagcggcctcgtcaaaggcaacgcccggctgctttttgtaagccagcaggatgccgcggctggagttgaccacgccgccgttgcccttggtgagatactgggcgatatcctcggccttgccgccctgtgcgccatagccggggatcaggaagaagctgtcctgatactttgcgcggatctcggtggcttcctcgatatgggtgccgccgatgaccagaccgatggaggagtagccgtgctcgcccatgtagtccttgcccagcgcgttcagcttgtcgcccaccagatcgtagacgtggcggccgtcggccagcttctcgtactcaaagtccttggcgccgccgttggaggtgcggcagagcacgaacatacccttgccctgcttttcagcatagggcagataggggctgatggagtccagacccatgtagggtgccagcgtaacgaaatcgctctcaaaatcgccggtgaagtgacccatggcgtacatctcggcggtcttggcaatgtcgccgcgcttgatgtccgcgatcaccggcacaccggcctcgcgcacagtcttcagggtgtcggcgtaggccttcatgccctccagacccagagactcataataagcgatctgcaccttgtagcagccggccacagccttggtggcatcaatgagctttttgttgaagcgcacgatgttctcgcccttggtcagggtgctgtccacaaaatcggcaggcaggtagctgaaatcggtgtccagacccacgcacaccgggccgcgggcttccacagcttcgtacagtttgtccatgttcgtcatttgggtgtcctcctgtataagtcgtatttatagaaaataaattgtagctatgggttttactcctcggcctgataggtgatcttaccggccttgatggtagcaaacaccttgccgtaaagctgtgcgccgtcaaagggggtgttgtggctcttggagtgcagcttttccttttccaccatgtagggggtgtccagatccaccagcacaaagtcggcatcgaagcccggctccagctgacccttggcaaggcccaggatctcggcggggcgggtgctcatcaggtgcaccagcagctccagcggcagaccctcctgcttgcagagcttggtgtagcacacgccgaaggcggtctcgctgcccaccataccggccatgcccttcagcttatcttcctcagagtgaggtgcatggtcggtggcaatggcgtccacgatgccggtacggatgccctccaccagcgcctccacgtcgtcggcggtgcggatgggcgggttgacccggtagtcgcaggtgtcgttggtgaaccacaagtggtggggggtcacctcacaggtgacgggtgcaccccgcagctttgccatgcggatggcatccagcgcgccccgggtggacacatggcacatatgcagccgggtctggtagtactcgctcagccagcagttgcgcaccgtctcgatatcctcggccagacggtaatcccacggactgatctccatatcctcggcgtggctcatgaccgtgatgtccttctgggtgcagatggcaaaagcccgtgccatggtggcgttatcctgcacgccgtggccatcctcggtgatgaacttcacgctggcgggcagggtcttgaggtggtcgatgctcacgccgtcaaagttctcggtaatggagacggtctggtttgcatcgcacagccccacctcggcagccttctgctccaccatcatggcctgtgcggcagaggagcagacgggtttggtgttgggcatcaggtttacaaaggtgtagccgccggcggcagcggcgcggctgccggtctcgatgtcctccttgtactcaaagcccggggtgcgccagtggcagtgcagatccacaaatgcgggcagcacagtcagcccaccggcatccaccaccgtctcgttctcggcggcaagggcggaaagatcctgccctacggcagcgattttgccatcctttacatagatctccagcggccgtccctcggtgttcacagcgtttgtcagcagcatcgcggttccctcctgtaatgatatttttgtgtgtcaggtgcccgaaaacggacaaaaaaaaacttttccccgcaaagggaaaagctcattgcgcaaaaaaaggaaacaacgaagccacggcaaaaccggacgcgaactgcttgttcagtttcgggttctgggcgctgcacagcatggtgtttctccttttcttgatggttgcgttttcattcgtattattttatcatagaaccgcaaaatatgtcaatggctgtacgcaaaaacaggtgttaaaaggtttctggcatctctcgccgaattttggatactctacccaaaacccgagtcacgcggcaaaataactgccattttgttccacaatccctagtacagcactgtactttcgtctcctgctgtgctattataatacggtaaaagggagagccccgccgcgtgggcgggtgtttatgggaaagagaggttttccgcatgggtttacttgaggacgcgcggaacatccagcgcaaggaccccgccgcacgcagcgtgctggaggtaatgctgctgtacccaggattccacattctggtgtatcaccgcattgcgcactggctgtaccagcacaagcacttttttctggcacgatgggtcagccagcatggccgccaccgcaccggcatcgagatccacccgggtgccaccatcggcaagtgtctgtttatcgaccacggcatgggcatcgtgttcggcgagacctgcgagatcggggataactgcaccatctaccacggagtaacgctgggcggtaccggcaaggataccggcaaacgccaccccaccttgggcaacaacgtgcttatcggcgcaggcaccaaggtgctgggcccggtgtttatcggagataacgcccgcatcggcgcaggcagcgtggtgctgcgcaacctgcccgccaactgcaccgccgtgggcgtacccgccgaggtagtgcgtatcaacaacaaggcggtgaaccccgccgacgatctggaccagcaggatctgccggacatcgtctcgcagcggctcaccgatctggaccgccgcctgagccagctggaaaaggccgcgcagggcgatatcccgcccactgccgcacagatcgccgcccggcagcggaaataaaagatttctttgaaaaaaagaggagacaggcttcccgggaaggtcgcctgtctctttttttgttgtcagctgcggttataacaccggctcaccgttttctttattgcaatacatccgggcatcggcctgccggatggcctcggtcaagggctgcacattgcacacgccgccaatgcttaccgaaagccggagctccgggtggctgggcacccgcgctgcctgcacagcgctctgcactcgtcggatgacgctttctacgccgtcagggcagttctggggcatcagcagcagaaattcatcgccgccatagcggatcaggatatcagtctgacgcagacagctctgcatggctgcggccacggtctgcaatgcttcgtctcccaccagatgtccaaagctgtcgttgaccgacttgaactggttcacatcgatcatcgccacaccgccgtgcatctcgcccccggcaaggaacttatcaaaatagcggcgggtgtaggctccggtcagggggtctacgaaggcgctgcgctccatgccgttgcagcggtccagcagcagccggtggccgcccatatccagccagcggccatccgtcagccgggtgaccatttccagcatacaacccctgccgcctacctcgatatacttggaaatgacaaaataggcttcctcgtccttgaactcgatcttattcaggatggtcttgcgggcgtaggctttggcggagatgcagttttcgcaccgggtatccttgttccataccatgtggcagttgccgggcttttcggtcaggatgccgtcactgtccagcgcaagcaccttgcggtgctccgggtctaccagacgcaccacatcaaagatgccctgcagccgccgtaggaaccgggcgggatcttcctccgggtcgatggcggtcagcagctctgcctgatgctccacgcggtgctgttcatcggtcagctgccccagcacgttcacgcagcggcgcaccccggcaccgctccagatggtatgcagcgccatccggtgcaggtgcggcttcccatctcgctgcaccattaccggcagcaccacgtccggcgcttccggcgtggcgcggctgatggccttggaaagcttgcgccgatcctgttcgttcaaaaagctgagccccttgccctgcgcaaaatcggtcaccgttttttgctgcaaaggctcggcatggtagtcatacacggtcacgttgcctgccagcaggtcgtagtcgaaccggatgccaccgcactgggcggcgtagaaatccgtgcgctccttttcctgctccagcagcagctgggagtggttctcccggggcagcgcctcccggtgcaaaatctcctcggaaaggcggtgggtctcctgccggaagcccctgtcccactccgagcgggtcagctcggtgcgcagctgctccgaggactctcgcaggcagtccagcagcagcgggttgaaggcgccgcactcgccgttcaggatcatgcgcagcgcggtgtcgtggtcgtaggcgtgcttatagcagcgctcgctggtcaaagcgtcgtatacgtctgccagtgccaccacctgcgccgcaatggggatctcatcttctttcagccggtcagggtagccattgccgtcccagcgctcgtggtgccagcggcagatggcgtgcgccacctgcaaaagcggctcgtcccgcgcaatagcccgtcccagatcctgcagcatctgcgcacccgccacggtatggttcttgataatggcaaactcctcggcagtcaggcggccgggcttgttcaggatttcctccgggatgacgatcttgccgatatcatgcagcgccgaagcggtgctgatgagggcgatatcgctttcgtccagctgatagcggtcggtcttttgcaccaaccggtgcaaaagcaggtcggtcagggtgcggatgtgcaggacatgaagcccgctttcgctgttgcggaactccaccacatggctcaggatgctgatcatcagcacgctgttgtgctctttttcgtacacctgatcggtaacaaggcgggtgagccgcttttgcttggcgtacagcatgaggatattcttcacccggcgcaggatcataatccgctcgaaggggcggcggatatagtctgccacacccagatcataggcacgctcaatgttgacggtatcctctgccgccgagatgacgatgaccgggatctcgtccagccatgcatgatacttcatcactcgcagcacgtcaaagccatccatgcccggcatcatcaggtccagcagcagcagggagatatccgtgcgctgccgcatcagttccactgccgctgcgccatcctccgcctccagatagtcatagccatcgcccagtatctccttgagcagggcacggttgatctcggaatcatccgcgatcaggatcttcggtttctcgttcatggccatgtttctccttttgcggcgcatccttctgccccggctttgttccgggcacaccgtccgcactgactggatgtaataggttttccctggcatccgctttattgcattcatttatactttactggattttacagcaaaatgcaagactgagcgcagcattttctgccattttccggtattttctgcaaacgttttcattcccggttgtataaatgcaatccaatttttacagtaccctttgcaaacgttgttcgaaagcaagccgtttgtcgttacagcccttcctgtgaaaatgcggttgccgcgctccgcagagcgcggcaaccgcgaaatataaaccttatttccactgatgatgcgcagagcaaagcggagcgcattttaaatcgttccactctgaaagaaaaaggactgctgcgcaaaaaaacgcaacagtccttttaagattcattcttggggcatcatggcatcaaaccatcccatcagctccgcagccatctgttccagccgggtctccggctgccatgcaggctgtgcaggctccgggggcagtgcctgttccggggcgcagaggctttcttccgtttccggtgcaggctgttccggtgcagcctcgcactgcggcacagcctcgggggcggtgtccggctgcgcaggtgtttccggggcggtctgctgcatggcggcaagagcagcctcggctctgcggcaggcggcttcggccttttctgcccgggcattggcctgttccagctgctcccacgcctgctcacaggcgacttccagctctgcattatcgtgcttgagggcaagcagggtgcgctcaaaggcgaacatccgggtctgataccggcgcacctcggcgcgtgccgcagccagcttgcggctcagctgctctgcctgtgcccgggcgctttccgcctgtgctgcggcagatgcctgtacagcgacctgccgggcaaattgtccgcgcagggcaccggtctcccgctctgtctgcaccatgatgccctcccatgcacaccttgcacggggctttcgctgaccgcatgggcgcagctgccagccccattgtagcctgtaattacttccgcttgttcaggatggccagcagctcgtcgtagtaacgattgtcgctgctttcctcttccacggtcttcttttcagccggagcagcagccggggcggcattggatgccggagccgcagctgtgccggtatcgctgctgaacaccgcagtgggcacagactgtgcaccgcccatggcgttgttaatgctgttgcgcaggtcgctggcgctcttgttgtcaaagccggtggccacaacggtcacgcgcatctcatcggacaggttctcatcaaaggcagtaccccagatgatgtttgcatcgggatgtgcgctctgggtgatgaggcctgcggcggtctccacgtcctccagaccgatgtccgggctggaagtgatgttgatgataacgccgtgtgcaccggcgatgctggtctccagcagcgggctggagatagcagccttggcggcgttctcggccttgcctgcacccttggcgctgcccacgcccatgtgggcgtagccggcatccttcatgatggagcgcacgtcggcaaagtccaagttgatgaaggcgggcacgttgatcagggcagagatggactcaacgccctgacgcagcacgttgtcggcagcctggaaggcattcatcagggtgatcttttcctgactgatcatcttcaggcgctcgttggggatgacgatcaggctgtcaacgtgcatcagcaggttggcaatgccctgctcggccaaacccatcttgcgcttgccctcaaaggagaagggcttggtaacgatgccgacggtcaggatgcccagatcgtgtgccacctcggccacaacgggtgccgcaccggtgccggtgccgccgcccataccggcggtgataaagaccatctgggagcccttgagggcgttggcgatctcgtccttgctttcttcagcggcgcgctggccgatctccgggtctgcacccgcaccgcgacccttggtcagcttggaacccagctgcaccttgaccgaggcatggttcttggccagtgcctgctggtcagtattcattgcgatgaactccacgccctgcaggccatcgctcaccatgcggttcacagcgttgccgccgccgccgcccacaccgatcaccttgatcgtcgtaacgttttcgtccagttcttcatcgagcatcaatgccataactttgtcctccatcggatttttatgtggaactgcgcaaatgccgcacagaaattatcatacgatatttatataactgtatcgtatcatttttttgctccgattgcaagacaaaattgctttttcgtgggtgtttttttcacaaccccactccgggcgggtatttcctgccaaatctgtgcgcccagccccgccaaaagccggtcaaggtctgcatatccgcgccggacaaactccaccccgccaaggcggctgctgccccgggcagccagcgccgcaagcgccagcgccgccccgccccgcaggtccggtgcagtcagctttgccccgcgcatcgtcccgcccggctgcacatacaacgtgcgctctgccacccggacgttcgcacccagcgccgcaaagccctcggcacaggcaaaacgattttcaaacaccctgtcctgcaggcagctttccccctgtgcgtagagcatcaccgccgccagcagcggggcggcgtccgtggcaaggcccgggtagggtgctgtgtgcacgtttcccgcgccgcgcagtgccccgaaccgcgaaatggcggcagcatcgcgtgcccgctctacggtgcagcccatttgttccagaatttccagcagcggggcatacagcccgggtgcgcagcccgccagttctaccctgccgcccgccgctgccgccgcgcaggccagcgtggaggcgataatgcggtctgccaccggcatgaaggtgcagcccgcaaggcagcgccttccctgcacccggatggtgtcggtgcccgcgccctccacgcagccgccgcaggcgttgagaaaggcggcaagatccgcgatctccggctcttttgcagcgccatgcagcacggtctgtccctgcgctgtggcagcggccagcagcagcgtctcggtagcgcccacgctgggaaagctaagacaaatttctgtgccccgcagccccgccggggcgtacagtgtaagccgtccgggcgctgcgggcagctgccgcacgcccatctgcgccagcccctgcaaatgcaggtcgatgggtcttgccccgatacggcagcccccgggcagtacggtgcttacccgccccagccgcgccagcagtggcgcacagaacaggatggacgcccgcatccggcctgcggcctccggtgcaaggtcggtgcgcataggctgtccctgcaccaccagttctgtgccctgccagcccgctgtgcagcccacgccccgcagcagggcaagacagtcctccacatcggtcaggcgcggcacattttgcagccgcaccggcccgctgcatagcagcgcagctgccagcagcggcagcacactgtttttggccgcaggcacttccaccctgccctgcaaaggccgcccgcctgtaatgatccaatccccagccatgccaagacccccgttctgcaaaagataccccatggtatgcaaaacgagggtctttggtcaacaaaatgcgccggaaacggctttcccgcagtctgcgggatttgtccggtcatttgtccgttttttttcgcatttccgcgccgctcctgccctgccgcggcaggaaatgccggtctttatcagctttcgccccgggagacggaaagcacgatgcccatctcgcccaaaagcatcatcaggctggtgccgccggaggagaaaaagggtagactgatgccggtgttggggatggtgttggtgaccaccgcgatgttcaacactgcctgcagcgccacctgcaccacaaagcccaccaccagcagtgcgccaaagcggtccggcgcgtgcgccgccagcgtgatgccccgccacagcagcgcgctgaacagcaatatcaccgcacacgcgcccagaaagcccagttcctcgcagaggatggaaaagatgaagtcgttctgcggctcgggcacgaacagatgcttctggcggctgttgcccagccccaaccccgccgccccgccggaaccgatggcatacaggctctggatggtctggtggccgtcgcccagcgggtcggcaaaggggtcgagccatgaattgagccggtcggcggcgtagggcaccagctccggcatcagcacgatagccgtgccgatggcggcagcgccgcccgctcctgccagcatgaaccaccgcagcccggtaccacccacgaacatgagcaccgcgccaatgctcaaaatcagcaccgtgccggaaaggtggggctccagcaacatgagcaccgccactacccccagcaccagcgcaaagggcaccacccccaccgcaaagctgtccatgcggtcgtggttcaaagcgatgatgtgagcaaacaccagtaccaccgcaaatttggcgatctcgctgggctgtaatgtacccagccccggcagcacaagccagcgcttgcagccgttatattccggcatgaacagcaccgccgtcagcagcaccagcgagagcgccaacagcggccacgccagcttgtgatagatatggtagtccacccggctggccgtccacatggccaccagtcccatggcggcgtacagcagctgcggccgcacataagcaaaggcgtcctgccgccggtacagcgccaccgcgctgctggcgctgcacagcatcaccagcccaaaggctaccagtgtgagcaccagcaccagaaagggcaggtccatgggcggcagcggccgcagcagccctttgcgggcagcagttctgtgcaatcccggtcacctccgtttctgttattgtacgcggatgcgggggcggttagtcatacgcaccgcccccgggcgcataaactgcccgcaaagggggtgctgccatgtgcggctcaaaacccacagacgccctgcgcaccctgccggagcgggcgttccgtctgcgggcacggcttattgcggtggggctgtgcgccgtctgctttgcagggctcatcgggcggctgttctggctgcaattatgcaccggcggctggtacacccagcgggcgctggggcagcagctgcgagacaccgttgtgcccgccgaccggggcaagatatacagtgccgacggcgcgctgcttgccgccaacagcagctgctggaccctgcgcgccagcccccgggagatgccggaggaaaagcttgcccttgccgccaaggggcttgcggagattctggagctggacgaggccaagctgctggaaaagttcaacgaccggcgctccaacgactgccttttgcgctaccgggtggagcgggaaactgccgatgccgtgcgggatttctgcgcagcgaacggcattaccggcttgcgcatcaatcaggactccaagcgctggtacccgcagggagagtttttggcctcggtgctggggttcaccaacgtagacaacgccggggtcagcgggctggagctcgaatacaacgacacccttaccgggcaaaacggagtggtgctgaccgccgtgaacgcttggggctacacgctggcgcagagctacgaaaccgaacttgcccccgtggagggcagcgggctgcggctgaccatcgatgcaaatattcaacattatcttgaaaatgcgttgaattatgcggtgcaagagcaccatgtagctgcccgcagcgtgggcatcgtgatggaagtgaacactggggcagtgctggccatggctaccaccccggcctacgaccccaaccagccccgggtcatcgccgataaggccgcacgcgctgccgtggacgccctttccggcaaagagcgcgccgccgccctgcagctggcgcagcagacccagtggcgcaacaaggcggtgagtgacttatacgagccgggcagcgtgtttaagctcatcacctgcgcggcggcgctggatgccggagccattacccggcactccaccttttactgcggagactctatctcggtggcgggcacgcggttccactgcgccaaccacaagcgccacggcagccagaccgtgacacaggcactggaaaactcctgcaaccagagctttatccagatcggggcgcggctgggcaagcaggctttctgcgattattttgccgccttcggcctgcgggaacccaccggcatcgacctgcccgccgagccgaaaaagagcctgtactacaccgccgaccgcatggggccggtagagctggcctcctgcgccttcgggcagagcagtaagatttcctatctggaaatggcctccgccgtctgtgcggtggtgaacggcggcaagctgatgcagccgtatctggtctcggatattcttgcgccggacggcagcgttttgcagcacaaccaaccggtctgcaggcggcaggtcatccagcccgccacctctgccaccatgcgggagatgatggaggcagtggtgctgtacggcggcgggcgcaacgcgcagatcgcgggctaccgggtgggcggcaaaagcggcaccagccagaagctggacagcgccgacgagaaggcgcgcattgccagctttgtggcggtagcgcccatcgatgacccgcagtttttgtgtctggtctgtctggatgagccacacagctggaccactgccggcggcagtctttcggcaccggtctgtgccgaggtgctggagcagacgctggtgtacaaaggagtcccccgggcagcagacaccggcagcgcagacgcgcaagccgctgccctgcccgctgatggagacagctttgatggggcgtgatgatttggaatgcgcgccgcgttcgctttgcgcataaacagcggaagaatgatttttaatttgcaattctggaaaatctgcggattttccagaattgccttttcacgggaggggtcgtggcgggaagcagcatttgcagcgccgctttctacgaaagcgcggcgctgcgggcgagcgcttgctccccctcgggggagctgtcgcgcagcgactgaggggcttttaatggagaagcgaaaaaagcgttaaagcgatagcgccgactggcgcagcgctagcttttttgtgcttcgacttcttctttaggattgtcaagggcgagcagcccttggcccgttgcggggtgggtggagtccagaggtagggaggggggagtcggaacacccctccctgcctctggcccagcggagcgtctttgcacgcttgcggcaagcagatacctttacccgcagcgccgctacaaatgctgctattcagccgcaaaaaaataacggaacgtccgcagacattccgttacgctgaaatgtataataatttttagttctggttcggctggggacggaaggtgatctcgccggtggtgctgtccatggcgtccacgatggcaaggctctccagctggatgcccttgctgcggatcagctcaccgccctgctggaagcccttttccacagcaatgccgatgccctctacggtggcaccggcttcctcggccagttccagcagacccatcagggcgcagccgttggccagaaaatcgtcgatgatcagcacatgatcctccggagtgaggaactttttggacacgatgacgttgtatatctttttatgggtgaaggactggatctgggtcttgtagttgtcgtagtccagattgatgctcatggattttttggcaaacaccaccggcacgttcagctcgctggctaccacagccgcaatgccgatgccgctggcctcgatggtgagcaccttattgatgggcttgcccgcaaacaggcgcttccactcccgcgccatctcgcggaacaacgggatgtccatctggtggttgataaagctgtccaccttgagtacgttgccctcgcgcacaatgccgtccttgcggatacgatcttccagcatcttcataaaatatatcctccaacccttgcaggtgcgttttctgcctccggctcgcccgccgcgaaaagcgcctgcctgttttccattcccgggcgcgcgccacacgcacccatcatataatgtttcacctagtataccggaagcatcccgctttgacaaggggttttctttccaaaattcgtaaaaatacggcaccaaacctcttcgttttttctaaaagtatgaccttgtccaaaaataccgaaacttcgtgaggttgtcgggtcatttttggtttatcctcccttgttctttcgcggtttttgagtatactattcttaataggagaagggtcatatccgggatttttgaccggacgaggaggaaaatggtatgaaaacaggacttgtgctggaaggcggcgctatgcgcggaatgttcaccgccggcgtactggatgtgctgatggagcataacatccagctggacggtgccgttggtgtgtcggcgggggcagtgttcggctgcaactacaagtcgcaccaaatcgggcgcaccatccgctacaacacggaatactgcaccgacaagcgctacgccagctttggcaacctgctgcgcaccggcaacctgtacagcgagcagttctgctaccataccgtgccggaaaaactggatccctttgacaccgaggctttccgggagaaccccatggacttttttgtggtgtgcaccgatgtacgcaccggcgagcctatctaccgcaagtgccgcaccggcaacgccgaggatatccagtggatgcaggcttcggcatccatgccgctggcggccaaaatcgtgaagatcggccactatcagctgctggacggcggtgttgcggattccattcctgtgcgctttttcgagtctatcggctacaagcgcaacctgatcatcctgacccagcccaagggttttgtaaagcagaaaaacaagatgctgccccttatccgggcaaggtatgtgcgctatcccgcttttgtggaggccgtggcagaccggcaccagcgctacaatgagacgctggcctatatttccatgctggagcagtccggccgggccttcgtcatccgcccgcccatcccgctggagattccctctatggagcgtgatcccgcccagctacgccgcgtttatgagaccggccgggccgtggcacagatccagatcgacaagatcgcagcctatgtggaggagtccaaggctacaacggaagaataatacgaaaggctgctgcacaggtttgtgcagtagcctttttttgagcggaatttgattttaggcttcagaaacgcctgcgggcgtctctgaagccttttttcacggagagatacaaaaagaggcctgcaccttgcggtgcagacctcttgatgttcaagaaagaacggtaagagaaggggttaaattacttaacctcaaccttagcgccagcctcttccagcttcttcttgatgtcgtcagcctcagcctgggagaccttctccttgacagccttgggagcgccatcaacgatagccttagcctccttcaggcccagaccggtgatctccttaacgaccttgatgacctgcatcttggtagcgccagcctcagccaggatgacgtcgaactcggtcttctcttcctcagcggcagcagcagcgccagcagcagcgggagcagcagcagcaacagcagaaacaccgaactcctcgcagtaggtgtcgatcagttccttcagctccagaacggtcaggcccttgacggactcgatgatggcagtaatcttctcagaagccatggtaataaccctccaatatcaatggttttagtttgtttcagttttttgttaagcggcggtcacgcggccatcaggcagcgggctcctcctgcttgtcggcataagcctgcattgcaacggccagaccagacagggtgctggtgagggcgcctgcaaacatggacagcataccttcgcggttgggcagctttgcgatagcgttggtctcggcggcgttcatagccttgccttccatgaagccagccttcacgacgaacttcttggacttatcgccatcctgatacttgcacaggatgcgggcagcagccatggggtcatcctcgtgagcaaaagcaacagcggtgtcgcccttgaagttctcagccagaccctccagagcggtacccttaactgccagacgcagcatggtgttcttcacgaccatgtaatcaacgcctgcctcacgcagctccttacggagcttggtgtcgttctcgacgttaatgccgccgtaagcgacgacgcagccggaaaccgcactctcaaactttgccttcagatcagcgacgtaagcctgcttttcagaaagaatctttgcactgggcattcggtttcacctcgtttcaaaaacttgtatcgaaagccggagcaatgaaaaaagcctctctcccgcgcactgcgccgagagagaggcataaagcaactttacgcacgtttctcggcaggcggtcaaactttacactggactccagcgcctgctgtcttaaaaacagcatgattataataccgcaaacgtgcggcgttgtcaagtacttttttcaatttccgacaaaatttttctgccattccgcagaacggcagaaaaacatcagaaatctaaattagacaccgtacttcagggtgttcagacggatgccagggcccatggtggtggcgatggtagcgctcttgaagtaggtaccctttgctgcagcgggctttgccttggcaatagcctccatcacagtgtccaggttggtgtacagcttctctgcaccgaaagaagccttgcccacgggcacatggatgatgttctgcttgtccagacggtactcgatcttaccagccttagcctcgctgacagccttgcccagatcgggagccacagtgccggccttggggttgggcatcaggccacgggggcccagaaccttacccagacggccaacgcggcccatcatatcgggggtagtcacgacgacgtcaaaatccatgaagccgccggcgatctttgcgatcagctcgtcatcgccaacgatatcagcgccagcagcctcggcagcagcagctgcggggcccttagcaatagcgcagacgcggacggtcttgccggtgccgttgggcagaacgacagcgccgcggacctgctggtcagcgtgacggccatcaacgcccagacggacgtgcagctcgacagtctcgtcgaacttggcggaagcggtcttgcaagccagctccagagcctcgttcacatcgtatgccttagtagaatcgaccagctttgcagcgtcgacatagtgcttgccatgtttcattgtatatcctcctgtgtggtcatgcgggcagtgttatgccctcccactgtttatgtctcagccctcgacggtgacgcccatggaacggcaggtgccgcgaaccatgctgcaggcagcttccagagaagcagcgttcaggtcgggcatcttggtcttggcgatctcctccacctgagcggcggtcagagaagcaaccttttccttgttgggcttgccggaagcggtgttgatgccagcggccttcttgatcagaacagctgccggaggagtcttggtgatgaagctgaaggagcggtcagcgtacacggtgatgacgacggggatcacataacccatctggttcttggtacgctcgttgaactccttggtgaacgccatgatgttgacgcccttctgacccagagcagggccaacagggggagccggagtcgccttgccggcctcgatctgcagcttaatgtagccagtaactttctgtgccatgataaatgcacctccaaaaatctgtggtgagttgcggcgcagtgtctctgcgcctcccacgagcgcgtacacgctgcacacgctctataagaaccgcactgcggtcttaccttggtaaacggaacttgccggttggttacggcagctcgacctgaccgatctccacctctgcgggggtttcgcggccgaacatattgaccttgagcttcaccttgaagttctcggtatcaatggcctccacaaggcccataaagccttccagaggaccggcggtgatctgcacggtgtcgccgacagcaaaatcgacgctgagcggtgcagccttctccacgcccatcttctccacttcctcagcggtcagcggaacgggcttggaggcggggccgacgaagccggtgcagccgcgcgtattgcgcacgacataccaggtatcgtcgttcatcaccattttgaccagaacgtagccggggaacagcttgtgctccaccatcttctgcttgccgttcttgtcgatctcaggaaccatctcgacgggaaccttgatgtcgcagatcagctcctgcaggtgacggttctccaccatggtctgcaggtcgttggcgaccttgttctcgtaaccggaataggtatgcacaacataccaaagagcctcagtggactcatctaccagcttggttgattcttccattttggttgaccctccgtttcaagatgattctcaggcgccgatgatcaggcccagaataccaccaaagatggcatccagcaggatcatcacaaccgctgcgatcgcgacggtcacaagcacgacgatggtgttggtcttgacgtcctgcttggacggccagaccaccttcttcagctcgctcttggtatcgcggaagaactttgcgacccgtgcgcagaagcccttgacagcggctttagctttggccacaaagcccggctttttctcggttttgtctgccattatgctccgcctttcttttacttggtttcgcgatgaacggtgtgcttcttgcagaaacggcagtacttcttcatctcgagacgatcggggttgttcttcttgttcttcgtggtgttgtagttgcgctgcttgcactcggtgcaggccagagtgattttaacggtcatttgttgacacctccattataacggttgttttgaacctccctcgggtgcgggtggcagctgtaaaaacaggcgcacttaataaccccgcaaaagaggtgatatcattgtaccacgcgtttttcaatccgtcaagcagaaaaaagcgattttgagaaacttttttcgcagccactgcctttttgtcccaacgcggcttttttgcattctgcttgcatcgcgggcgtagatattgtataatgaatcgaaacggcattttaccggtttgaagccgcccctttaccggggctttataaataggagtgagatatcatgcagtctgcaaataaaatgtgcgtggctctgttgtttggcggtatgtccagcgaacatgaggtcagctgtgtctctgtgggcaactttgtccgcaacatcgaccgcagcaaatacgaggtgctcaccgtgggcatcaccaaggagggccgttggctctacaccgaggccacggcggaacagatggccgacggcagctgggaagagctgcccggcaatatgccctgcgtgatcagcccggaccgcgccgaccacggcatgatcctgtttaccccggacggccgggtggaaaagatgcaccttgacgtggtgatcccggtgctccacggcctgtggggcgaggacggcaccgtgcagggcctgctggagctggcaggcatcgcctatgtgggctgcggcgtgctggcaagctctgtgtgcatggacaaggccgtagccaacgccctgtttgaagccaacggtgtgccccacaccaagtgggtagccgccaaccgttgggagatcgagaaggatctggagggcgtttgcgccggtgtggaacaaaaactgggttggccggtgttcgtcaagcccgccaacgcaggctccagtgtgggcatctccaaggtgtccaatcaggaggagctgaaggctgccatcgcccttgcactggaaaacgaccgcaaggtggtatttgaggcctttgtagacggacaggaagtggagtgcgccgtcatcggttctgaccccgctgttgccacccgtcccggtgagatccttgccggtgcagagttctacacctatgatgataagtacaagaacggcgtgagccagaccgtcatcccggcacatctgccggaggccaagctggacgaggtaaagacctacgccgccatggcctacaccgcactgaactgcgagggtctggcacggtgcgatttctttgtggaaaagaacaccggccgggtgctcatcaacgagatcaacaccttccccggctttaccgccatcagcatgtaccccaagctcatggagcacgagggtctgccggtgccgcagctcatcgaccgcctgatcgcactggcggtggaaaggacggaaaagcagcatggataatcgccccatcggtgtgttcgacagcggtctgggcggcctgaccggtgtgcgggagctgcgcaagcgcctgccccatgaggatatcatctacttcggcgataccggccgggtaccctacggcagccgcagcccggagaccattctgcagtacgcccggcaggacgtggcctttctgctttccaaaaacgtcaaatgcatcatggccgcctgcggtacggtgtccagcacctacccggctgcggaagcagcccagctgccggtgccctaccttggcgtagtggatgccgccgcccgggaagcagcctttgtcacccgcaaccgccgcatcggcgtcattggcacagccgccaccatccgctcccgcagctacgaaaagctgctgcggcagctggtgcccggggtggagatcactgcccgtgcctgcccgctgtttgtaccgctggtggaggccgggtatgtggatcacagcgaagccggaaagcagcagatcacaaagttggtcattgcccagtacctgaccgaggtgcgcgaagctggggtagataccctgattttgggctgcacccactacccgctgctgaaaagcatgatcggggagtttatgggcccgggcgtcacgctggtggaccccgccatgaccgccgcccatcatctggagcggatgctcgccgagcgcgggctgcgtgccagccatgaaagcgggcaggcacacttttacgtcagcgatgtgccggacagctttgtgcagacggcagacctgtttctgggcgagtacaaaggcggcccggtggagcagatcgccattgataaatattgataaggaaaaacaacgtgagcaagccactgaaggaagactatatcatccgcattaaaagccgcattgagcagcggctggacgaaccggctgcggaggaagaaaaagaagaatttgtggagctgatgacccggggcagccttgtgctgaagggcggcagctactatgtgacctaccgcgagaccgagaccaccggctacgagggctgcaccaccactctgaagatcgccgcagacggcagccgggtggcgatgctgcggttcggcaagggcggcggggctggtacccagctgctgatcgaaaaaggccgccgcaacctgtgccactacgagaccggcttcggctccatgaccttgggcgtgactgcggacgagatcgactgtcagctgaccgaaaagggcggcaccgcccggtttgcctacctgctggatgccgacagcgccgagctggtgagccgcaaccggctggaagttaccgtgacccatgtgaattgatgaagttccctgagactgtgaaaggaatccgacccatgactgattttgaaaagacctaccagaactacaacccccggcaggctgcactggacgaggcacgcgctctgctgaccgcagccgccaaggctgccatggcagacggcaccctgcccgaggcagaactgcccgcctttatcgtggagatccccgccgacgtgaaaaacggcgatatcgcctccaacctcgccatggccggtgcacgcacttggcgcaaggctcccaagatgatcgcagacgccctgctggcacatctgccctcccttgagaacagcgttttctccaaggtggaggttgccggtcccggcttcatcaacctgttcctgtcccagagcttctgggcaggtgttgtgctgggtgcctgcgccaacaaggagtatggccgcaccgaccacggcaagggcgcaaagtacaatgtggagttcgtttctgccaaccccaccggccccatgcacatgggcaacgcccgcggcggcgcactgggcgactgtctggccgctgtgctggattggtccggctacgatgtgacccgcgagttctatatcaacgacgccggcaaccagatccagaagttcggcaaaagtctggcggtgcgctacctgcagcagttctgcggtgaggatgcctatcccctgcccaaggagtgctatcagggcggcgacatcaaggtgctggccggggagttcgctgagctgaacggtgacaagtacgttgccgcctgcaagggtatggacgaggaagctctgttcgagagcgaggcctttgccgccctgaaggacgcactggtggcctacgccctgcctaagaacattgctgccctgaagcgcgacctcggcaagtaccgcatcgactacgacgtctggttccacgagagcaccctgcacgagtccggcgcagtgctggctgtggtggacaagctgctggagctgggtgcctgctataaggccgaggacggtgctatcatgtaccgcagcgcccagtacgctgccaagtacggcaccgtgaacaagaaaaagaccgaggacggcactgaggaggaggccaaggacgaggtactcgtccgcgccaacggcattcccacctactttgccgccgatatcgcctaccactacaacaagctggctacccgcggctttgccaaggccatcgacgtgtggggcgcagaccaccatggtcatgtggcccgcatgaagggtgccatggatgccatcggcctgaatggcgaagatctggatgttgtgctgatgcagatggtcaacctgatgcgggacggtcagcctgtccgtatgtccaagcgcaccggcaacgccatcaccctgaccgacctgctggaagaagtgcccatcgacagcgcacgcttcctgttcaatatgcacgacgccggcagcggcatcgactttgatctggatcaggccgtcaaaaccgacaacgacaaccccgtgtactatgtgcagtacgcccacgcccgcatctgctccatcctgaagaagatggagagcgagggtgtgcagtttgccggtgcggagcacatcgatgccaccctgcttaccgagccttccgagatggatctgatccggatgctggctgccttcccgcaggagatcgtgatggctgctgagaagtatgaccccagccgcatcaaccgctttgtcatcgatcttgcaagcgccttccaccgcttctacggcaactgccgcattcagggcgcagaccccgccgtgcagcaggcacgtcttgccctgtgcatcggcgtgaagaacgccatcttcaacgtgctcaccatgttcaagatcaacgtgcccgagaagatgtaacataaaatcacaggggctgttgcacagcatttggcgcaacagcccctttttacggtgtatgaagagaaagcagctgccgcttccgtcacgattcctcccgtgaaaatgcgtttggagcgctccgcagagcgcgacaaacgcgaaattaaaaataatttttccgctgaatatgcgcaaagcaacgcggagcgcattccaaatcgtctacccccaaaacagatacaaggagaacccatggaacctttgaagatcggcaatatcaccctgccccaccgtgcggtgttcggccctatggcgggctttacggatgccccctgccgccgcctgatggcgcagcacggtgcgggctttacggtcagcgagatggtatccagccgggcgctggtgtacggcgaccataagaccgtcagcctgctgaaggcagcgcccaacggcgcaccctatggagtgcagatcttcggcgaggtgccggagatcatgggcgaggccaccgccgccattgagcagtacgaatttgactttgtggacatcaacatgggctgccctgcccctaagatcgtttccggtggggcgggcagcaagctgatgctggaccccgaccgctgcgggcgtatcgtggagcaggtggtggcgcacaccaagcgccctgttaccgtaaagatgcgcaagggctgggatgccgaccacatcaccgccgtggaatgcgccaaggcctgcgagcaggcgggcgcggcgctggtggcggtgcacgcccgcacccgggagcagatgtacaccccgggcatcgacccggagatcatcgcccgggtaaaggatgcggtaaaggtgccggtgctgggcaacggcgatatccactgcgccgaggatgccctgcgcatggtgcggcagacgcactgcgacggcgtgatgatcgcccggggcgcactgggcgacccgtggctattcgagcgggtgaacgccgcgctggagggtctgcccgccccaaaggagccgaacctgcaagcgcggatgaacgcgctgcgccgtcaggtggaggagatggtagagcagaagggcgagtttgtggctatgccgcaggcgcgcgcccagaccatgcactacatgaaggggctgaagggtgctgccgccctgcgccgctactgctgcaccctgacccatttagaggacttggacgagctgatcgccgccgtgtttgaagagcagcgcaaggccggactggaccccgatgatgtgcgggaagtaccgtttccgtaagcccgcggctcgaacaacgatttagaatggcttccgctgtgctctagccatgttcagcggaaagaatattttaaatagagcaatgccggagcgtctgcggacgctccggcattgcatttttcacaggagaggtcgtagagagaaacggcatttgcagcgccgcttcctacggaagcgcggcgcttgcggcggacgtccttgctccccgggggagctgtcgcgcagcgactgaggggcttcaaatcggcggagccgaaaaaaacggttaaaagatcttcacgccgaacaggcgtgaatcttcagtttttttcggtgcagcccacttcttcggggttaaaaggggcgagcagcccctttttcgtggctccagcgcgtcgaaatcgctggtggttttctggttctcttttgccaccaaaagagaacctccctcggctgcccgctcctcgcctttacgccttcgtcaactcgtccagattctgagtatagcagggcagacagtgctccaaaaaccagtcggcctccgggcattgcatggcctgcagcgcggcgcgctgctgcgtgagcgcggcgtcaaattcgtggttgccgctgcgctgctcctcggtgcatttgatcagcgcgctcagccggtcggcagccttgagcagccggtgctcctctgccgtcaggacgctgccgtccatgcagggggtcagctctgcagccagctctgcgggcagcagagccgccatggagcgcacgctctcggtctccagcgccttgtaggcgtcccgcagcgccggggaatggtacttgaccggcgtgggcatatccccggtgataatctccggcgcgtcgtggtacagcgccgccactgccaccacctcggggcggcagggcgtgccggtgtagtgcttggcgatgaggcacagcaggtgcgccagcagcgcggtgtcacaggtgtgctcgctgagggattccggccgagtggagtgcatcaggctccaccgggtaatgtacttcatgcgcgccagcagagcgctgaagggatacagcatggcaatacgcctccttttcttcaccatacccgccccgcgtgcgcttgtcaagcccttttttcttgcgcgccgccgtgctatactacaaggtgacatcaaatccacttccgcgccggtgcgcggagaaagaggaacgctatggaaaagttcaaaaaaccacggctgctcaccccaagggggcagagccataaaaaattctggcaggcggtggggctgtgcgccctgacggcggccatcttctttttgccgttctacatccttgacggcggctttttccactatgcaggcgattttaacagccagcagatcaccttttaccggtatatgaacggcttcgtcaagggcgcaggttacccggacagtgcctttgccggtgcgccgcgcaataccttttcgtgggcgaccgaccttggcagcggggtgatgaacgcctactccttctacctgtacggctcgccgttcttctggctgtcggtgctgctgccgcagagctggctgccctatatgatggtgccgctgctggtgctcaagttcggcgtggcgggcggcggcgcgttcctgtatctgcgccgctacgtcaaaaacgagaactacgcggtgctgggtgcctgcctgtacgcgctttccggctttgcggtgtacaacgtgttctttaaccactttgtggatgtggtggcgctgttcccctatctgctctgggcgctggacgaggccatttatgaaaaccgtcacggcctgttcgccttctgggtggcggtgaatctgctcaacaactacttcttctttgtgggacaggtcattttcctgtgtatctactttgtgtgcaaactgactgccaaggacttccggctgaccgggcgcaagttcgggcatcttttgtgggagagcgtgctgggcgttgccatgggttgtctgctgctgttcccggcagtgctcagtctgctgcagaacccgcgcaccattgacctttcctccggctggggctttttggcctacgccaaggtgcaacagtatctggctatcctgctcagctggatcctgccgccggactccccttacctcacctcggtgtggtcggagggcgtgatcaagtggacgagcatgacggcctacctgcccctgtgcagtctggctggtgccatggcctactggcgcagccgcaaggccgacagcaaaaagcgcatcgtggcagtatgcgccgtgtgcgcgctggtgccggtgctgaacagtgccttctacgcgctcaactccagctactacgcacgctggtactatatgcccacccttatccttgccgccatgaccgtgaacgcgctggaggacccggatgttgatctggacgcccccgcccggggcatcggctggatcatgctggctacgctggtgtttgcggtggtgcccgtgcgggacgataccaccggaacatggtccttcggcgtgctgaagaacccggaacagttctttgtcgtgctgggctttggcctgctggggcttgcactgtgccgctacctctgcggcatatggcggcaggacagccgctttgcccagcgcatgacggcggcggtgctggtgtttgcctgcgtgttcagcatggtgcacatcggcattggcaagttcggccagtggcacaccgacagcgaccttgtggaacaggataccaacgccctgcagctgaaaaacgacctgccggagggcgactaccgcatcgacacctacaagatccacgacaacatcgggatgtggctggataagagctgcctgcaatacttcggcagcacggcggctcccagcatcctcagcttttacccggggctgggggtcaagcgggacgtgcgcagcgagccggagatcacaaactatgccctgcgcggcctgttgagcgtggagtacctcattaccaccccggaaaagcgcgatagctttgaggacgaggcagacgcgggctggacctatcttgccgacgtggacggctacacgctgtaccacaacgataactacgttcccatgggttttacctacgactactatgtgaccaagactacctatgaggcctcggtcaagaccctgcgctccaatctgctgctgcgggcgctggtgctggaggacgaggacgtaaaggcatacggtcagtacctgaccgagctgccggacgcgatgctggacgacctgcactacgacagctacacgcaggactgcgccgaccgccgcgcccacagctgctcggtgttccagatgaacaacgcgggtttccatgccgagatcacgctggacaagccaaacctcgtctttttctctgtgccctacgatgacggctttaccgcctatgtcaacggcgaaaagaccgacatcctgcgtgtggacgagggactgatggcagtgctctgcccggcgggcacaagcagcatcgactttgtgtatcaggccgccgggctttccgcaagccgggtggtgaccgcagtggccatcccggtgtgggtggtgtacgttgcttactttgtgcgccgcaagcgccgcagcaccggtgccccggcagaagaatgactttgaccgggccaaaaaataaaaatttaaaaatccctcttgactttacgaagataaagtgtataatgcaatcaaaccgatgaggcggaagagaacctgcacagcgcatttgcagtgagcccggacagtgcaaacgggcgaaagcggggcagagtttcgtgggccgccgagggccgggcaaacgggcacaaaccccagtagctttggacggaagtctccgttacaggacaggggagtgttggctctccgtgagtggctctgctgtattggatgcagagcaagcaaggtggcaccgcagaatcgtatttaccgatcctgtccttgtggataacacacagggacagggtcgttttgttttaagacccgtcccgcaaagggagcgggtcgtttgatttgccgcccgctccgggaaaggagttaccactatgaaaaacctgaacatgatctcccgccgcagcttcctgaaggccgctctgaccgcttccgctgtttctgccatggcactgaccggctgcggcggcgctgcttccagcaccgcctccagtgcagcagtctcctcctccgtagcggcttccggcagtactgccgccgctggcgagactttcaaggtgggcatcgtcaactatgtggaccacgcctcccttaaccagatcgtggaatctgtggagagccgtctggacgccatcggcaaggagaagggcgtcacctttgactacgccgattactacgccaacgcacaggccgaccagtccaacctgaaccagatcggcgcagaccttgtggctgacggcgtggacgtgatcgtagccgtggccacccccaccgccgctaccatgctggctgccgtggaggacaccgacatcccggtggtctactccgctgtgaccgatcccgctgccgcaggctttgacggtgaggagaacatcaccggcacctccgatgccctgaacaccgacgccatcatgaacctgatcgtggcggcaaaccccggcatcgataccatcggtctgctgtatgacctgagtcaggatgcctccacccaggccattgcggacgccaaggccttctgcgagaagaacggcatcaaggtggtggaaaagaacggcaccaccaccgccgaggtgcagatggctgccgaggcactggtagccgccggggtcaaggccgtgttcacccccactgacaacaccatcatgaccgccgagttgtccatctatgagagcttcatcgaggccggtgtgcagcactacaccggtgccgacagctttgcgctgaacggcgcactggtgggctacggcgtggactacgtccagctgggcgaagctaccgccgatatggtcagccagctgctgtgcgacggcaagacccccgcagacctgccctaccagacctttgataacggcatcgtcaccatcaacaccgagaccgccgaggctctgggcttggatctggctgccctgaaggaagctttcaagccctactgcaccgagatcaccgaggtgaccaccgccgagagcttctcctgagcaccccgctccgtcaaaacctgacggcttttccggctctcccgcaagggagagcttttggcggttctggggaaagtggtttccctctcccgtgaaaatgcgtttgtcgcactccgcagagcaatgcggtgcgcattcaaaataacataaaaggagcatacaccatgctggcgagtatcttttccctcaacgttttgcagacagcgctggagctgggctgcatctacggactggtggcgttggcgctgtttctcagctactccatcctgaatattgccgacctttccaccgacggctgctttacgctgggctgcgccgtggcctgtcaagtggcgttgaccggccaccccatccttgcgctggcggcagccatggctgcgggggtgtgctccggctttgtcaccgcctttttgcagacaaggctcggggtggaaagcatcatggccggtatcatcgtcaacaccggcctgtacaccatcaatctggcggtgatgggcttctcctccaccatgtcactggtcaagacccctaccatcttctccatggcaaaaacttcgctgggctttctgggcagctggtacaagctggtgctggcggcagttatcattgccatcgcctgcgcggcgatgctgggttttctgggcacgcggctggggctttccatccgcgccaccggcgataacgccgccatggtgcgggcttccagcatcaaccccgcctttaccatcactgtgggtctgtgcgtatccggtgcgttgtgtgcactgtccggcgggctgctggcacagtaccagaaaagctgcgatatcaacgtgggcaccggcatggtgaccattgcactggcttccctcatcatcggcgagacgctggtaggcaagcgcaccatgctgcgccgcattctgggcgtggtgttcggaagctgcctgtaccgctttatcgtagccgtggcgctgcggttcaacgtgcccgccgccgccatgaagctggtttctgccatcattgtggcagtggccatctccatgcccgccatccgggagcacttcgcctttgaaaagcgccggcacgctgcccgtgcccgccgcaccgtaaccaacagggagggacagtaacatggaaatgctgcagctgaacgacctgcacaaaacctttaaccccggcaccgtcaacgaaaaagtggcgctgaatggggtgagcctgcagatggaagccggagattttgccaccatcgtaggctccaacggcgcgggcaaatccaccctgttcaacgccatcaccggcggctttattgccgatgagggcagcattctgctgggcgggcaggacatcacctttgcgccggagcaccagcgcagcaaggtgatcggacatctgttccaggacccgctcaagggcactgcgcccaacatgaccattgaggaaaatctggcgctggcctacctgcgggcaggcactgcgcccaacgccatcttctcccgcatctcccgcaaggataaggcgctcttccgcgaaaagcttgctttgctggacatggggctggaggatcgcatgaagcagccggtggggctgctctccggcgggcagcggcaggcgcttaccctgctcatggctacccttgtcacgccgaagctgctgctgttggacgagcacaccgccgcgctggaccccgccaccgccgaaaaggtgctggcactgaccaagagcatcgtggccgagaaaaagatcacctgcctgatggtgacccacaatatgcatcaggcactggaactgggcaaccgcaccctgatgatggacgccgggcgcatcgtgtttgacgtaaagggcgcagcacgcagcaaaatgaccgtggacgatctgctggaaaagttccgcgagaatgcgggcaaaaatctggataatgaccgcatcctgctgagcaaggtggagaaataagcctgccgtttttctcctcttgtgaaaagtcgaacagccaagcccgcagacttggctgttcgtgtattatagataacaattccgccaaaaagcaaaaggcctgctgcaccgtgcggtgcagcaggccttttcacttttattcttttaccacaggcggatgaccttgatgacgccctcggccttatcgcgggccagttccagatggtgctgcagcgccatggctgcgccgtcccagtcctcggacagggcggcatccaggatctgcaggtgctcctcacaggtctgctcctgattgatcatgctcaccttgccggtcatgatgcggaaacgggtgttcaggccggtgatgcggtcgtaggcagagcgcagatacttgttgggcagggtgctcatcagcagctcgtggaagtcgtcgtccgacttgcagaagtcctcgatgcgctcgctgtggtgcatcagctcggcgtaggcctccagctgctcccgggggatggcattgccgtaagtacgcagggcgtagggctccaccaaaagacgcatctcaaacatactgtgcacgtcctcttcggtgatgccggagaccatcagaccctttttgggcagaatggtgatcagcccctcctgctccagacgccccagcgcatcccgcatgggggtgcggctgatgttgcccatctcggcgcagagcttctgctcgttcagaaactcgttggggcggtactcgcagttcaaaatcttggttttgaggtactggtacgcctgcagcttcaggctgagctttgcctgtgcgtcctgctctttcataagcacactctcctattcttcttctccaaaaaacgttccaaaacgtccgaaccggcagcacaaacccaccgctgccggtttcttcttcatgttcagccagcttgtatcccggctgcaatccaaccactttatctaatacattatttcacatcagggcattttttacaagactttttgcttaactttggagtgttttccgttttatacaaagattacgcctcgattttgctactttttacaatgttttttgtgcttgtcgccaaacaggccgactttccgcccgcttcttttgcatccaagcgcaaactgtgctacaataggggtaaaaaacaacacatctacaccggaaaggaccgaaactctcatggcacgaagcgatggctacaacacccgcacccggcaactcatcttagactacctcatcaacaactgccagcacgcggtaagcgcctccaacattctggagcatctggaggcgcagggcgcaagccccaaccccaccaccgtgtaccgctatctggataagctggcgggcgagcagcgcattatgaaatatgtagccgataaaggcgagcgggcggtgttccagtatgtggacgagggacgccactgccgggagcacctgcacctcaagtgcgtgcagtgcgggcgcatctatcacttggactgccattttatggatgaggtgcgcgctcacctgatggcggagcacggctttaccctgcaatgcgagggcagtgtgctgtacgggctgtgccgtcattgcgcgcagaacgcggcaccgtccgcagcggaagaacagcctgcaaaaaaatgcacctgctgtgttgacacggacaaaaacccgtgatacaatgcagacaataaaagcgttgaccgggaaaagtaaggtttcaggtttttcttgcagagagcgcgggacggtggaaaccgcgcagaaaacgaagcccgaagaacacccgtgagccgctccctgaacctgcatgcgcagcagtaggggcagacgtgcgccgctcgttatcgcggcagtgctttcaacggggagagcgcacaaaagtgaccggcgtattgcgtatgccggtaatttaggtggcaccacggatacggcagcatattcgtcctaggactatgggatgaatgtgctgccgtatttttatttttatcgtttttacaagaggggtaagaagtatgtgttgtgttatgggttatacggggcacgacctgagtgccgaaaaattcaaggagtatctgctgcgcaccgtggaccgcgggccggacgaccagcgggtggtggagggtccctacggcctgatgggctttgggcggcttgccatcatgggactgaccccggaggggatgcagcccttttaccggggcgctgactgcgtggtgtgcaacggcgagctgtacggcttccggttcgaaaaagagatcttaaagcgccgtggctacaagttctgctccgactgcgactgcgagatcctgctgccgctgtactacgagtacgggctggatatgttccgccacatggacgcggagtttgcacttattatgtatgattcccgcaaggacaggctcatcgccgcccgcgaccccatcggcatccgtccgctgttctacggctactccaagtccagccacaagatcgccttttcctccgagatgcgcaacctcatcggctggtgcgatgatatccgtcccttccccattggcagctactactgcgacggccgctttgtgcgctacgaggacattgccgatgtgcccgcccccatgcaggacgatatgcccaccatcctgcagaacatccgcgagaagctgatcgccggtgtggaaaagcggctggacgccgatgcacccgtgggcttcctgctttccggcgggctcgactcctccttggtgtgctccattgccgccaagaagctgggcaagcccatccgcacctttgccatcggcatggacaccgatgccatcgacctgaaatacgcccggcagactgcggactatcttggcagcgagcaccacgagatcatcatcaaccgcgagatggtgctcagcagcttggaagaggtcatccggctgctgggcacatgggatatcaccaccatccgcgccagcatgggcatgtatctgctgtgcaaggccatccacgagcagaccgatgtgcgtgtgctgctgaccggcgagatctcggacgagctgttcggctacaaatacaccgactacgcccccaccgccgatgctttccagcaggagagccagaagcgcatccgggagctgtacatgtacgatgtgctgcgggcagaccgctgcatctcctccaacagcatcgaagcccgcgtgccctttggcgacttggactttgtgcgctacgtcatggccatcgacccggaaaagaagctgaaccgctacggcaagggcaagtacctgctgcgcaaggcctttgagggcgactggctgccgccggagatcctgtggcgcgaaaaggccgctttctcggacgccgtaggccacagcatggtggacgacatcaaggagtacgccgagagcctgtacaccgacgaggagttccagatgcgccgggcaaactactcggcacactgcatgccttttaccaaggagagcctgttctaccgcgaaatttttgagaagtactaccacgaccaaagccgcaccatcgtgggcttctggatgcccaacaaagcatggccgggctgcaacgtcaacgacccctctgcccgcgtgctggcaaactacggtgcctccggcgtataacgccagagcatttttcagcagaaaactttttatgatttcggaacaccggagcatctgcggacgctccggtgttccatttttacgcaaaaaagcccccgccgacagagggaaaaaagtgtcggcgggggctcaggaaaatgtcaaatcaggggttcagggctcagtcgtctgcggcctcgtccagattgcccagcttcttggcctgctccacaacggcaggcaccagcatctcgggcagggtctcatagcgggcaaactcggtggtgaaccaaccgcggccctgcgtggtctgccggataaaggtggtaaagtttgcaagctctgccagcggcacctcggcgatgatggtctgcaagccgtcctcgtccggctccatgcccagcacacggccacggcgcttggtcacatcacccatgatgtcgccggtgttgtcgttcggcacatgggccttcagggtgtggataggctccagaatgacggggccggcctccggcatagcagctttgtaggccagctttgcagccatgataaaggccatttcagagctatccaccgggtggtagctgccgtccagcagggtggccttcaggccgaccacggggtaaccggccagcacgcccttttcggcagccagacgcacgcccttttctacggcggggaagaagttcttgggcacgctgccgccgaacaccttttcctcgaacaccacctgctcgctgtcgcagggctcgaagttgatgataacgtcaccgaactggccatgaccgccggtctgcttcttgtggcggccctgtttctggcaggccttgcggatagactcgcggtaggcgatgcggggagcttccagaccgatctccacgccgaacttgttcttcagcttggccttgaccacgtccagatgctgctcgcccaagccgccgatgacctgctgatgggtctcggcgttgttgatgtaacacagggtgggatcctcttccatcaggcgtgccagtgcgctggagatcttgccctcgtcgcccttcttggccacggtaacagccataaacaggctgggcttggggaacacaggtgcgggcagcttgaccacgcggtctgcatcgcacagagtatcgccggtctttgcgctcaccagctttgccactgcgccgatatcgccggcaccgatgccgtcgttctccatctgcttcttgccaaggaccgtcaggggtttagtgatcttttccacctcgccggtgcgggcgttggtcagcggttcgcctgcggtcaccttgccgctgataacacgcagatagctcagcttgcccacgaacgggtcggccacggtcttaaagacgtaggcggcagtgggctcatcctcggtgcagtgcagttccaccggctcaccgttggcgtcctcagccagcgtgctggcctcgtgctccgggctgggcagcagcttgtgcatattgaacagcagcatatccagtgcctgcatattcacggcgctgccgcagaacacgggggtgatcaggccgtccttaacgcccttgcgcatgccctccacgatctcctcggtggtaaagggttcgccgccgaagaacttttccatcagctcatcgtcggtttccgcaatggcctcgctcatggcctcgatcaggccctggaagcggtggccgatgtccggcaggtctacctgaatctgcttgccgccctcgtacttaaaggccttctggctgaacaggttgatgtacacaggggtgccgtcatccagctttgcgggcacgacacaggggcagacggtggagccgaagcggatcttcatatcctcaaggatcttgaagtagttggcgttttccagatcgcacttggagacgaacaccatggtggccttgccgttcttgcgcgccagctggaacgccttttctgcgcccacggtaacgccgctgcggccggacacgcacaccagcacgctctcggcggcgcggatgccctcgtactcgcctgcttcaaagtcgaacagacccggtgcatcgatcaggttgtacttgatgccctcgtactccaccggcacaacggacgccgacaggctggccttgcgctttgcttcctcgggatcaaagtccgaaatcgtggtaccgtcctcgacccggcccatacgctcggcagcgcccgaaaaatagaccagtgcttcggtcagcgtggtcttgccgctgccggcatggccggcaatcagaatattgcggatgttgttgcttgcgtatttcatatcggtttttccctcatttccgccgcacggagcgttctctccgtttttgtggcatattttacaaagataataccacatctgaaacgatttttaaatatatcgtttcaaaatttggcaaaaacgcctgccaaacttccgggcactgttttgtgcaagttgacattcgggtgcaaaacgggtgggtagaaaaagcagaactcccggcagcgcgtacaggcgcggagccgggagttttcgttgcaaatatgcggtttttgtggtatgctgtaagtgccgcttcggcggtaagggcgttgattgcataatcggtggtttagctccttccggctgcgcgccagagggggacgaaaaactttttgcttcccctgacgcgaaagcggaaagggtggatgcctcatgacgttcgaacaggtcgtgctgttgctcacgcttcttggcgaagcaatctacattaccttcgagatcgcatggacgatttccaacggcaaaaagaaatgaccgctcatgccctcagaaagcaagcggtcattctttacgactgattagccggatgaggagctgaccattgcagtcagcgctctttctattcgtagtatagtctatttttccgggtttgtcaagtcgcagacccgccggaagaggcaggaggttttacgcgatgaagcgcgaggattatatcaactgggacgaatattttatgggcattgcgctgcttaccgccatgcgctccaaggaccctaacagtcaggtgggcgcgtgcatcgtaagcccggaaaacaagatcctttccttaggctacaacgggatgcccatgggctgcagcgatgacgagatgccctgggagcgggagggtgcccccctgcagaccaagtatatgtatgtctgccacgccgagctgaacgccattctcaacagcgcccacaacaacctgaagggtgcccgggtgtatgtgaccctgtttccctgcaacgagtgcaccaaggccatcatccagtccggcattgccgaggtggtgtactacggcgacaagtaccacgacagcgattccagcattgcagcgcggttcatgttcgagcacgccggtgtccggctgaccccctataagcccaccggacgccgggtagagctggagctgtaagctccctcttgaccttcccgatgcaacgtattataataggatcaaagcttgaataaatattcaagagcgtttgcatagagagggaaatatacaatggaactgaaaaaccgcagctttttgaagctattggactacacccctgccgagatcgggcagctgctggagctggccgctgacctgaaggccaaaaagaaggccggtatccgtcacgaccagctgcggggcaaaaatattgctctgatctttgaaaagacctccacccgtacccgctgcagctttgaggtagccgcccacgatctgggcatggaagtgacctatctggacccctccggcagccagatcggcaaaaaggagtccatcgccgacaccgcccgggtgctgggccggatgtttgacggcatcgagtaccgtggctacggccagcagatcgtggaggatctggcaaactacgccggtgttccggtgtggaacggcctgaccaatgagtttcaccccactcagatcctggccgatttccttaccattcaggagcatttcggccatctgaagggcatccacttcgtttacttcggcgacgcccgctacaacatgggcaacagcctgatggtaggctgcgccaagatgggcttacactttaccgcctgcgcccccaaaaagtaccagccggatgccgcgcttgtggaacagtgtcaggccattgccgcccagaccggggcgaccctctcctttgaggaggatcccgtcaaggcagcaaagggcgcggacgtgctgtacaccgatgtgtgggtgtccatgggtgagccggttgaggtgtgggcggagcgcatccatgatcttgccccctaccagatcaatcaggatctgatgaatattgcaggcccggatgcagtatttatgcattgcctgcccgcctaccacgaccacaagaccaccgtgggcaaggagatgggcgaacgctttggccgtgacgccatggaggtgaccgacgaggtattcgaaggcccccagagcatcgtgtttgacgaagccgagaaccggatgcacaccatcaaggcggtcatggcggccaccttgggatatcaggaataaaaagataagcccggaaggttcgcagaccctccgggcttattctatctgaaaataattttccgcctagcgatcattccgaaactgcattctgcagtttcagcacgcctgcctgcgtcaggcgcttacgcagcagcgcacccacgatgcaggacaccacgatctttgcaagatccagcgcaataaaggggtagacgcagacggtcagcgcgtagcccagctcgcactgcatctggaacacgaaccatgccgtgcccagcacatagcaggcggcatcgcccagcaccagacccacagcggaaaccaccgggttgcccttgctcttttcaatgaacatgccgccgatgaaggccagcagcagatagcccaccagatagccgccggtagggcctgccagcttggcaaggccggcaccatagccagagaacaccggaataccgatggcgcccagtgccagatagataaccacgctcagggtaccgaacttcggccccagcagccacgcagtcaggcagatgacaaagtttgccagcgagatgggcacggctccgatgggcacggtcagcgggcccagcacgcacagcacggcagccatcacagcggtgacagccatctgataagtagtcagttttttgtctttcatagtcagttttcccctctgttttttcgttttgtaaggcatctgtgcccgagtataccgcaccggtgcgccgcaggtcaacggaaaagtttgcaaagggtttacaatcaacagatatattgtaatccgtcgaaaaatatgatattctaagaatacggcgctgattgcataatcggtggtcatgctttcccatcccgcagcactgcttcttcctgtacatggaacgaaccagcggcttgtgggaggagaacttttttgagccaagcctccccaagccctgaaggcgaagggagggatgtcagatggatctgtcggagatgctgaacctgctgatggtcattcttacgctgttgggattgatcattgaggtaattcgcctgacccttgaggtcatggataaagcttcgcagaagaaaaacgatgacaacaaaaaagattgaccgccccagtctaccaaactagcggtcaatctttttgactaatgcgggatggaaagctgacctttgcagtcagtgccccttctgtttatagtataatcgcaccatcgtgttttgtcaaggaggttcccatgggtggaggtcatgtatcgcggccagatttcgggatgccgcagccggatgcggcgtacccgctgaccgagttctatctgttggcacagcaggcgctggaaaaaagcggcagctttatgctgcccgccctctacgcagggctgcacgcccccgcccggcgcatctaccgggaggaagccgccgggtatctgcagcttgcggcagttccggcagagggcttgacccggctgctctcccctgcccggatgcagcttttatatagcagcctacaggtgcagcaggacggcacccccgccgccctgctgctgactgaggagtgcacccgcctgaccgtggcggtgcagctgctgccgccctttgtgtgggaggacccgctgccgccgctgccggatgttccggcggcgctcaccctgcaactgaccacgcaggacgtgatggccatcgacacttcccccgccgcactggcgcagaagctggtgcacagcaccgacggcaaatgctggctgcatcaccccaaggccgagacctttctctctgagcggctggcgctgctgcaaagggtctataaataaagaaggagcaccctccccctcttttacttttttgcgattccgtggtatactgaccggtaaaccgacaggatatccaacccctgtcggagaacgtggacacaccttgcggtccggtgcgtccggcacacaaaaaatggaaggaaccgggttttattctgcaataatcggggatgctgagccgtatattgagtgaacgtccccgtgagaaccacaaacattccatcgagaagcccgcttccgggcatccaaggagagtttatacaatgggacagctgaccagaaacgaagtatttaccttggcggtgcagcgttacagcgacaccgtctaccgcactgcggtacataattgccgctgcacagccgatgctgaggatgtggtgcaggatgtgtttgaaaaactgctgcactacaacggcatctttgagagtgaggagcatctcaaagcatggctgctgcgggtggccatcaaccgctgccgggacctgacccgcgccgcccaccaaaaggacaccgagctggacgagaacctgcccgcccccgatgttctggaggaggacggcagtgtgctggatgccatccgcacgctgccggaaaactaccgcaatgccatctatctgcattactacgaaggatacactgcggcagagatcgggcggatgatggcagtgcccacaaacacggtactaagctggctgcggcgcgcacgggcacagttacatacgatgctgaaggaggagatcgaagatgaggtggtatgaatataagatggaggtcgatgacctgactgccccggacgatctgaaagcaaaactgctggccatgaccgacaccctgactgcggaggaaaaggctgaacccatgatggctgcccctgccccgcagaccgctgcacccgcagcacccctgaacaccgaagccaagaagaaaaagcccatccacttcccggtaaagcagctgggcacgctggctgcctgtctggccgtgtgcgtgctgggttacagcaccctgcatctgggcatcggaatgggcagcgcaaaaagcagcgcgcccaccctgtacgcagccgaaggcgctgccgacagctccgctgcctctgtggcagcgggcgggtttgatctccagcacgccgcgctggacagcacccccgaggcggtgaattacagtctggatgcagacgaccgctctctggaaacggagtacagcggcgccggcaacaccgaggctgctgcgcctgcggtggacagtgccaagatcatctacaccgccaatctgacgctggaaagcaaggattacgaagcggcccgcagtgcactggacagcgctcttgccgaggcgggcggctatctggaatccagcagcgagtacacgcgcaccggttccagccgctccgtaagcctgacctaccgggtgccgcaggccaactaccagagctttctggatgctgtggccgctgccggtaatgtgacctaccgcagccagcaggccgatgatgtgaccacccagtatatggacgtgtccgcgcggctttctaatctgcaggcacagcgcacccgcttacagcaattgcaggaacaagccgaaactctttcggacttgctgcagatcgaggactccctcaccgaggtgcagtcccagatcgaaagctggcagagccagctggactggtacagcgatcaggtgcagcagtgcaccgtgtatatcgacctgaacgaggtgcagacctacacacccgccgacgagggctttttctcccgcatcggcaccgcctttaccgctggctggggcaactttgtaaacggcttgcagcagctggtagttgcgctggcctccgtctggccgctggcagtgctggcgtgtgccgctgttgccatggcgcttgcatggcgcaaaaagcacccgaagaagtgaccccatagaaattcatttttccgcataaaggcttccccgggccgggggaagccttttgtttaaccccgttgaaaaacccccccctgtcccgccgggctgctgcaccgggaggcaggggtggttttgtatatttcacagcacttattacacgccggaataagccgagaaaccgccgtccaccggcagacagataccggtgatgaaaccggctgcatcattgttcagcaaaaacagcagcgcgcccacaaggtctttttcgctgtcgccaaagtgtcccatgggggtggcagcaaggatctttttggtgcggtcggtgggggtgccgtcctcgttgaagagcagctttgcgttctgctcgctggcaaagaagcccggagcgatggcgttgacccggatgcccaccttgctgaaatgtaccgccagccactgggtaaagttggtcacagcggcctttgaaccggagtaggcggggatcttggtcaggggcaggtaggcattcatgctggaaatgttcagaatgttgcagccctcgcgccctaccatctgccgtgcaaaggcctgcgtgggcagcagggtgccgatgaagttcaggttgaacaccatctccacgccgctttcatctaggtcaaagaaggtgacggtgtcgctttccagatcggccatctcaaaatattccttgtccgtgttggcgcgggcgttgttgccgccggcaccgttcacaaggatatcgcaggggccaaagtctgccagcacatcctctgctacctgcagacagttggccttgttcatcacgttgcaggtgtagcccttggcggtgccgccttcggcctcgatctcgtccgcaagctccttgagcttatccatgttgcggcccagcagcgccacctttgcgcccgcccgggccagcgccttggcaaaaatggagcacagcgtgccgcttgcgccggtgacgacagccaccttgccggtgagatcggtgttcagtacattcttttccataacatcctcctgttacagctgtattcattggctagagtataacagaaaaagacggtctttgccagaacgttcttattataaaatgggaaagttttattctttttgccgggcaacaagcacgatatcctccggatgcggtgcagacgcaatcgcgcaaaatcgcaaaaatgaccgtttttaccttgaagatcttctaactcttccaaagcaaaagcagtatgataaaagcatgacaaacacatactgacttcggctgcgctgcccgcagcgggctacactgttcaagccgcagcgggctgcgcctatgacccacagagttttgaacaatgtgggcattcagacctggaaacacagcattccgcacccacaatgttcaacccgaacgatgtgaacatttaacgtaggacagtttctttttgcacactgatcaaatataaaaagttataataatattctacactgttcacgctgcacaatgtgcaacagcggcggcgcttcccactttgatgtgaacacaaaaaaacaggttgaatttaaaaattcaacctgcttggtggttgcgggggccggatttgaaccaacgaccttcgggttatgagcccgacgagctaccagactgctccaccccgcgatatttactttttcgcttttcagcggctctcgctgactgctcaagtataataccacagagcgggtagaatgtcaaccctttttgagaaaaattttcgtattctcctgccgcagcttttaacgcaccattgtccggtgctgtgcgcggtattcggcgggggtgatgctgtacagacggcggaaggttttcaggaagctgctgtaatccggaaagccgctttcggtgcaggcattcaggacggaaacgccctcttccagcgccttgcggcagtgctgcatccgcagatagatcaggtagttgtggatactctccatggtgcactccttgaacgcgcgggaaaggtgctcccggctggcgtaaagctcctgcgccagctgcgcggtggtgagggtcgggtcctgataatgggtctgaaagtaggccaccgcgcgcgcgaccagcacactggtgctgctgggtcttctaatccctgactgttccgggtaaagcaacgaatacgttgcccccatttctctgaagatatcctgcatctaaaggggaatgggggcattttttatcaaaaatcaactgagaggagtaaaagccatggagatctgctcccgttttaccggcatggagcgcaagaacggcgctttcctgctgcatactgataatgctgatatcaaggtctgctttgtgaccgatgagatcgtccgcgtccgcgcaagctttgaccatgagctggcagagaagccctacgtcctgatgaccaccgcatgggaggatcggataaaaccactttctgatgcagccctttacaggtctacacgcatccaccacacgcccgattcttacaccaaacgcgaacttgtcggggcgaggcccctccatcttgcttacgcaagaccgttcggtcgcttaaaagccccactggggctttcattgctccgcttcgctgtgcaaacacgaacttgtcggggcaaggcccctccatcttgcttacgcaagaccgttctgtcgcttaaaagccccactggggctttcattgctccgcttcgctgtgcaaacgcgaacttttgagaatacgtcactttcggcagtgtgcaagaaaaaaacgagggaaactttggcaaaaagagagagggctggacagtgccagccctcttgacaaggcaataatagtcaaaaagtttcgtacccatcttcatcccggtttcgtcccggtttgcagaatgcc

SEQ ID NO: 13752 - DNA, 1538 bp, Unknown
  gut microbiota DNA sequence
ctttgaaaatcgtactcaacttaatttttcaatcatctacactttgcgtttcagataattcttcccagtcttctggatttccgcatctacggagatactcatgtcctccatcgactgcacacgatctgcaagaacaaaatttgaaatcatgtacagtgcagctttcaataacacccctgcactttttacaccggatcatatttctcactattttcatcatacacgtcacccgcagtcaattatcgaagttcatatcattttttgagccgcaaataatatttttcaaggctcttattgcagacattcacaatatgcagccaatcttcccgtgtgagcttgcggaagatgatcgggttcacctcgatagtctccacgtccttgcagcgcatcaggaatcgcatatcttcaaaacgcttgaaggggttggagaggatgttcttctccacatccttccgggtataaccgcccttctggtagatactggtggatttttctgcaatcatcccgtgcgccttgcggtcctcgtagaaatcgatgaagtagtccaccacatccggcagggcaactctgccgctggtatccatgtactcatagaccgccttgagcagcaccggcttgtaggaatagctcatgtccatcgtttcgataaatttcatgaacttgtccgccatattctgcggcgtaatgagatcccagccatactgtttcgcaatgttgcggatgctttcctcccggaaatagtggaacatccgcttatcaccaaagggaatcgaaaggtccggtttgacttttccatccttaatgtagcgctccaccgtctcggactgtacatccaccatccggacgaactcgatctgcgagatcatatccttgacgctgttctgccagttgaaaaggtcaatgatctcatagtcagacacatcgattggcacatccagccatgcctccgacttttcaccctgaaacagcatatcctgatccagtttgcgcttgttctccggtgccagcacatacgccatgggctggtattttgcaatgtccagtacccggtgcaggctgtagggcatattgaacatattagcgttgtccacaaagtcaaccaccagcagatcctctttgcccggacagcggcgtgtgccacggccaagctgctgcaaatagattgttttggacatggtcgggcgcgccatgaacagcaccgtggtatgcgggctgtcccagccttcattcagaagatcgcaggcacaaagaacattggtcgagccggtttcatagtccttcagaatcttttcccgaacctccacacgatcccgcccggaaactgcttctgccttcacaccgttgtcccgcagcaactttgcaatttcggctgcatggtctacgctggcacagaagattacggtctttttgccgttgacgtactttagataggtgtcaacgatcaactgattgcgttccgggatgaacagcttgctttccagatcctgcgaattgtatttgatgccgttgatccgcacatcggtcaggtcgatgttggt

SEQ ID NO: 13753 - DNA, 12684 bp, Unknown
  gut microbiota DNA sequence
cctgccccttgtgctggaaaagctgggtgcacagctggtggtagagggcgtagcccagaagcccggcagccctatgctggcggcaacgctgggcggcaagttggtgttctgtctgtccggcaacccctttgccgccgctgccacgctggagcagtacgctatccctgcgctgctgcgcgccgccgggcggcgggaggagagctgcatccccgcccgcgccgtctgcaccctgaccaatggcttttccaaacccagcaagggcaaccgctacctgcgggcgactgcctgcggcggcaaggtgaccctgcccggcgcgggcaacaccgaggcgcactcctccggtgcgctgtccgccatgatgggctgcaactgtctggtggagatccccgccggcagcgggccggtagaacccggtacagaagtggaggtgctttgctttgtacagtgaacaaaaacaggcactggccgaaacgcaggcgctcaagcgcccggcggtgctggccgtcagtggggtgcacaacagcggtaagaccactctgctggaaaaactgctgcccgtgctgcgcagccgtgggctaaaggtaggagtcatcaagcacgacggccacgattttaccccggacgtgcccggcaccgacagctaccgtctgcgggaagccggtgccgagggcgtggcggtctactccggcacgcgctacctgctggccgaggaattccgcctgaccgagcaggacctgcttgccctgttcgagcgtcacggctacgaccttgtgctgctggaggggttcaagtccagcggctggccgaagatcgaggtggtgcgcagcgccatttcggatgcgcccgtctccttccagccgctggcggtggtgggggatatccccggcgcagattttgacctgaacgatattccggcactggcagactggatcgaagcccagatgcctgcgctgtaaggagaatgccatcatgaaactgatccgtactgttgacgctgcagggcaggtgctctgccatgatatcacccagatcatcccgggcgagtacaaggatgcccgcttccgcaaggggcacgtcatccagcccgaggacatccctgtgctgctttccatcggcaaggaaaacctctacgtctgggaaaagcaccccggcatcctccatgaggacgaagcagccgccctgctgtacaaggccgctgcgggcaaaaatatccacggaactgcgccgaaagaaggcaagatcgagctgatcgcggactgtgacggtcttttgaagatcaaccgcaaggcgctgatggctgtgaacagcaccccgcagatgatgatcgccaccatccacggcgaccttccggtgaaaaaggggcagaagctggccggtacccgcatcatcccgctggtcatcgagcaggagaagatggacgccatgcaggccgctgccggggcagagcctatcctgaacgtgctgcccatgcaggccaagaaggtgggcatcatcaccaccggcagcgaggtgttcaagggacgcatcgaggataaatttacccccatcctgcaaagcaagctggcggtctacggctgcgagatggtttttcacaaggtctgcgatgatgaccccgccgggatcactgccgccattctggaggccaaggccgcagggtgcgagctgatcttcaccaccggcggcatgagcgtagaccccgatgaccgcaccccgctggccatcaagaacaccggggcggatatcatcacctacggcgccccggtgctgccgggagccatgttccttgtcagctatctggacggtgtgccggtgtgcggactgcccggctgcgtgatgtacgccaagcgcaccatctttgacctgctgctgccccgtctgctggcggatgaccccatcaccgccgaggatatcgcccgcttgggcgagggcggcctgtgcctgaactgcgaagtgtgccactggccgaactgcggctttggacattgctgaaaccctctcagtcaaagcctttcggctttgccagctcccccgaaggggaagctttactaaggtgaaaaaatatgagtgaaaataatctgacacattttgatgccgccggcaacgccgtgatggtggacgtgagcgcaaagcccgtcaccacccgggaagccactgcccacggcattattaccatgaacgccgaggcctttgccgccgtgcagagcggcaccgtgaaaaagggcgatgtgctgggtgtggcgcgcattgcaggcatcatggccaccaagcgcaccagtgagttgatccctctgtgccacccgctgcccctgaccaaggcgggcatcgagttccgtctgctgcccgaacggcaggcggtagaagccctgtgcaccgtcaagaccagcggcgtgaccggcgtggagatggaagcgctgaccggcgtttccaccgcgctgctgaccatctatgatatgtgcaaggccgtggataagggcatggagctgggcgagatccatctggtggaaaagaccggcggcaagagcggccactacatccgggcggagggcggctatgtttgatcgttaccagcgcgagatccattatctgcgcttgtcggtgaccgacctgtgcaacctgcgctgccgctactgcatgccggacggcgtggaaaagctggagcgggaggccgtgctgacctacgaagaatttctgcgcttggctgcgctgtttgcccagtgcggcatcgacaccgtgcgggtgaccggcggcgagccgctggtgcgcaagaacgtggcgcagctggtggcaggacttaaagcgaccccgggcatccgccgggtcaccctgaccactaacgctatgctgctggcagagcagctgtctgcattgctggacgccgggctggacagcgtgaacatcagtctggacaccctgcgcccggaggtgttccggcagatcaccgcccgggacgattttgccgccgtgcaggcgggcttgcaggcggcgctggaaagcggcctgccggtcaagctgaactgcgtgccgcaggcgggcgtcaatgagggcgaactggaaacgcttgccgcgctggcaaaggacaacgccctgcaggtgcggttcatcgagatgatgcccatcggctacggcgctgccatgccctgcatctccggcccggagctgcgggcgcggtttgcccggcgctggccggagcttgcgcccctttccactgcgcaggagcacgccttgggcgacggcccggcggtgtactacaccgtgccgggctggcagggcagcatcggctttattgcagcggtgcacggcaagttctgcgcttcctgcaaccgggtacggctgaccagtcagggttttttgcgcccctgccttgccagcgagaccgggtgcgacctgcgcgccctgctgcgcagcggcgcggacgacgcacagctgctggccgccatccgggagaccatctgggcaaagccccgggaacaccattttaacgacagttccatgcccgctacccgcgggatgtatcgcattggaggataaataactatgggtaagcttctggcaatctgtaccagccccaagcggggcaccgtaaaaaccgaggtgcccagcgccgttttgaccccggaatggggcatcgtggaggacgcccacggcggcaactggcaccgtcaggtcagtatgctcagcgccgaaaaaatcgaggcgttccgcaagaagatctgggtggactacggtgccttcggcgaaaatctggtcatcgagggcttcgatttccgcaatctgccggtgaccagccggtttgccatcggggatgtggtgctggaaatgacccagatcggcaaagaatgccacaacgattgcgttatcaagcagcagaccggcgagtgcatcatgccccacgagggcgtgttcgcccgggtgctcaccggcggcgagatccatgtaggggacgaggtgaccctgctgcccgcactggaaaacccgcccctgcgtgccgccgtcatcaccctttccgataaaggcagccgcggcgagcgggaggataaaagcggcccgctgattgcccaaatgctcaccgccgcaggctatgtggtggaggagaccatgatcctgccggacgaagccaaggcactgaaagcgcagctcatccgcatggcagacggccgtcaggtgaaccttgtgctcaccacaggcggcaccggcttctccccccgggacatcaccccggaggccacctgcgccattgccgaccgcaacgcccccggcattgccgaagctatgcgctatcacagcctgagcatcaccccgcgcgggatgctgagccgcggcgtcagcgtgttgcgcggcaagaccctgatcgtcaacctgccgggcagccccaaggcggtgcaggagaacctcgagtacatcctgcccagcttggagcacggggtacgcatcgccgcgggtctggacggcgagtgcgcccgcaagtaagggttcctgccctgctttccttgacagggcgtagaaatatactattttttcacttgaagtaaggagaaacagagatgaacaaccatcgcatttcccgccggagttttctgaccgctgccggtatggccggtgcagccgctgccctcaccgcctgcggcggtgctgcttccagcgcagcatcgtccgtggcttcctctgccgccgcttccccggaggctagccagagcgtggagttgatcgtgtttgccgccgcctccctcaccgagacactgaatgcgattggtgagagctacacggcagagcacccggaggtgaccttccggttcaacttcgactcttccggcaccctcaagacccagatccaggagggcgcggattgcgatctgttcatctctgccggtcagaagcagatgaaccagctggacatcaccgcttctgccgatgtgaacaaggacggccttgactttgtggatgccgacagccgcgtgaacctgctggaaaacaaggtggtgctctgcgtgccggagggcagcgacaagggcattgacagttttgacgcactggccgagcacctgaaggcacaggatatcctgttctgcatgggcaacagcgatgtgcccgtaggccagtacacccagaagatccttgcctactaccagctggacgaagctgcactggcggctgcgggcgtgatcacctacggctccaacgtcaaggaggtgaccacgcaggtcaccgagggcagtgtggatgcaggtgtcgtttactgcaccgatgcatacagcgccggtctgacccctgtggacgaggccaccaaggagatgtgcggtcaggtcatctaccccgccgccgtactgaaggccgcccccaacgccgagactgccaaggagtttttggcttacttacagaccgacaaggccatgaccgtgttcgagggcgtgggcttcagcgccgtataaaggagcagacatggactggtatccgttgtggaacagcctgcgcattgctttgatcagctgcgtggcggtgttctttcttggcatttttgcagcctactatatcgcccgtctgcctcgggcggtcaagggtgtgctggatgtgctgctcaccctgcccatggtgctgccgcccacggtggtgggctactttctgctgctgctcttcggcgcaaagcggccgctgggcatctttttcatgcagcatttcggggtaaagctggtcatgaactggtacagcgccatctttgcctccatcgtggtggcatttccgctgatgtaccgcaccgcgcgcggcgcatttgaaagctttgacgaaacgctggcgtggtcggcgcagacgctgggacagtccgatacatggatcttctggcgggtgcggatgcccgcctgccgtcagggcattctggcgggcacggtgctggcctttgcccgggcactgggcgaatacggcgctaccagcatgatcgcgggctacacccccggcaagactgccaccatcgccaccacagtctaccagctgtggcgcaccaacgatgaactgggtgctatgcggtgggtgctggtggatatcgtcatctcggcggtggtgctgctggctgtgaacctgctggagaaaaaacagaaagcgggtgcccggaaatgagccttgaagtcaacattgaaaaaaagctggacggctttaccctccgtgctgcctttaccgccggcaacacctccaccgctttgctgggcgcttccggctgcggtaaaagcatgacattgcggtgcatcgcgggcatcgtaaagccggaccgcggacgcatcgtgctggacgggcgggtgctgtttgacagtgcgcagcacatcgacctgccgccgcagcagcggggcgtgggactgctgttccagaactatgcgttgttccccaatatgaccgtagaacagaatatcctttgcggcctgaagacggaaaaagaccccgctgcccgccgcgttgcctgcgccgagatgctgcgcgccatgcggctggagacgcttgccaagcgctatcccgcccagctttccggcgggcagcagcagcgcgccgcgctggcacgcattctggtgggcaagccccgcatcctgatgctggacgagcccttcagtgcactggacagctacctgcgggaggaggtagagggcgaggtaggcagcctgctggcaaattttgtgggcaccgccctgctggtgacccacaaccgggacgaggcctaccgcctttgcaaagaaatgatcgtgctgaacgaggggcaggtgctgcgtgccggtaccaccaaggccgtttttgccgacccgcagagcatcgctgccgcgcggctgaccggctgcaagaacattctgccctgcaccccgctggacagtcacaccgtccgtctggacggctgggacaccaccttgcggctggtgctgcccgtcccggcgggctgcaccgccgtgggcatccgcgcccacgactttacgccctgcgctgcggatgcgcccaacgccatcccggtaaaggcggtctccaccagtgaaaacccctttgactggaacctcatctgcacctcgccggagggtgcggcgcagctgtggtggaaggtaggcaaaaccagcctttctgccgccgccccggagccgccccagtatctgtgtgccgccccggagagcatcatgccgctgaaaggttgagaaaacgaatggcctgcactgcgttccggccatattcagcggaaagaatcatttgaaaataggggatttccccacacgcaaagcagccgctgcacggtaagatgcagcggctgctttgcttatttgtgtaaaaaggagagtacttatgccatatcacggcaggtcacaatgtctgccccggtgccgcagacgtcggtcagcaccacatcgcccacatggatgggggcgtgcagcaccacgctgtccagcgctgcgactacctcggccatctgtcccttgggcacaggcttggaggtcttgaccgggcagcgggagtgcaggcagccctcggcgcgcacggtgctggtgatgatgcgggtggggtgggtcagctcttccttgccgtaggcgatgccgttggggcagccgttaccggtcactttatagtcgttggcttcatccacctgcagatggcagccctgcgggcagcaggtgcaaattacttctttcatctcgcttatgcctcctcgatctcaatggtcacttcgtccatgggggctctgtccagcagcactttgggcagggcaatgtgctccatctcgccgggggcaaggcggtcacgcttgaagtgtgcgatcaccgtatcaccgctcttgacaaggatggtgctcttgccgcagatgcggcggacgcggaaggacacgttggtgctcttttccacgccttccagacggatgcgctgcggcagggtgtagccgaggtctgcgccgggcttcacggtcaacacacgccccgtggccacagggccgttctggatatagttggcagcggctgcgccggccagctcgctctcgccggaaacaaagtccaccagatcatgcacctgcaccacgttgccgcaggcaaacacgccggggatgctggtctccatgttttcgtacacgatggcgcccttggtgcgggggtccatctcgatgccggcctgcttggtcaactcgttttcggggatcagacccacgctcagcagaatggtgtccacatcaaactccatctcggtgccggggatgggcttgcggtcggggccgatctcagccacgatggccttttccacgcggtccttgccctgaatatccacgatggtgtgggagaggtacagggggatgtcaaagtcgttcaggcactgcacgatattgcgggtcaggccgccggagtagggcatcacttctacgcaggccagcacctttgcaccctcaagggtcatgcggcgtgccatgatcaggccgatgtcgccgctgccgaggatcagcacccgcttgcccaccagatagccttccatgttcacatagcgctgtgcggcaccggcggtgtacacaccggcagggcgggtgcccggggtaccaatggcaccgcgggtgcgctcgcggcagcccatgcccagcacgatgctcttggcctcgatgatctggtagccgtgttccttggagacgcagtgcacctttttgtccggggtcacttccagcaccatggtgtccagctgcacttttacgccggtgtccttgagcatctcaataaagcgtccggcatactccgggccggtgagctgctcgccaaagcggtgcagaccaaagccgttgtggatgcactggttcagaatgccgcccagttccttgtcgcgctccagaataaggatgtcgcgcagaccgctttcccatgccttgcaggcagcagcaaggcccgcagggccgccgccaataatgaccagatcaaccattgctctttcctcctaccttcgtttcgctgagcagaacgttcgagccgttcttgtcctgcaggatgtccaaggggtctatgcccagctcgcggctgatcagctccagcacgcgggggccgcagaagccgccctgacagcgccccatgcctgcaccggcgcggcgcttgacgccgtcgatggtggtggcgggcacctcgctgtggagggctgccaggatctcgccctcggtgatggtctcgcaacggcagatcacgcggccgtaagcgggctgctccttgacaagcgctgctttttcctctgcggaaagttccttgaagcggatgtggcggcggccgtccttgtagtcagccttttcagtgcccagaacaccgcgctctttcaggatggcaacagcttcctccgcaaccgccggggcagcggacaggccggggctcttcatgccggccaagtcgatccagccgggtgcttccggctcttcaccaatgataaagtcgtccacgtccagattggcgcgcacgcccgcaaagctgcggatggactcgccgaagttgatgctgggcacgctgcgttgggcagtggtcttgacaaattccagaccgctgctggtgcaggaggtgtcgttgccctccaccggctctgcgttggggccgacgagcaggttgccgtgcacggtgggtgccaccagaacgcccttgcccagcgcgttgggacactggaagatgacgtgactcacgcgggtgccctcgctcttgtccagcagatagtactcgccccgggtggggatgatgtggaagttggcgggctccaccatggagtgtaccttgtctgcccagataccggcagcgttgatgacacagcgggcttccacggtgccgccgggcacggtcagacggtagccgccctcgatggcttcggcattggttactttgcagctgcggcgcagctccacgccgttgcgtactgccacctcggtcatggccagtgcatactcccacgggttcacgatggcggcgctgggtgcccacagtgcaccgcagaccttctcggagaggttgggctccatggcaagggtctcttcccgggaaagaatcttcatgttgggcacgccgtttgcggtgccgttctcgaacagatgctgcaaatggggcagttccttctcgtccagtgccagcaccagcgagccgcactgcttataggagacatccagctttgcgcagatctccttggccagtgccacgccgcgcacgttcagccgtgccatgcgggtgccgggggcggggtcgtagcctgcgtggagaatggcactgttggccttagtggtgcagtctgccacatcgttctcggcctcaagaatgaccaccttgttgtcgtagcgagacagtgcgtaggcggtatcggcaccgatgacgccacagccgatgattgctacatcatacattgtttttttcctcctgtccgttctgccttggcccgtcgggagctgggcagctgttgatggtacaaaaaagagcgaaccgaaacaaaggcaactgcccttgtccgtttcgctcatatctcttgaaacaaacagcacttgtttgctcttatgataccctgtccctgcacaaaaagcaaggtgttttgcactttttgtgaaacccttacaaaaaacaccggttgcttttgcgcagaatgcgggtcacatattccataccgcctgattggtggtggaaatggcagtgattccggcttccagcgcggccatcacgtcctctttatcagcaataaggccgccggcgagcaccggcactttggcggtagcgcacacccggcgcaggatcttgggcatggtgccgggcagcaggtccagacagtccggcagatttggcggaatcttatccaaactttccagtgcgatggaatccagcaggaatacccgcagaatggcggccagcccaagctccttggcacggcggatgaaggactgccgggtggagatgatgccgtcggcctcggtggtattgcggataaagtccacagccacctctttgcccgccagcccggcaataaggtctacatgcaccgcggcaaagcgcccggcttcgtggatgcggcgcacaatggaggcaatattgcagatatctccgtataatacgaataccacccggatgttctcgttggtcagcgcattgcaaagcccggcatcgtccttgacggccgcaatgactggtgtttcctgaatggcatccatcagctcctgtttcatgcttctcctcctgcccggcgttctgtggggcaattttactggtgctctgccagccagcgcagcgccatataggtgtaggctgccgtgccgcggtacaggatgctgtcatcaaagcgcaccttggggtggtgctggccgtaggtgtagccctctttagcgttgccggcagctaagaacatactcacggtgggtacctcgtggctgacaaaggcgaagtcctcgctgccgccgccgggcttgccgccggtgagcggggtcatatccatagcacccttgcccagcagttcggtcatataggtcagggcattgcccgccagcggggtgtccaccaccatgcaggggcagtaatcgctgaactccacctcggcggtgcagcggtaggcggtggccacgccctgcgcaatttcggtcatgcgctgatggatcagggcactgaccttctgctccgggtccacggtgcggatggtgccccacatatcggcagtatccgggatgacgttggaagccttgcctgcctcgaaccggccggtggtgaacacgccaaagcctgcggggtccagctcgcggctgttgatctcctgcagggcaatgtggatgtgcgccgctgcggtgatggggtcgatgcaggcgttgggcatggagccgtggccgcctttgccgtgcacaacgatgtggtactgctcgcagctggccatggtgatgccgccgcccggcaccagcaccataccggcgggcaggggcatcccggccagcacatggaacatgaccgctgcgtccaccttggggttctccagcaggccgctgttgatcatatccagcgagccctgaaaaatctcctctgcgggctgaaactccagctttaccgtgccctcgatctcgtcctcgtgctccttgagcagcttggctgcacccagcaccatggcggtgtgcatatcgtggccgcagccgtgcatcttgccgggcagctcagaggaaaactcctcgccggattcctcctgcaagggcagcgcgtccatgtcgccccgcagcaggatcaccttaccgggacgtttgcccccggcaagcgccaccacgccgcacttgccgcagtcctgcggggtgtagcccatctcggtcagcgcttttttgaccagtgccttggtctggggcaggtcaaagcccacctccgggtgacggtgcagtgtgcgccgccattcctgcagctgcggttccagcgccttggcggcttccaacagtttttccggtgcgatcattgtaaaatcaactccctctgaatttatgcggaaagccctctcggccacagcagaaccatgacgggagggcttgtccttacggttattcttccccgccgttattgccagtcgggtggtactgggcacaggtgcactttttgaacttcaggccgctgccgcaggggcaggggtcgttgcggccaattttgaccacacgcaccggctgacccttggggctgcccttgacgccgggtgcaccgttgccgggcacaaaaccctcgccggtgggctttgccacctgct

SEQ ID NO: 13754 - DNA, 32117 bp, Unknown
  gut microbiota DNA sequence
aacgatgccgcccgcatccagaagaaggtcaagaaaatccagaaagacttggaaagcaagcagaaagaactggacgacctgaaagccgaaacgattctggttatccggggcgtgagtgccttagacaaagaactgctcggcacactggtggccgaagcaaaagatgctctggaaacccttgaaaagcagcttgttcaggcgcaggaagaatacgatgaagccactaagacggcaaagcgtagcaactacatctgcaacgagctgtttacatgggcggatgtgtacgacaccgccaaccacgatgaacgccgcgccattttgcagcagttcattaaggagattcgcgtccgaaaggactatgaaatctcgatcaccctgaacgccagcttcaaccaagtggagcagctcaaggcggtatcaacctacgatggtgcggaaatttttgaagaaatttccgaaaagggggcataaaaccgatgctcttgcccgcagcaccatgcaaaatgcaaagaaagagacgtgaaagcgatggattttcaaaaagtacattgatgaccccaccaggttcgcatccgacttcagggttcggagcccggcacggtctgccaaagttttttaggcataaaaaacgccgcatcgtacaaaacgatgcggcaaattggtggacctagagggattcgaacccttgacctctcggatgcgaaccgaacgctctcccagctgagctataggcccatatttaggggcgtaactcggttgggcgaccaaccgacatactccccatttgaatgcccacaactctgtggggcacaaaagcgatacgcttgcactcccaactgagctacgagcccatatttaagcccccaaaaaccgcttgggggcgcgtggtatataactccagattgtttaaggaccgcatgggctcccagctgagctataggcccatgatgatgacgctgatagtgtaccgcgttttggggcgtttgtcaagcaatttcggagagcacaagcgaggacttacaagcggccaagctgccagaaagctacggcgctggcggcggctacgttgagggaatctaccccgtgggacataggaatctttacggtgtaatcgcaggcggcgatggtactattggccagcccatcgccctcggtgcccagcacgatggcaagctttggctcggcggcaagggcggggtcgtcgatgctgaccgagcggtcactcagcgccatggcagcggtcttgaatcccagcgcgtggagctgggcactgccgttatccggccagtcggcagggcaggtgccgatctgcgcccacggcacctgaaacacggtgcccatgcttacccgcaccgcgcggcggcacagcgggtcgcagcaggagggggtgacgagcactgcgtccatgttcagcgcggcagcgctgcggaagatggcgcccacgttggtggaatccacgatgccctccagcacggccacccggcgggcgtgggcgcaaacctgctccaccgtgcggggcgcaggacggcggaaggcgcacagcacgccccgggtcagcgcaaagccggtaagctgtgccagcagctcccggtcagcggtatataccggcacatcgccgcagcgggtcaaaatctcctgtgccgggccggtgatctgcttgcgctccatcagtagggaaagaggctggtaaccggcgtccagcgcccgggcgatcaccttggggctttcggcgataaagatgcccttttccggctccagtcggttgcgcagctgcgcctgcgtgagacgggcgtagatgtccagctccggggcggtaaggtcggtgatctcatgaatgacaggcatggaaagactcctttgaaatgaagttttttctattgtagcacaagccgggccggaatgcaaaatccctgctgcacacagagcacagcagggatttgaatgcggaatgtgttactcagagcgcagcgctttgacagggttgctctttgcggcgctgcgggcggggatcaggccgcccagcatggtaagcagggtggccagaacaatcaggatcagcgcggcctgcggcggcagcgaggccaccacgttcacatcgcccgcgatgtggtggatgagcatattgccggggatgagcagcagcaggcagagcaccacgcccatcacgccggaacacaggccgatgataaaggtctcggcgttgaacacctgcgagacgttgtgcttggaggcaccgatggcgcgcagaatgccgatctccttgcggcgctccagcacgctgatataggtgatgacgccgatcatgatggaggacaccaccagcgagatcgccacaaaggccaccagcacattgctgaccatgcccacgatttcggtgaccgagttcatcagggtgcccaccatatcggtatagtggatcaccttaccctcttcgtcctgctgccgcatggaggcgttgtaggcgtccagctcgttcaccacctgcgccttggtgtcaaagctgttggggtagatatagatggcatcgggctttgcgtagtccacatagccgaggtcgtccaaaatcttttcgtagctggaagcggaggagagcagggtgcttttgatcatctcggtcaggtcagagccggtcatgttgatctgaatagcctgctggaacacagcggggtcgatcttgagtgcgctttccacctgcgtgctcagctgcgcaatgttgctctggatggcctgcgcgatcttctgctccagctgcccggccagcttctggatggcgggacccatctgctcctgcaaagcggcggtgagctgggtctgcagcgcctcgcccagctggacggagtaggtctccatcacggtctgcagattttgctggagggtaccggcaaactgctcctccagcccggaggtgtccagcagatcacccatggattcggccagcagcgtctggaaggcctcggtctgcatataggaggaaaaaccgatcttatccagattcagcaggccgttgctgatgagatagcgcttgtagccgttcatgatctttttcatcagcgtctgtaagccgtcctgagagatattcagctctacgccgtcgaacagctcactcatgtccatctccatgtccggcagcggcagcccgctgaggtccagcttgaagctggaggggtcgatgagggtggaaaggtcaaaggagccatctgtcaggtcaaatgcgccgctcaggtcaaaatgcagggcactggtatcgaactgaaaagcatccttgagggcatccgtgtccaccgagaacagggaggcgatgtccagcacagtgccgccggcagcgccaaagggctcgccggtcagcacgttcgtgtccgggtcggccagctgctggcgcacgatggtgctgtcggcagcctgatcgatcacgtgataggtcagctcatgcagatagtccagcccggtgtacaggatggcagaggtggcatcggccttgggctgcacaacgcccacaacggtcagctcctcgctgtcggccacgacctgctgcatataatcggcatcggcttgcttgttcagccagagcttgtgttcggcatcataggtgtagcagtcggctttgttgaccagccggaaggtcttgccgagaaactcttcgtaggtgtaggtgccataatcatcgggcagatcgaccagctggttgctggcgtactgctgcaggatcttatccagctctgcctgatcccgcattcccatggcgtatagggcatagtccgaaatgctgccgttggcgctcagcaccagcaccagctcattgtacttttccggccagcggccggcttttacgtcgtactgatcctcatatagggcaggggtctcggccatttcgccgaacacatggggactggataccgaggtgagcagactggataccgaggtgttctgaccggcaaggtcggtaaaggtggtgtccgggttcagcttatgcactgtgccgtctgcgtcctgccggtagatcagcggggaagcgttgtaggtgtattccaccgtggcattatcccggatggaacaggcgtcgctgtccagataagccttcaaagagcgcagatcgttgctggcagcgccgatgttcagttgagacagcagctgtctcaccgtgaccatgccctccggcgcggaggaggagccggacgagacgctggtgtaggtgtccgggtccatcatgctggccagatctacgccggtgctgctgatctgcagcgggtaggcggccagcgtggatttttccatgttgctgatatagcggctcacaccgttggaaagggaaaggatcagcgcaatgccgatgataccgatggaaccggcaaaggcggtgagcagggtgcgtgcctttttggtgagcagattgttgaaactgagggaaagggaggtgagcagggacatggaggagtgccccatgttccggtgcacgggggcaacggcagcagcctcgtcctcgggttcgtagggcatggtatcggagcggatcacgccgtccttcagctttacgatgcgggtggcatagcgctcggccagctccgggttatgggtgaccatgaccaccagacggtcccgcgccacttccttgagcagttccatcacctgaatactggtctcgctgtccagtgcgccggtgggctcatcggccagcaggatgtcggggttgttcaccagcgcacgggcaatggccacgcgctgcatctgcccgccggacatctcgccggggtgcttgtgcaactggttgcccagccccacctgctccagcgcagcggcggcacggcggcggcgctcggccttggaaacgcctgagatggtcagtgccagctctacgttgcccagcacggtctggtgggggatcaggttatagctctggaacacaaagccgatggtgtggttccggtaggagtcccagtcgcggtctgtgtatttttttgtggagatgccgttgatgaccagatcgccgctgtcgtagcgatccagaccgccgatgatgttcagcagggtggtcttgccggagccgctggggccaagaatggccacaaattcgttgtcccgcaggttcagactgacgttgttcagtgcgtgctgcaccagctcgccggtcttgtattctttgttgatctgtttaagtttgagcatagatgtgcctttccggtactgcgccgccgggcgctgctgcctgtggtttaaaagtaggaaacatttgcagacaatatctaatttagtttagcaaataaaaatgaagaaaccgtgaaattaactgcggaacggatgaagctgcggagcttttgcgtctgagcagcggttttgccggaaggacggggcaaaaaagaaaagcggaaaaagataccggttgaatttgcaagctgaacgtgatattctaaagctgacagacaggctgcgccggaaaaaacggcgttatattacctgaaaggctgtcggaacaacacttctttaggattgtaacagtttctcctgctttatacaattatacaataataaaaggataaacaaggcagaaaaaatttggcccttgtagtaaggaggaactgaaatggaacgtacattttcacctatgatccggcagtattctgccattgatggtttgcagcaggcgtatacgctggtgtatgccatggaggtagagggcacacaaggctgtcggctgaccctgtgccagatcggcagccgacagcagatcgtcagtcagcatgttgcggcagcgccggagttctgttaccggctcctgcgctacttgtgtgaaaatggagttcagccggagctctggcgggatgcggtcacagacctgacagctgccgggctggtaggcgagaaaggcggcgcatggcgtgaacagtgagcgaacagcccaactgcaagtcgcccttgcaagctatgatctgaaagaactgcgtgtccagaagcgttatttgcaggagcagggaaccgccattgactgcacctgcttttgcagcggcgaaaagctgctggcacagctgcggcagggtgtccgttatgatgccgtggtgctttgcagcgagctgacggatctgcctgcggagcaatttgtccggcagttttatcagctgaaggagcggccgatgcttctgatacagagccatggccgcagcagcggcacggcgttgcaaaagctccgcgaggggtgctactgcgtagagggcaccgagctgaaaaggctgctgtggcagctttaccggatgcccgggcggcagaaccggcagctggagcagcggtgcagccagctgtatgcggcgtggggcatcccgcagggggatgtcaacgccggatatctatcctgcgcggtcggcatcgcatgcagcaccagccagaagctggcgatccgcaaggaaatcttgcaggcggtgagcgagcagtttgatacatcggtcgctgccgtggaaagcggcatccgccggatggtggatcagctggaggaaaagccgcctcttgcgtggctggcgtttaaggccgatacaaggctgggcagcggcaaacccaccaccggcaagctgatctacgcggtcagggacgttgtgttgcggcaaaaagtgccatccacccgcctgtaaggcttgcgcacggctttggaacacggcggcgttcctttagaaaaatggcatcgcccggggaggcagagcaatggagcagcaaaagacagaaacgcggtctatcaccgcagagcagcgcaagcgggtcgaggaggtctgcttccgttcgctggcgctgatcagacgcaactgtgaatatctggagcagcattttgaccgcaccggtgcagacacgtctacccggcaggcggtggcagatatcgacaccgctgccatgcagctggaccgcaccctcagcgaggcgatcaccctgctggagtttctgcacgaggacacaaagccgcagctgtaccccattgacctgtgtgagcttttgcagcaggtggcggcgcagtctgatatgatccgggcgcagcttggggtggatatccggctggattacggcgggtgtactgcctgctgcgtaatggcagaccgcagagatgcggagctgctgtgcttgcatctgctctccaatgccctgcgcgccagccgggagggcggcagcgtctgtatcgcgctgcgccgcaccgagagcgactggcagctgacagtcaccgacgatggctgcgggctgcccggtgaggatgtacaggcagcgctggaaaaccgccgcagctttctgggcggggcgcagctggggctgctgctctgccgggagtgctgccgccggatggactggagcttacagctggagcctgcgcccgaaaagggcacacaggctgtggtgagcattccgctgtacacgggcgaaagccgccccgatggcacggtggagctgcgcaccagctcggagaccgagcaggagcagcgcaagtatcatctgcgtgccatgctggtgcgggagatgcgcaccatgccggagcgcggcgacccggaagacgaattttgataaggtggcaaggccgctgcacagcgttttgtgcggcggccttgttattttgcgcccggtgctttcctgcaagcgcaaagcatggtatactgaatgctgaaaacaaaagcttggaggagcaacaatgacaaacaagaagctgaactaccctgcaattgccaaggagatggccatcctgaccggggccgttgccattattgcggcggcggtctatttttttctggtgcccagccatacatccgtcagcagtatttccggccttggcatcgtgctttctaattttgtgccgctgccgctttcggctattactatggtgctgaacatcgtgctgctcatcatcggcttttttacctgcggcagggagtttggcgcaaaaaccgtgtataccagcgtgatgctgccggtatttctgaggtttttcgagcggctgttcccggattttggctccatgaccgatagtcaggaactggatgtgctgtgctatattctggtggtcagcgtgggtctgagcatcctgttcaaccgcaacgcatcctccggcgggctggatatcgtggcaaagatcatgaacaagtacctgcacatggagctgggcaaggcaatgtccctttcgggcatgtgtgtggcactctctgccgctcttgtctacgataaaaagaccgttgttctgagcattcttggcacctatttcaacggcatcgtgctggaccatttcatcttcgataacagcatcaagcgccgggtgtgcatcattaccgagaaggaggaggcgctgcggcagttcatcatcaatgacctgcacagcggtgccaccatgtacgaggccatcggtgcatataactttgaaaagcacaacgagatcattaccatcgtggacaaaaacgagtatcagaagttgatgaactttatcaaccgcgaggacccaaaggcctttgttacgatttataatgtgtccagtatgcactaccagcccaagcgctgagcgcggtacaggggaaggacacaaaagccgtgccggggcttttccgcagcggaaaaccgtggtaaaataagaaaaaacggaaagggaataacagccatggacatcagactggtttgcagcgatattgacggtacgctgctgcaatacggcaaaaaggagctggagggcgaaatattcaaacagatccgggcgctgcatcagcggggcatctggttctgcccggcctccgggcggcagtataccagcctgcgcaaactctttgcaccggtggcagactgctgcgtgtttatctgcgaaaacggcggcaccatctttaaagaagaacagtgcatcgccaaaaatcccatgccgcgggcgctggcagaggaaattgccaacgatatgtggacccgcagcgaggggcagggcgaggtgatgctctccggccagaacaccgcctacctgatggagcgcggtcttggcatgctgcagcgggtgcagttcgtgggcaaccactaccagatcatccacagccccgccgaggtgccggaggacatcaccaaggtgtcggtgtacctgcacgagggtgtggaaaactatgtggagcgctttgtgccccgctggaagcaggccaactgcgccgtggcggggccgttctggatcgataccacctttgccaacaagggcatcggggtgcagtgcgtgtgcagcatccttggcatcgaccccgcacaggtcatggcttttggcgataactacaacgacgagaccatgctggacgtggtgggcgtgccctacattatggacaacgccgccgctccgctgcgggcaaaataccaaaaccacaccccccgcccggaggatgtgctggcgcagctgttggcacagcagctgtaaagggggcgagcccatggaccgcaagggcttggaacagctcatttttgatacttacagcatagagccggactatccgtggatggacaccccggagtcggcggtgttccgccatgcagcaaaccgcaagtggtttgcactggtcaccaccgtgcccaaaagcaagctgggtctgcccgggcagcagccggtggatatcgtgaacctgaaatgtgaccccatcctcatcggctccctgcgggcagaaccgggcttttaccctgcctaccacatgaacaaggaaaactggatcaccgccgcattggacggcagcgccccggaggataagctccgtctggtgttggatatgagctacaacgccactgcacccaagctgcgaaaaaagaaagcttgaccgcagcaaaataagggcgggcgctgcaattgctgcccgctctcattcgtattcagagtaaagggactgcattttgcaaaaggaggaagctatggctatttttgaaaagaccatccgcaaccagaacttcgataccctgctccgcaagctggaacacgccatcccggacagcagctggtcggcagagctggaagccggcagcgatttcaaggagggcagcgcccggtgcagcgtgcgggtgtttgagcggtacagcatggtgggcggcaaccgcctcagcctgacgctgaccctgttccagaacggggacgggcctatccgactgtcggccattgcagcgggcggcagtcaggcagtgttctttaaggtgaacaccctcggcgaggacgcttttctggaggacgtaaagcagctgctggaggaaattttggagggctaaaatgttttatagtgggtttgacgcgctgttcagcatcctgttcccgctggtgtttctggtggtgctgggcatgatcctgtttaccgtggtgagcaacctgcgcacatggggcaaaaataatgcgtccccgcgccttaccgtcccggctactgtggtggccaagcggacgaacgtttcccgccatcatacggacaatacgatgtcgcatacgttcactacctattatgccacctttcaggtagaaagcggtgaccgcatggaactggaagtagatggttcggattacggaatgcttgtcgagggcgataccggaaagctgagctttcagggcacgcgttatctggggtttgaacggaaagacgggtgactgatatgcagcaaaagcattcaagcgtgccggagatcgtgggcagaagcctgttttatacgctgacgaattatctgcttatcagcatggaactgtccttccgtgcgcagtggttttcggtcttgttctcggcggcgcttgtatggtgcaatatggagtattggaacgccatttacaggctgaccggcaaaaagcttgccgcatgggtcttgtggggcgtctgcattgctgtaagcacaggcattgcgtattttgcggggtatatccaagggatgcttgttccgcttgcaatataataaacgcgttgctgcgcggtatttttgaagaaatcgcagaagctgtgacaaaagtattattcttttatgaattttagcactctatgcttgacagtgctaaataattgtgctataacagtggcgtgctcaggaggaagggcaaaaggagagccgcaaggttccccggaaagcctttccgaatggacgcttcaaagtttttgccccgacccgaacgccgggattggaggtatgttttatgtttatgccgactgtttttcatgagaacctgttcgatgatctctttgatccgttctggaacgagggtgcactggagcgtgcgatgaaccgcgaagcccgcgacacctttggtaagcgcggtgcaaacatgatgaagaccgatgtcaagcagacggacaacggctacgaagtggacgttgacctgccgggctgcaagaaggaagacgttcagatggatctgaacgacggctacctgactattcaggcagtgcgcagccacagcaatgacgaaaaggacaacaagggtcgctacgtgcggcgcgagaccttctccggcagctgcgcccgcagcttctatgtgggcgaggtgaagaaggaggacatccatgcaaagtttgaggatggtgtcctgcacatccagctgcccgctcctcagcagacaaaggctctgcctgagaacccgaatttgatcgagatcgagtaaatgccgaccgtgtgcgccaaggcataacgtatataggatgcccccggagagctgcaacaagccctccgggggcattttttgtgtacaggctttcgatgacggagaggggagaaagtacctgtttttgccagaaaactttatttttctaccatttcgtggtatccttataaggcgcacgcaatacaggcctgcggctgcactggcagcggctgcggactgcgcgcggcaaaaaaagaacgtatagaagagaaaagggggataaaagtcatgggcgaatttgcctttcagactttacgggaaagtatcacctctgccatcaggagcaagatccttaccggggagctgcagccgggcgtaaagctggccgagcagaaactggccgaggagttcggctccagccgggcacccatccgggaggcgctgcggcagctggaacaggagggcatggtcgagtattcgcgcaatgtgggctgctcggtgcgccgggtgaagccggaggacgcctacgagatctatctgctgcgggcaaatctggaaatgacggcgctgcgctattttgattgcaaattcccggaggaggatctgcacaccctgcgcggcatcttagaggagatgcgcaatgtccggccgggggatctttcgcagatcgtggagaacgacaaccgcttccatgcggtcatcgtgcagcgggcggggctgcccagactgctgaaattctgggacgacctgaactacggcaacctgcttgttggggcgaacagcggctctaaccacgagacactggcgcagcggcagaacggcattcacaccaagctgtacgaggcgctggcaagcggcgacaccgaggctgcctgccgcgctgtctacgcccactacatggagcctatggagcggatgcgcagcgcaaacagcgccgtacaggcagcggacgaagcagcaaaataaggggaatttggctgaccgtctaaattttgaccaatcattttatggaaattgcagattgtctacaatctgcaattatgctatactatcaaagtgatcggtcgagtactgctgtatttttggtaaaaattgcgaaacgtatgcggaacctcggccttcttacaggaacttccgccctgtgtggaaaagaaagagaggaattgtccgcatgtctaacaaagaaaaagccacaaagatctcgtggcttacccttgccttcatggccttttctacggtctggggcttcggcaacattaccaacggctttgtgtactttaacggtccgcaggtcatcttcagctggatctttatgtttgtcctgtacttcatcccctatgcgctgatggtgggtgagctgggctctgcctttaaaaacgagggcggcggcgtcagctcctggctgcaccagaccactaacgccaagctggcctactacgccggttggacctactgggcctgccacatcacctacatcgccagcaagggcagcggctttttgaaagcgctgagctgggccgtttttcgcaacgcggagacctacgattccttccccacccgctacatccagctggctaccttctgcattctgctgctgggctgctacattgcaagtctgggtctgaaccccctgaaaaagctgctgactgccgccggcacctgcaccttcgttatgtccctgctgtacatcgtgatgatgttcgctgccccggcaattaaccccacggcagagtacgtccacgcaaacctgagcttcagcagtatgatccccaacttcaacgtcacctacttcacgtctctgtccattctggtcttcgctgtgggcggctgcgagaagatctctccctacgtcaataaggtcgagaaccccagcaagggtttcccccgcggcatgatcgcgctggccgtcatggtggtcacctgcgccattctgggcacgctggccatgagccgtatgttcgaccccgccgtcatcaacgccagcgcagagagcttcaacgcctatgttgccaacagttcctactgggctttccagaagctgggtcagtactaccatgtgggcgatctattcatgatcatctacgccctgtgcaacgtcatcagccagctcgccgtgctgatcttgagcatcgacgcaccgctgcgtatgctgctggataacgagcacaccaagcagttcatcccgcaggctctgcacaaggtcaacgcccacggcgtgcacagcaacggcatcaagatggtggcggtgctgtccggctccattattctggcacagtccttcgtgcccggtgcggctgccgttctgcgccagctgaccaagctgaactctgtgtgtatgcccatgcgctacctgtgggtgtttgctgcctacatcgccctgcgcaacgcctacgataccatccctgccgagtaccgctttgtcaaaaatcaggccgtggccaagttcttcggcggctggtgctttgcggttaccgctgtgtgctgcgtgctgggtatgtatgataaggaccccttcacctttgcactgaacgttatcacccccgtggtgctgaccgtgctgggtcttattctgcccgccctcgctaagcgcgagcagaccgctgccaaaaagtaacctgaatatgcttaaaaaagggccggtcagcactgaccggctcttttcagatacacccaaggaggtttatttttatgatcgcatccgaagtccgtgaaatgctgtccttcatcgacggcaaccccaccgcataccacaccaccgccgctgtgcgggatatcctgttgaaagcaggctttgccgagctgctggaaagccgcaagtgggcgctggaacccggcaaggactactttgtctgccgcaacggttccagcatcatcgccttccgcatgggcgaccagctggaaaattacagcttcaacgttgccgccgcccatacggattctccctgcttccgtatcaaggagaacgccgagatccacatggggcagaactacaccaagctgaataccgagggctacggcggcatgatctgcgccacatggatggatcgtccgctgtctgtggcgggccgtgtgctggtgcaggagaacggcgctatcgtatcccgtctggtggcgctggaccgcgacctgctgatgatccccagcgttgccatccacatgaaccgcgaggtcaacgataaggcttccttcaacaagcaggtggatatgctgcctgtgctgggcggcgcctgcgaggagggcgcgctgaaaaagctgatcgcagaggagctgcaggtgtccgaggagcagatccttggcagcgacctgttcctctatgtgcgggaaaaggccaccgtctggggctgcaacgaggagttcatctcctgcggccgtctggacgaccagcagtgcgtttacggcatcctgaaaggtctgctgaccgccaagaacgcccgctccatcggcgtggcagccttctttgataacgaggaagtcggctccggcaccaagcagggcgcagcttccaccttcctgtacgatgtgctgcaccgcattgcccagagccttggcggcaacgatgaggacttccaccgcgcggtggcttccagctttatggtcagcgccgacaacgcccacgccgtgcaccccaaccacccggagcacaccgatgtgaacaactgcacctacatgaacaagggcgtggtcatcaagacccacgcaggtcagaagtacaccagcgatggcatgagtgttgccgccgcccgggaactggctgcccgcgccggtgtgccgctgcaatactttgcaaaccgctccgataaggtgggcggcagcacgctgggcaatctggccatggcacaggtgtccatgaactgcgtagacatcggcctgccgcagctggcgatgcactcctgctacgagaccgccggcgcagaggacaccctctcgctcatcaaactgatgcaggagctgtacagcagccactttgaagagactgctttcggcaccctttccatcagcaagtaaacggataaaagcataaaaaggactgctgtgcgctgctatgcacggcagtcctttttgcgtaaaagctgattttccgtggccggttaagcccggatatagaaatccgacagtagttgtggtaaaataaggcatccgggagcgccgggcgctccgctgcaacatcaaaaatggaggttttctatgaaaaagacctatcgctcgctcttttgcctgcttgcggtgctgctgctcagcgtcagcgcactgccctctgcttcggcgctgttttcccagaagctctattattatggtgtagtagagggcgtcagccgcaccgtggagggcaaggtggagtccattctggtttctgcggaagagcaggagacctaccagatgatcgtcactgacagcaccgtctggcaggaccatgacgaaaaaaccacctccgaccccgctacccttgcggtaggcgagcagatctgcgtggtgcacgacccggctgtgatgatgtcgctgccgccgcagtcggtggcgtacaccgtcatccgcaacttccccgcaggcacggatctggaacaggaagcccgggacgccgcctgcccggtgaagaagttctttgccgacacccgcaaagccatttcggactggttctaccagaccatgcccatctgagcgtaacgttccttctataacgcaaaaaatctgctgccccgcaccggatgccaaagcgtccgtgcaaaggggcagcagattttttatgcaaggttatgcggctttttgcggcaaaaacgctgtataccgctatttattttcggggggggggtaacgcggaagcgcttcaccacctgttccagtgcgctgatgtccacaggcttggacaggtgctcgtccatgccggcttccttgctcttttgcatatcctcaaggaaggcgttggcggtcatggcaaggatggggatggtgcgtcccagcgggttttcgccgctgcggatgcggcgggtggcttccaagccgtccatcaccggcatctgtatatccatcaggatcatgtcataatcgccgggctttacactggcaaaggcatccacgatctcctgaccgttggggcagatggtgcagcttgcgccttttgtttccagcagcatttgcagaatctcggcgttgatggcgttatcctcggcacagaggaacttcatgccggacaggggagaagtggtctcttcttcctccgggagcgcctgcgccttttgcaccgtgtccgcttcggtgtcaatgggaaattccaacaccacctcaaagcgggtgcccttgccggtggcgctctctacgctgatggagccgcccatcaggtctatgacgcttttggtaatcgccatacccagacccgtgccctgcaccttgttggtgccggagcgctcctcacgggtgaaggggtcgaaaagggccttttggtagtccgcgctcatgccgatgccgtcatcctgcaccacaaagcggtaccgggcgtagtgctcgttccggggcagctcttccacctcgaaccggatgtgcccgccggtgggcgtatacttgaccgcgttggagaggatgttcatcagcacctgattcaaacggttggggtctgccagcacgttttcgtgctgcagattggtgcttaccgtaaagctttgactgcgctgacctgcctgctgccggatgatgctgtccagctgactgatctgctggggcaggttcatcttttccacattcagggtggtcttgccgctctcgatgcggttcatatccagaatattgttgatgatgcccagcagcaactgaccggagctttccagcttgcccagatgctcggcaagcttttccggctcgtgcagctcgtttttcatcagggtggtgatgccgataatggcgttcatgggggtgcggatatcgtggctcatgttggagaggaagtccgtcttggccttgctggcacgctcggcggactgtaacgcctcggcggcagcatcctgcgcccgccgcatctcgtcgttggcctgcgtcagctggatgttatactgctccagacggaggttcgtctttttttcagcctgcagttcccgctgctgcttttcccgcaaaaggaaccagccagcaatgactgccatgatcgaaaacaccgttgcaaagcctacaataacggccatgacgatattgaccagcttctgcgtattcacggccacatattctgccggaacaaggaacgccagcgtccactgggcgttttccatctgcttcagggcgtagtaatactcagttccgtccagcacagcgttggaataacaggagcctgtgcgggcaagccgctcctttgctgctgcaaaggaagaaccgtgcagataggacatctgggagagcacggtgtatacgttatgccccttcagcagctcagtgtcattggcgttgaacagcttgaagccgttattatccagcacatagacgctgttgttattttcgtaggcgtcgcagcggaaataatcgttcagctgggtcatactctgggcgatgccaaagtagcgcagggtgatctctttctctccgctttgcagtgtgataggggtggagagttgttccagaaacaccatccgggagtcgtccacggtcagcgaattggaaacatagctgacccgctgcggcgcgttttccagatagttcatttcccgcagcagacccgtgcggccatactcggtataataacgcccggcagcatccacggcgatcagttcgatctgtttttcatggtaattggaaagctccgacagctttttcagatagcggtagagatcggtatcggtctccagcggggtgttgtacaaataattacactgcacatccacctcgtcccagtggttgtcgatcacatcctccagactgtggaacatctggtgggtgacctcttccatctggctcagacgctcgtggtagacaaggttttggatgtaggtctggctcatgacaaaaagggtcaggatcaacacgatgctgacaaagccgaagcccacaaacagctttttatagattttgttgttcacatccagtatctcctgtccgttttattcaactccatgcggtgtctgcccggctgatggtggtgtaagcaccaaagaaggtttttgcggcatccatgcccaccacgccgctgtctgtcaccgttgcttcggcagccagccggtcgctcacaccgcagatggcaacctgataggtcttgcccgcctccggttgcaccgggcttaccagcacataggggtagcccttgccgttgccgtaggcatcgtagccagaagccagcagttcgctgatctgctgcccggtcagggtgacggtctggatggtgcggttccagccggtgggcaggatgaccgaaaggtcgtaatccgtaatgcccttggcgtacagcttggcggctacgccgtggtggttctgctcggtggggttgccggggatccatgtgctcagcgagaccagcgcaaggtcgctgccggtagcctgtgcaaagcagcggcctaccagcatggcgcagtcctgctgcgaaagctcctccgtaacggtagtgatgacatccggggtgttgttcaccacactgtcctgatcctcgtccagctgacggatgacatcctccatggtggcgttgcccttcatgaagtccagcattttaaggccggtggtcacgaaggtgttttcccagccggaatagataaagggcgcggtgttgcctgcgttcagggtatcggcgatgtcggcatagtaggtgccgtctgcctttgcacccttgaagggcaacaggctgcttttcagcgccgttgcgggctgcagagcgctggtgcctgcaacggtggaaagcacacgcatcaccttgagcgcatcttccagcttttgggggttctgtttcagctttttattcagaccgtagaagcggttcacattcagcacaaaaacgttctgggtgccgtcctcggaaagatagggcatcaggccgaatttatcggcgttgccgtctgcctccacaatgccgttggtgtttccgatcaaaaacagggtattcccctcggccatcctctgcagggtcacattgtcgtcaagagcatcgccggagtcgttcagcatcccgatgtccttccactttttgacatacgccattgcctgcatcatgccgggggtgttgctgacgtttgccttgccggaaagataatccttctgccacagtctgccgtccagcgtgccaaggaaatcggcatctgcaatgttgcacagatactggaaaccgtagcccgggtactggatctgcgacaggcagagatcgaccccggcttccttggcttttgcagccagcacttccagctcagcgaaagaattgggcagctcccagccgtgttcccgcagcagggtcttgttgtaggtgatgccgtagcagttgtaaaccgagggcagcagatagatggcaccgttgtcgaacacgtcctgcagacgggactccacatagttatccgtaaaatcgtagccggaaaggtccagcagtttgtcggagaccagatcgatctgggggtcgtagtaggtcaaggtgcagacgtccggcaggtcgcctgccgcaaacatattctgcaaacaggtggtggtgttatcgccgctgtatggcacgacctcgatgttcacttccgggtaaacgctgtgcacctgctcaataaaggcttctatctccttataaggtgccataaaggtgacggcttcgtgcgcatctgctgttttgctttcagccttgccgccgccgcaggcggtcagcgctgccgtggcagctgcaacgctgcaagcctgcaaaaaggagcggcgggagatcttttttatcatataaatatactttcctcacattttcggaaggcagtactgcgcaagtgcaggagcgcagtgctaccttagcgattcttacacaccccacaggaacccctacgctcgcggcctgtccgcacggggcatacgccgattttcccataaaataacaatcatattgtatcattgtaacaaaagtgtttcaagctgttttttgaaggattttgcgtggaaaagggcgaacaaccgcgtgctttgcagctgcacggcataaaaatacccctgacaccggggaagggtatcagggggtatggtattccgggcacgctgttttattgcaggggctcttttgcgcgcagacgccgaaaggtgtcctcttttacaagctcgatgaccaccgctgtcagggggataaagaagataatgccgatgatgccaaaaagctttccgccgatcatggcggcaataagggtgtatagcggcgaaagccccacggatttgcccaccacacggggataaatgaactggttttcaacaaactgcacggcaaggtacacgatcaggcagcgcaccgccagcacagggtctaccaacagcacaaggaacacactgaccacgcaggagatcagtgcacccacataggggatgatggcgcagatggcggtgagcacgcccaccagactgccgtaggggatcttgaaaacggaaaatgcaagagccatcagaacgccaagaatcactgcctcgctgcattgtcccgttaaaaagtttgcaaaggactgccggaacagccggcagaacttcagcaccccggcggcgtgggcgggcttcaggtaggcgcacaccagcgtgcgggcttggtggccgaggctctccgtactaagggacatatagacggagatgatcagcgcaaacgaggcggtgatcgcgatattcaccgtggcagagacagcccctaccgcattgaccagcaccgtgtcgatgcttgcggtgaccttgtgcagcagctgctcccagttgatgccctccagccagttcatcagccagcccatgtcagcatcctgtgcgttgagataggcagtccagcggggaatattggcctcgatctgcacatacaggctgtggaaggactgcaccagctccggaatcagcaaagtcagcgccaataccagcaccagcacaacgcccagcagggtgatgaaaaagctgagaaggtggatggctttcgccgagggctgctttttggccttgccgaacaggcggttcagccgcttttccagaccggtcatgggcacgttgataaaaagcgccagaatgccgcccgccagaatgggcagtaccagatctatcagctttgcggcaaaggccagaacgtcagaaagccgcagcagcgctacaaaaagcgttacccctaccacggtaacgagcagagattgttttgtttttggttccatgaaaaagttcctttcccggaagattgtggcagcaggcagcaaaaagaccgcccgccggctctttttggtattgtaatcggaagaaaagggcttgtcaagacgagagaaagggaaacgggacgttataaaagcagtttgcgagaatgcaagcgggagcttttcagtagggaaaaagcgtggtatacttggccagagcaatttaaaaaaattgagagaaacacagcttgaaaggaaatagatcatgtcgaaagatgaatatttgatcacagatgcgccgctgaaagcgctgacggtttttgcaatgccaatgatcctgggcagcttttttcagcaggtctataatatggcggactccatcatagtcggccagtttgtcggctcctcggcactggcggctgtcggtgcctgtgctgcgctgaccaatgtttttatttgcgtggcactgggtgccggtgtgggtgccggtgtgctggtaagccgctattttggcgctaaaaactatggcaaaatgaaaaccatcgtgtcaacgtccctgctcagctttctggttttgagcgttgtccttggcgtttttggctttagcttttcccgtgctatgatgagcggcttgcagacccccgccgacattctggaggacgcggtgctgtatctgcgggtctattttgtaggctttccgtttttgttcatgtacaacattctttccaccatgtttacctccattggggagtccaggatcccgctggggctgctgatcttttcctccatcctgaatatttttatggatctctggatggtggcggggcttggcttgggcgtgtttggcgcagcccttgccacgttgatcgcacagggcatttctgcggtgttttcgtttttgatcttcctgcaccggatgcggcaatataaaagcccctttaataaattcgatcggcaggagctgtattccatgctccgcattgcggtgccgtcggtcttgcagcagtccaccgtgtccatcggcatgatgatcgtgcaggcggtggtaaacccctttggcacacaggcgcttgccggatatgcagcaacgatgcgggtagaaaatgttttctcgctgatttttgtctccatcggcaatgcggtctcgccctatatctcccagaattttggtgcaaagaagatcgaccgcctcaaaaaaggctaccacgctgcactggtgctggacctgtgctttgcggtcattgcctttgcggtcattgaaaccctgcacacccagatctcctcgctgtttctgggcaaggacggaacggcgctggcctatcaggtgtccggtgattatatgcggtggctgggttacttcttcatcttcatgggcatcaagatggcgaccgatggcgtgctgcgcgggcttggcatcatgcgcccgttcctcattgcaaatatggtaaaccttgccattcgcctgtccgttgccctgctctgtgcaccgcgctttggcattgcctttgtctggcttgccgtcccggcagggtggcttgcgaactttctggtctcctatgcggcgctcagaagatcgtggccgacggaaaatgcagcggcacctcaatgattttgtgcagcgcgggagccttttttctgcgcccgccccggcttgttacagtggtttacttttggcagcggaaatgctatgatacaccttagaaaaaaagcaaggaggagctacgatgggcattgcagggaacgaatggggttttcaggtgggcacgctgcccaaaggtgcgcgggataagatcagcgatgtgccgggggtgacggtagggcactgcaccttggcagacggcgtggtgcagacgggcgtaacggcgctgctgccgcaccaaggggatattttccacgaaaaagtgctggcggccagctatgtcatcaacggctttggtaagaccaccggccttgtgcagatcgacgagctgggcacgctggaaacgcccatcctgtttaccaacaccctcagcgtgggcacggcgcagaccgcgctggtaaagtatatgctggagaaaaaccccgacatctgcgagaccaccggcagcgtgaacccggtggtctgcgagtgcaacgactgcggcctgaacgacatccgggggcttcatgtgaccgagcagcacgtttttgccgcgctggcagactgcaaggcagattttgccgagggtgccgtaggtgccgggcgggggatgcgctgccacgggctgaaaggcggcatcggctccgcctcccgggtggtggaactggacggaaaaccctacaccatgggcgcactggtgctctccaaccatgcgctgttcgatgacctcatcgtggcgggcacgcccatccacaccctgctggatgacagcatcccgccccacgaggataaaggctccatcatcacggtgctggccacggatatccccctgagcgagcggcagctgcggcggctgtgccgccgggcgctggtggggctttcccgcacaggttcctactgcggcaacggcagcggcgagatcgtcatcgcctttaccaccgccaaccgggtgccgcattactcggagaaagccctgctgcccatgaccctgctccacgatgatgccatcaaccctttgttccgggcggtggcagagtgcgtggaggaaagcgttctcagcagcctgctccacgccgagactgttaccggcaaccacggccaaaccttccacagcctgacagaacttctgaaaaaccgcgcctgaggcgctacaatacagcaaaagccctgcatccggtgcagggcttttgctttacttaatagcggcggtggatctttttggtgggcttgcggcggttccagttggcgcacagcagccacagcccatagatcagggcggcaatcaggctgagcaccagcaccaccttcaggtacaggctggtcaggaactccttcaccttgtccaccccgaatagcagcgggttgcgggctacgtcctgcccggcgatcagctcaaccacgccgatggtctcgcccgccagcttcagctccaccgtgcccactacgtcgccctgctggatgggcgcgcagacgtagtccggcaggtggaagtatttctgagtgacggtgccgtcgctggtggagggcagcagggtcatcatgctgtcgttggggtacagctgcaaagtgtctgtatcggaggaatactttaccgggatctccgcaatggtcaaatcagtgtccagcgcagcctgaatggaaaagctgtcgaacacccagtccatcagtttgaccgtctcgaacagggcagggcggcggttggcgtagccgaaggtatcgcagctgtcggggctgtccatcacgcagaagatataggtggcaccgtccttgttaccccacgaaacatagctctgggtgccggtatcgtttttaaaggcggtcacattgcacataccgccctgcatggcgctgcggtagtagctgccgccgctggctttgctcagcgcggcattctggctgaccagcaccgaggaagagcggtgcttctccttggcgggcatggtaaagctgggcgcgccggacacctccacaaaggcgtcaaagctcatcaggtagcgcaggatcaggtacatatccaccgcgcaggtagtgttgccactgtcgatgccgcaggcgtccgtccagttgctggcggtggtgccgatgcgctgggacagggtgttcatctgcgccacccagccgtccagatcgccgccggcaagggtgtacgccacacccatggctgcctcgttggcattgcgggtaagcatggcgtacatggcttcccggtaggtgaaagtttcgttggagcgcatatctgcgttattggtgttataaacatagtccgagatggcaaagggcatctggaaggtgttgtccagctggtcggcgtagttggtcagcaacacggcaagggtcatatatttggtcagaccgccggcagatacctgctttgtgctgtccttatcatagacgataatgttggtatcggtgttcacgatataggcgcttgcagcctgcacctgatacaccgggctggggtcgaacatggccccggcgggcagcacaaggcagctgagcagaaatacaaatgaaagaaccagtgcaaaaatacgtttcatgtggacaattcctttaaaaagcgataaaatatacaagatacggctgcgctgtgcggcgcgccggaagatcaattttgcagcaagcgtgctgtgttctataataataacaggtttgccggggtgttacaagagccttgcggtgttttacaccgttctttcgctccggcagggagggcaggaatggtatatcttacaggggatacccacggcgatatccagcgcttcaagcagggcaagctgcgctggctgggcaagaaggacaccgtggtggtgctgggagatttcggctttgtgtgggacggcagcgccgcagagcgcaagcggctggactggctgcgcaagcgcccctacacgattctgtttctggacggcagccacgaaaattacgacctgctggcacagtacccggagaccgaactgttcggcggcagggtacagagccttggcggcaacgtgtaccatgtgtgccggggcagcgtgctggagctggagggcaagacctatctctgcttcggtggtgcggaaagtcaggataaggacgaccgggagccgggcgtgaactggtggaagcaggagatgcccagtgacgaggaatacgacacctgccgccgcaacttagagacagtagactacaaggtagattatgtgctgacccacgatgcaccaagcagatttttggattttaccgcccttgcccttggcgaaagcaaccgtctgcacctgtttctggatgagatcctgctcaagctgacctacgaaaaatggtttttcggctgctatcacaaggatgtgcagctttccaccaagagccggtgtgtgttctgtgacgtcatccccatgggcgagcggcgcaccgggctgttccaccgataggaggcaaaatgcaggtcacggtaaaactatcctcccgggagggggcggcgcacatcagcggcattctggcgggctttactctgctggcaaagcgcgggaaactgaccctgcgggtgcaggacgtgcggcagggcaatccccttgcccgggaagcgctgctggaaaccgagatcgacggccgcacggtggtgtttgacctgatggacggctacttctacaacgacccggcggcggtgctggcactgttccaccgggcggatgtggtgttcaagcgcagtttttcagccgagaagaaccggcagttcccgggcgatatctccgcaaagctgcggccattggggctgaactattacgttacctgtccgggctcgccgctggaagcggagcgcagcgcaaagagccgcctgaagcagtgggcgctttccacccgctgctacccgcaggactttgaagcccggctgacccgggtgcgcaaaaagccgcgcatcctctttctgacccgactgtgggacccggaggagccggcggtacagaaatacccggacttacaggcagagtggcggcaggtgaatgcagaccgcattgagctgctgcaccgactgcaagctgcttttccggaacagttcaccggcggcgtgtccgacaacgcctgcgcccagcagctgtgcccggagctgatcctgccggacaagctgaccggcaagcgcgcctatctgcaccggatgcagcacacggaaatttgtgtggcttctaccggactgcacggctctaccggctggaaactggctgagtatgtggcggcggggcgcgccatcgttaccgagccgctgcggtacaccctgccgggcggctttgaagaaggcaaaaactataaaacatatacgtccccggcagagtgcgaggcgcagctgcggcagctgctggcagacccggcggcgatcttagccatggcgcagcacaatgcggcgtactatcaagcgtggctgcggccggagcagcaggtgcggcaggctttgcggcagctggaaacaggggaaatgtaaggggaaaatggggtatggaagagcagaaacggcatagcggctttgaggcgatgcgcattctcagtatggtgatgatcgttctgatgcatggcattgggcacggcgggctgggcagtgcggcaccgcaggggtcggcggcattctggatctactggctgctgtttattctggcgcgtgtgtccaccaactgctttgtaatgctttccggctattatctgtcggagcgcaagggggctgtccgcgccgggcggctgttccgcatcggggcacaggtgtggttttactccatgctcactttctgcgttgcggtcaaggcgggtgcggtgccgctttcagccatttcgctgctccgggcacttttaccccttacctccaacggctactggttcgcctcggcttattttctgatgtacctctcggtgccggtgctgaacgtggtggtgcaaagcctgaataggcggcagtacaaaaccctgctgctggtggcgctgctgctgcaaagcgtgtggggcacgctgttctactgggcaacggatgaaacctttgtgaataacgggtacagctttatctggttctacactctgtattttatggccgcttatttccgcaaataccgggtgaccgtgcccagcgggctgtgtttgctggcatatctggcagcttcggcggcggggctgttcaaccggatgctggcgctgcgggtggaaaacgctttgcacctgaacggttttgtgaataccgtcaacggttatcaggcactggctacggtcatcgcctcggcagcaatgtttttgctgttccagaatatccgtatccgctcggactactggcggcgctgggtattccggctggcaccgctgtctttcggggtgtatctgctgcacgacagcgattttacccgggcgctgctgtggcagctggtagacctgccccggttcggcggggcgctgctgccctcgctggcgtatctgactggtgcggtgctgctggttgccgctgcgggctacgcggtggatgccgtgtatcagcggctctaccgcctgctgcacctgcccgcactggaaacaaagctggacgccctgaccgcccgcatcctgcaaaacattgttgggagcaaagaataatattctatcgtgggtcggaagcctgagcgcttctgacccgcttttttatgcgtgaagttgtagtaatggatgccgtttgccatcacggcccctcctgtgaaaaaagcgtatatcgcggcccgcaggccgcgatatacgcgaactataaaaatattatttccgctgaagttgcgcaaagcaaagcggagcgcacttaaaatcgtcctcagttcatcggcccggccttgtcgaacatctgctgcacctgcgcggccagcaaagcgtgtgcagggctttccagcagcgggtcggcggcaagcaatgcggcggcttcgctctgagcggcgtgcagggtgcgggtgtcattcatcaggtcggcgatctgcaaggtgggcagaccatgctggcggctgccgaaaaagtcgccggggccgcgggtctccaggtcgtactgcgccacggcaaagccgtcggtggtggagcagaggaatttcagccgcttctgcacggcctcgctggtattgtcgctgacaaggaagcaccagctctcggcagcgccgcgtcctacccgcccgcgcagctggtgcagggcgctcagaccgtagcgctcggcgttttcaatcaccatcacgctggcattgggcacgtccacgcccacctcgatgacggtggtggacaccagtgcgtccaaccgcccggccttgaaatcctccatgacggcggctttttccttgggcttcagcttgccgtgcatcagccccacccggcggtcgggcagcagcgtcttggcaatgtcctcgtagtaggtcttgacggcgttcagcccgccgtccggcacatcctcaatggcagggcagaccagatacacctgccgccccttgtcgatctcgctgtccagaaaacggtacaggtctcgccgccgcttgccggtgatgcaccgggtcttgaccggggtgcgcccggggggcagctcgtccagaatggagatatccaagtcgccgtagatcagcagccccagcgtgcgggggataggggtggcactcatgaccagcaggtgcgggttcgcggctttttcggccagtgcgccgcgctggcgcaccccaaagcggtgctgctcgtcgatgaccgccagacccagccgggcaaactccaccccttcgctcatcagggcgtgggtgcccaccacaaggtcggcttcgtccttgcggatggcagccagcgtggtgcggcgggcggcggccttcatgccgccggtcagcagggccacccgcatcccgaagggggcaagcagccggttgagcccctcggcgtgctgcgcggccagaatttcggtaggcgccagcagcgcagcctgatatcccgcccggatgcacgcccagatggcggcagcagccaccagtgttttgccgctgcccacatcgccctgcaacaggcggttcatggcggtatcgcccgccatatcggtcagaatttcctccactgcacggcgctgcgccccggtgggggcaaagggcaggctctgccagaaaggggctggatcggcgcggcgcatgggtgccccggtggccgcagcgccccggctgcgcatccgcccgatgcccaattgcagcaccaaaagctcctcgtagatgagccgccgccgcgctgctgcggcctgttcctcggtggcagggcagtggatggcgcgcaccgcctcggccttgggcagcagacggtatttttgcagcatctccgggggcagcgggtcgggcagcagctccgcgtggggcaaaagctgccggatgcagcgggagatggcgctgctggtaagcccctcggtctgggggtaaacggcctcaaagggcgcggcctggatctgttcagcggtgcgcacctgcgggttgaccatctggcggcgcagcatcccgccggtcacgatgccctgaaaatagtattcctgccccagctgcaatttctgggtggcgtaggggttattgaaccatgtgatctccagactggctacatcgtccccggcggtgatgcgctccatgcgccgcccgcccggcagaatgcgcccgccgggctttgcaaacacctcggcctttaccacgcattcggtgtcggcgggagcttctgcgatggagtagggcttggaaaagtcgatgtagcgccgggggtagtggcacagcaggtctgccagcgtcacgatgcccagcttctcgaatcgctctgcggtcttgggccccacccctttcaggtagcgcaccggggtgtccggcgttaaggtagtgcggttttcggtgggcatggcgtttcaactcccttccaagcgtagtatagccattgtaacacggacggggaacagatgcaaatattttgcctttgtgcggcagctgtggtacactggtagcacagaaaaaagagaggggagatactgtggagatacgcaacgcaactatggatgatttacaggccattgccgccgtggaggcagcctgttttccggcagcggaggctgccacagcggaagaatttgccggacggctggcacactatgccggtcatttctggctgctgcttgagcagggggagctggtggcctttgtggatggcttttgcaccgacacacccgacctgaccgatgagatgtacgcggatgccgccctgcatgatgaaaatggcgcatggcagatgatctttggggtgaacaccctcccgcgctgccgctgccggggctatgccgggctgctgctgcaaagagccattgcagatgcccgcgcacaggggcgcaaggggctggtactgacctgcaaggagaaacttttgcactactatgcaaagttcggctttgtgaacgagggcgtttccggctctactcatggcggggtggtgtggtatcagatgcggctgcggttctgagagaacggtttggaatgcgcgccgcgtgcgctctgcgcataaatagcggaattagtttttttattcgggattcagaaaagcctgcgggcttttctgaatccccttttcacgggaggggtcgtggaggaaaacggcatttgcaattcagaccgcactttaatcattgcagcccttctgtgaaaatagcgtttggagcgctccgcagagcttgtcggggcaa

SEQ ID NO: 13755 - DNA, 29979 bp, Unknown
  gut microbiota DNA sequence
tatgtagcgataagaaagttaaaaacttgctccggctccttcgggagccgagctggaactctaagtaaatatgttatattaaattgttagaatagattaccacaaaaattgagccgtgtcaacaggaatttttgaaaacaggctactttcggcagcttgcaagaaaaaatgatggaaactttggtaaaaagagagggctggatagctcgttctgtttgcaacggaatgcaaactcggaacttttccgagcagaaaaacaaccgtctgcttcaagttgagcttgaaaacggacgatcattcttgcaaaatgattgtcaaatttgggaggcgttttgagcagcctcatagtgctaacaagaggtgtcttcacacgtatatatatatatcgtttttgcgttgcaaaatacttgttggggaacacccaagcccttgaactgcatccgatggatgcaggctgtacatttttgcaaaacgttctttcggtgctccgtatgaagcacggaaaacgaacccattgagggacaaaagcatcagatagggtcggcagactcaccggcttcgatttttccaaggtaccgccacagggtcgtgcggctgatgcccagctgccgggcggcggcggcgcggttgccgccgtgggcggctaccgtctgctgcaccacctcgccgatgatgctttccagcgtgcgggaggtgtcggtgctgaccaccgccgccgggtgcgctgccggggcgctgcgcaggctgcgctccttggagagcaggtctgccacgctgctgctgcggatgtaggggccgttcgtcagggtggcaagggagcgcagaaggtttttgaactgggtgtagttgttcggccacgggtactgccgtagcatctcgatggcgcggggctcaaagccggagagctgcttgcccagctccagattcaggctgttcaggtacaaactggaaagggacgggatctcgtccgaccggctgcgcagcgggggcagctccagcgtcagtgcgcccagccgctcgatgaaccggcgggtgaccggcgagaccggttcctccggccgcaccgagcgggagaacagcagccgcacccggcgggcaaggccggtctcctcgatagcagccagcagctcggtgctccactgctccgggatggactcaaagttctggaagtagaccgtgttgccgttggcgttcaggggcgagttatagtggttgagcagaaaatcccatgatttatcgttcatcaaagcgcagtttgccaccacgagggggcggttcaccagtgcgctgtgcagatagaggtagcgggcgatctgctctttgccggtgcccggctcgccgcagatgaataggggctgacgcacggcagcaagggcgttgatctcggcgtcctgcgtgcccatggcaccgctcaggctgtaaaagctgttggagaaaagatactcgcactcgccttggttcagcgaccgcagccccgggcggctggaatgcagcgggatgcgggagggcacgcagtagaacaggtaccgctgcacgttgttcatcagcagcacctgtgctgtgatgctgtacagctggctgcgctcggcgtaatagaactttaagctgcccgtggcggggatctcccgcagatgggtctgcaaacagcggtgcagctccggggagatgtccttcatattattatagaacaggctgccgtccggctccatcaccacgaccctgccgctctgctcctgcgtgatgctgcgcaaaaacaggttctcctgccgcagctggccgaaccatgtgctgatgttcaccgcctgatcgatggcgctgtgcaggctttcgatgccggaggtgatcaggaaggcgtcaaagcccatctcccgggcaatggtgtgggtgaccatatcacagaccaccatccggtagccgccctgcttgagccgctccaaggtgtggcgcacctcctcggcactgcggacggtgaggatgtccaaatcaaagttcagcaggctgcaaagggtgtgggcgggttcggtgatgctgggaaagcccacgatggcgtacaggctggtgtagttctctgccagtttcatggtgcgcagcacatcatacaccgagatatggatatccaccaccggcaggtcggtcacctgccggatcagggtggcggtgccgccgcgggagatgatgcagtcgtagctgttgggggccatgcgctgcacgatggcctgtccctcttccagatcgccggtgtacacctccagctcaacgttggggtaggcctgcgccgcctgctccatggcggtgcgcattccgtcgtagggggcaatgcccagaatgcgggtgtgagtctcgaccataaaacgtccctccgtgtttctctttgaaactattataaacggtctggttcaaaaagaaaacagaatatggtttcaaaatagaacgtttttgccaacaaaacaaaaagaaaattgaaaacgtgctaaaatgaaacgattttcccgcttgcgccgggtgcattcccgcggcggatacggcataatgaaagcacaaaaacaagtgagggggcacgaacaatgcttcgcctgctgatgattgcagatgattttacgggtgcgctggataccggcgtacagcttgcggcacacggcatctccacgcaggtcgtggtgggtcaggcagacctttccgcgtgcagcagcaccgtgctggtggtggataccgaaacgcggcatctgcccgccgcaaaggctgcaaaggccgttgaagagctgacccgcagcgcggtggaaaacggcgtgggctgcatctataaaaagacggattccgccctgcgcggcaacatcggcgcagagcttgccgccctgctcaaagcaagcggcgcacgcaatttgccctttctgccggccttcccgcagatcggacgcaccacaaaaaaaggcgtccactacatcgacggtgtgccggtgaacgaaagccccttcggcatcgaccccttcgaaccggtgcgctgtgccgaggtgacaaagctgatccatttgcagactgagatccccgcacagaacctgcgccccggtgagacggcagcggacaagaccggcattctggtgtatgacgctgcaaccgccgcagatctggaaaccgccgggcggcagctgttccagaatggaacacccccggtgctggcaggctgtgcaggctttgccgcctttctgccggagctgctggggctttcggacggcagcgtggtcgagaccccgcagctggacccccggctgctggtgctctgcggcagcgtgaaccccatcaccctgcggcagatggacaccgccgaaaaggcaggctttgcccgcctgcggctgaccccccggcagaagctggagcccggctactgggcaagcgccgacggcaaggctgcgctggcagaaattgaacagatgctggcagcaaacccccgctgcatcatcgagacgaatgacgccgggggcaaccagcttaccgccgattacgccgccgcccggggcattgacttggacggcatgcgggtgggcatttccggcagcgtcgggcagatgttcggggcgctgttcggcagcgaacatctgggtacgctgctgctcaccggcggcgacaccctgctgcaatgtatgaacagcgtgggcgcacgggagctggaaccggtgtgcgaattggaaagcggcatcgtgctggcgcggttcacctatcaggggcgcacccgctacgtcattaccaagtccggcggctttgggcaggaggatctgctggtggagctggcagaccgcattgcaaagcattgagaacagaagcagacagccctttgcggctggaacagaagataaatgtaacagaaggagaacgaccatgacctatgcaaaactgcccggcctgacctgggacggcaccgtgtacgagaacgaggagatgggcacactggaagccctgctgcccaccggcggctggcccaccgcccacgcacctgccatggtggagctgcccaacggtgacctgctctgctgctggttcgccggtacttatgagggcagcgcagatgtgcacatcatctgctcggtgctgccgcatgacggtaccaagtggctggagccggtgaatatctccggcgaccccacccgcagcgagcagaacccctcgctgttctacggcccggacaacgccgtgtgggcgatgtacaccgcccagctggaccgcgtagagggtaaggacaatatgcagttcaccgctgtggtgcgctgccagaagagcaccgacggcggcaaaacatggggcgactacaccaccgtgttcccggaggaaggcaccttctgccgccagcccattcaggtgctgtccaacggccgctggatctttgccaactggctgtgcaccgactctgccgagggtctgtccggcgaccccaccgccttccgcatctcggacgatgagggcaagacttggcgcatggtcatgatgcccggcagcaacggccacgtccacgccaatgtcatcgagctggaaccggggcatctggtggcgtttatgcgcaaccgcgaggcctaccgcatccaccgcagcgagtcctttgactggggcgagacttggacggtgcccgcacccaccccgctgcccaacaacaactccagcatcagcgcggtcaagctgcagagcggccgcatcgctattgcctataaccccacctgcacccccaaccctgtgcccggcaaggctgcatggcccggcctgcgctgcccggtggcggtggcgctttcggaggacggcggcctgaccttccccatcatccgctggatggagcgcggcgagggctacatgggcgatgagaacaagaccaataacaagcagtacgagtatccctacctgatgcagggacgggacggcatgctgcatctggcctacgctgcccgcacccggcagggcatcaagtacgtccgcttctcggagcaggacgtgttgggcgcaaagcgggagaccgtgggtctgtataaccccaccgcagcccagagccgctgaaaaagcttttcgagagtttcatcctttttatagatcagaatatcattcaggaggttgatcagtatgctgacccagtacaatcttaaaatgccgcacgcagtttacggcggcgagaacgccatggacaatatcaccgccatcatcaaggcgcgcggcgcaaaaaaggtagccatgttcaccgataagggcattgagggcgctggcctgttcgccctgccggaagaggctgtcaaggcctccggcgcagagtattatgtgctggacgagctgcccccggagcccagctacatggctgtgcagaagctggtggacgagttcaaggtctccggtgcagacctcatcgtggcctgcggcggcggctctgtgatggacgctgccaagctggcaagcgtgctggtgaccgacgcctacggcgtgaaggagctgctggataaccccggcatggcacagaagtgcgtgcccattgtgctgatccccaccaccgccggtaccggcgccgaggtcacccccaacgccatcgtggctgtgcccgaaaaggagctgaaggtgggcatcgtcaacgagaacatgatcgcggactacgtcattctggacgcccgcatgatcaagaacctgccccgcaagatcgcagccgctaccggcgtggatgcgctggcacactgcatcgagtgctttaccagcaacaaggccaaccccttcagcgatctgtacgcactggaaggccttgacctgatcctgaacaacatcgaaaaagcctgcgatgaccctgaagccatggcagagaagaaccggatgcagatcgctgcctactacggcggtctggccatcaccgcttccggcaccaccgctgtgcacgcactgagctacccgctgggcggcaagtaccacattgcacacggcgtatccaacgccatcctgctggcaccggtcatgcgcttcaacagcgagcaccccgccgtgcgcgagcgtctggctgccgcctatgaccgctgctgccacgaggaaaagacctgcaccaccgtggaggaaaagactgcatggatgatcgcccgtctggagcacatcgtcaagcatctggatatccccaccagcctcaaggagttcggcgtgcctgccgaggatctggaaggtctggtcaacgccggtatgcaggtacagcgcctgctggtgaacaatatgcgccccgttaccgccgacgacgcacgcaagctgtatcaggagatcatgtaacagaaaaggagtaaagacttatgaagaccagcgatatcaaaggcatcatccctcccgtaatcacccccatgaacgacgaccctgagcagacggtcaaccatcaggctctgcgcgagcaggtggagcgcctgctggcaggcggcgtgcacggcatcttccccatgggcaccaacggcgaagcctacgccctgtccttccaggagaaggaagagatccttgccactgtcatcgatcaggtaaagggccgcgtaccggtctacgcaggcaccggctgcatcaccaccgccgagaccatccgcctgagcaagcgtgccgaggagctgggcgcagacgcactgtccatcatcacccccagctttgcactggcctcccagaaggagctgtacgaccactacaccgccgtggcaaaggccgtgaacctgcccatcatcctgtacaacatccccgcccgcaccggcaacaagctgctgcccgagaccgtgcaggcactgtgccgtgacgtggagaacatcgtaggcgcaaaggattccagcggcgatatcgagaacctgaaggcctacatccgcctgacccgcgagctggataaggaagttgctattctggccggtaacgacggtgccatcctgacctgcctgaaagagggcggcgcaggcggcattgcaggccgtgccaacatctggccggagaccgttgccaagatctacgattgcttcaaggccggggatctggagggcgcacaggctgcacaggacgccattgccatcctgcagcagaccttcaagtacggcaaccccaacaccatcatcaagaccgccgttgccctgcagggtcaccccgttggcaagtgccgcgcacccttcaactatgtgccggaagagggcatggaggccatcaagaaggttctggcagagaacgaggccaagggtctgcactgaaacgcgctgaagcaaggagaaggctgctatgaataaacccattgtcggtattaccatgggcgatcccgccggttccggcccggagatcaccatcaaggctctggctgacccggagcagtacagctactgccgccccatcgtggtgggcgatgtgaaggtgatggagcaggccaaaaagttcgttggccgcgaggacatcgtcatccaccgctgcgagaaggtgtcggatgccctgttcacccccggcaccatcgacgtgctgcatctggatctgatcgaggacatcagcaagttcgagatagcaaaggtcagcgtggagggcggcaacgcagccttccagtgcgtgaaaaaggtcattgagcttgccatggccggtgaggtggatgccacctgcaccaacgccctgaacaaggaagccatgaacaaggcactggagtactaccacggcgaaaagtcggacggctacacccactttgacggccataccgagatctacgccacctacacccacaccaaaaagtacaccatgatgctggctcatcacgacctgcgcgtggtgcacgtttccacccacgtttccctgcgggaagcctgcgaccgggtcaagaaggatcgcgtgctggaggtcatcgagatcgccaacaaggcctgcaaggatatgggcatcgagaacccccgcatcgctgtggcaggtctgaacccccactgcggtgagaacggcctgttcggccgggaggagatcgaggagatcacccccgccattgaggctgccaaggccgagggcatcaccggtgtcgtgggtccctgcccgccggacagcgtgttctcgcaggccatcggcggctggtacgacatcgtggtgtgtatgtaccacgatcagggtcacatcccgctcaagaccgtgggctttgtctacgaccgcgaaaagcaggagtggaaggccgtggagggcgtcaacgtcacgctgggtctgcccatcatccgcgccagcgtggatcacggcaccgacttctaccacgccggtaagggcaacggcaacgagctgagccttgtcaacgccatcaagtatgcggtcaaaatgaccggccgcgccaactaagttatccccatcccaaccaattcttcattttcttccagagagagccgctgcaccccgtacggtgcggcggctttttctggttttgccctgtttcaaaaagcaacaaatcagccgaaactaaccgcaatgtgtttcaaaaagcgacgcattgcagcaaaagaattgaacaaattctgaatatgtttcaaaaaagaacacaacaagccaaaaaatgattgtgacgcacagcggaaaactatatacttttaatcaagaaagccgcatcggaattgtgcaaagggtcgggctcttgcgcaacagggactgcggacacaaaaaaggaggacacgttctatgacacttcccatgatcattgctctggcagtgactgtcctcatgatcatcctgatcatggtggataaactgcccttcggtgcacccccgctgctggcgctgctgctgctggtggtgttcggcgttaccgacatcaagaccgccttcggcggcttcgcaaaccccaccatcgtcatgctggcatccttcatggccatcattgcggccctgcaaaagaccagcttcatcgtcaagttcaagcagaccatgttcaacatggccagcaagggcggctttaaggcctacgtcctgctgatcctcatcgttatgctgggctgcagcctgttcggcaccggttccaccgcctactatgtgctggtcatcggcctgctgtccactctgccctactccaagcagctgcccccgtccagggttctgatgcctgcgggctttgcagcaaaccacccgctgctgcccttcaacaccgctctgcagtacggcatcgtgatcgccgttctggaaagcgcaggcgttgcggcaaacgtcaatctggtcaagttctctctggtcaacctgtgcctgtccatcggcttcctggtgtggtgcgtcctggcctacaagatcctgccggaccatcccattgccgaggccaaggaagaagctctccacgccggtgagcagaaggtcgccctgaccaagaatcaggagctcatcacctacttcagctttgtgctcgccgttgtgggcatgatcctgcagagcaagatcggtgacgcaggctacgccatcaccggtctggccgtgggcatcatcctgatctccggcgtcatggacttcaacgagatccgcaactccatcagcgcacccatcatcctgatgtccgcaggcgtcatcggcatcgccgatgctctgggcaacaccggcctgaccagtctggtcggcgagaccgttgccaagatgctgggcaccaacgtcaaccccttcgtgctgatcttcgccttctgcatcctgaccagtgtgctggcaaccctgaccggttccaccatcggcaccgtgtacgtctttgctcccatggccattgccacctgcgtcaatctgggtctggaccccaccgcagccgctgccgctatcgtggtctccggctggtgcggacacttcctgcccattgacggtatgcccgccatgatcatgggcgccggtgactacaagatcaccgagttctggaagttcaccattccgcagtacttcatccgtctgctggcgctgacggtgggcgctgtgctgatcttccccatgaagtaacaggagaaacgcaaaatgaaaaacacgtttgagctggagcacgtcggcatcaacaccgacaacgcaggcgaggccgagcagctggcgctgctgctgtgcaagctgttcaacttggagccccgccacggacagaagtccgagtttgccggcaactatttcgagtgcatgaagagcccctttctgggcaagaacggccacatcgcaatgcgcacccccgacctgaaggctgcgatggaggagctggaggaaaatggcttccgcttccgcatggagactgccgcctattttgaggacggccgtatcaagaatgtgtatcttgagggcgagtacggcggttttgccatccacatcatgcagaaataacgccaactgaccgatcttgtgcagaaccggggatggagcaatccgttcccggttctgtggttcacgccccgcgaaaattcagaggagaaaaattatgctggttcctgtattgctttttatcgtcggtctgctgttcctgatcaagggcggcgactggttcgtggacggtgcttcggcactggcccggcggttccacctgccggagctgcttatcggcgcaacggtggtgtccatcggcactactttgccggaggtcatggtgtccaccatgtccgccgtgtccggccatggtgagatcgcctacggcaacgccatcggctcggtcatctgcaactctgccctgatcgccgccatcaccatcgccgtccgtccgggcaaggtagaccccaagaccctgcgggtgccggtagccttcttctttgccgcagccgccatctactgcgtggctgcctacgccatgggcgaattcacccgcccgctgggctttgtgatgctggccatgttcgtggcctacatggtggcaaacgtattgcagatgaaaaaagcccctgccgccgccgaagcggaggccgaggccgaaaatgcaggggaagagatgtcccttaccaaaacgctggtgctgctggtgctgggcgctgtgctgatcgcactgggcgcaaacctgctggtggataacggcaccctcatcgcacaggcactgggcgtgccggagtcggtcatcgcgctgacctttgtggcgctgggcacctctctgccggagctggtcaccgccatcacctcgctggtcaagggctgcagcgatttgtcccttggcaacatcgtgggcgcaaacgtgttcaatctggtgctggtcagcggtatgtccgtcacgctggcgcccttcaccgtgccgcagagctctactttgttcggcatcaattccagccttgtgctggagatcccggtcatgctggctgtcatgatgatcatgacccttcccgcactgaagcgcggcaagctgtcccgtgcacagggcattattctgctgtgcatctatgctgccttctgcgccatccagtttaccatgtgatattcccggagatacttccttgcccccggcctgctctgtcaggccgggggctttggttattgtaccctgcgggacggctttttgttttacggctgggtgagcacctccgggtcaccgggcttatagatatgagtcttggccagacggcgcatggtgtcctcgtggttgcggctggcgtaggcggtgtacagaatatccatcacgttcagctgggaaaggcgggaggacatggcaccgttgcggaacaggctctcgttggcggcgacatacagcacatggtcggccagctgtgccacctcggaggggtagtagcgggtcaccgcgatgaccggtgcgccgcccgccttcatctccttgatgcactggatcatctccatggtctgcccggagtaggagaacacgatgcccacatcctgcgcggtggcgttgcgcgcctgcaaaagctgcgagtgggagtcctcgttgaccacgcagggcttgtccaaccgcaggaattttaggtaggtgtcttttgccacgcacagcgaggaaccaatgccgaacaacagtaccgtgcgggcgttggcgatcagctccacgcactgctccagctcgtccagcaaaagcagccgctgggtgtccagcaggctctggatgttcttgtgggtcaccttgtccacgatctcctgcaggctgtcctgcggggtgatgtccttttcccggtggctgccgttctcgccaagggtggcaagctccagcgtcagggcgtggcgcagttctttgtagccctgaaagccgatgacccggcagatgcgcaccacgctggaaggggaggagaaggagcgccgcgccagatcccggatggtaagggtggtggtctcgtccgggttttccagaatgaactgcgcgatctgccgctcggtgctgctgagggagggctgcacctcccgcaggcgtaaaagaacgttctgcatatagatacctctgttgtatttcaggatggattgaacaagctgcacaaaaaagtcgtacttgtaagcaaaaatttcaaaaataatgcttgcataaaacattgtaccacaaaatagtctttttgtggacattttgtttgaaaaagtttatactttagtcacaatcacgccgcaaggggtgcggcggaaactggaggtgcaggatatgggtttgaatctgagtgggatgaccaccgagacccgcaacccgcgcacgatgcagctggaccagatgtccccgctggagatcgtgactgtcatgaacgaggaggacgcccgggtaccgctggccattgccaagtgcctgccgcagatcgcgcaggcggtgacatgggcggcagaatcctttgaaaaaggcggacggctgttctatatgggcgccggtacctccggccgcttaggcgtgttggatgccgccgagtgcccgcccaccttcggtgtgccgaaggagatggtggtagggctcatcgccggcggcgaaaaagcctttatcgaggctgtggagggcgcagaggacagccgggagctggctgttgaggatctgaaagcccacggcctgaccgcaaacgaccttgtggtgggcattgccgcttccggccgcacgccctatgtgctgggcggtctggactacgccaagagcgtgggctgccacactgccgccattgcctgcaatatcggcagcgccatcggcaaggccgcagagcttgccattgaggtgaattgcggccccgaggtattgaccggttccacccggctcaagtccggcacagcacagaagctgattttgaacatgatctccaccggctctatggtgcgcaccggcaaggcctaccagaacctgatggtggacgtgcagcagaccaacgaaaagctgcacacccgcgccgagaatatcgtcattgacgccaccggcgtggagcgagagaaagcccgcgccgccattgacgcagcgggcggcagcgtaaagactgccatcaccatgctgctggcagactgcgatgccgcagaagccgcccggcggctggaaaaggcccgcggccatgtgcgggaggccatccggctggaagtgctgtaagatatctctaagttccttagcggcaaaggccgcatcggatatacacctgttttaaaggaggacccacttatgacgaatgaagaactggtccgcgcggcgctggagaaggtcggcggaaagagcaacgttctcaccgcaaccaactgcatgacccgtctgcgggtgcgcgttaaagatgacgccaagatcgacgacgagggcctgaaggccatcgagggcgtgatgggcatcgtgcatgaccgtaccggctatgtggagatcgtggtcggccccggcaagtgccgcaagtgcgcagatatctgccgcgacatgggcatcccggcggacgccgccgcttccaccgccaacgactggcagaccaacaaggccgcagtcaaggccggccagaagcagagcaaggtcaaggagctgttcaagaccttcggcgatatctttatccccctgatcccgggcgttgtggcttccggtctgtgcgccggcatcaactccctgatcggtcaggtggtgccgaactacgccgacatccccgcactggcccttatcagcaccctgctgggtctgatgaacacctgcttccttggctacctgaccgcatgggtcggctaccgcgcagccgaaaagttcggcggcacccccattctgggcggtatgctgggcatgatcaccggtctggagggcatcaacaagatctcttccattctgggtctcttcaacgaggctgtgccgctggattccatcctgcgtgcaggccgcggcggcgtgctggccgttgtgctgggcgcatggtgccttgtcaagatcgagcgctgggtgcgtaagtggatgcccgaatctctggacatcgtgttcaccccgctgatcaccatgatcctgtgcctcgtgccctatatcctgatcatcatgcccgctaccggctatgtttccaccgcgctgtgctgggtggttgaaaagctgtgcatgagcgatatcctgatcgtgcgcatcattgccggttatatttccaccgctctgttcctgcccatggtcgctatgggcatgcaccatggtctggttgctctgtactccgtgcagctggagagctttggctacgttaccctgtaccccgctctggctatggccggtgcaggtcaggttggcgctgctgtcgctatctacttcaaggctaagaagtgtggcaacacccgcctgaagaacgttatcaccggcgcactgcccgcaggtctgctgggcatcggcgagccgctgatctacggtgtcaccctgcctatgggcaagcccttcatcagcgccggtctgggtgccggcttcggcggtgccttcgttatggccatgcaggtggctgctaccgcttggggcccctccggtctgctggctctgttcgtcatgaccgccggccctcacggtgtggctgcttccgttggctgctacgcagtgggtctggtcatctgctacatcatgggctttatcgtgaccaacgcaatggtctctgttgaggacgttgccaatgcttaaaacactcggacggtcagtgtatctgacgcagtttgaggaacagcgtgcgtcgctttccgcttttgcggcaggcggcgcgcctgtttttatctcactgcatatcagcgaagaatttgatgccgcttactgcgcccgcgtgcaggaaatgtgcgattttctctccgcgcagggctggcgcattctggcagatgtgtcggaaaagaccatccggcagttcggctgtgccgacctgaccgcgctggcaaagcggctgcacctgtggggtctgcggctggactacggcttctcgctggaggagatgtgtgcccttgcgcagcagctgcccgttgccgtcaatgcctccaccaccaccccggaggtggcacggcagctggcggcgggcggtggcacggtcatcgccatgcacaacttctacccccgcccggagaccggccttgacccggaatttctgcgcgagagcaccgcagctttgcaggcggagggcttgcaggtgtacggctttatccccggcgacgccctgctgcgcggccccttgtatcagggtctgcccacgctggaagcccaccgcaccgctgccccctcggcggcctttgcggacttggcgctgaactatgggctggacggcatttttgcgggcgacccggaggtcagcgcccgggagcaggagtatatccggcacttctgcaccaccggcgagctctgcctgccggtcgtcctgcgccccggctatgagaccctgtacgaccgcacctttacctgccgcccggactcgcccaaggggcttgtgcggtatcaggaatcccggctctactcctgctttggcagcactgtgcagccggacaactgcgcagagcgccgccgccgctgcgtgaccatggataacattggctacggtcgctactccggcgagatccagcttgtgcgcgctgacctgcccgcagacgaaaaggtaaacgtcatcggcgaggtgcccgcagaatacgacctgctgctggactgcattaagcgcggaaagaccttccgcatggtaaaaacatcataaaaacaagcaccggagcgtccgcagacgctccggtgcttgtttttgtttatttattgattctttcttggatacacaaaggtgtcgcggcggtacactgccacgagatacgccgccatgaagcaccagatgatgggctcgcacaggatgacggcgttgtaggcgtagcgcgggatgaacaccagcacaaagatcaccttgcccaccagctcgatgacgctggaaaacagcggcagcaccttctgcccaaggctctgcaaagcgtaccgggtgcacagcagcacccccagcaccgcgtagaacggcgcgttccacatcagataccgtgcgccgttttccagcacgaggggcgcggaggaaccggagatcagctgcaccagctgccgggcaaaaagctgcatcagcaccacctctgccgccatgatgaccaccgagcacaggtacatggtgcgcattcccttgcgcacccgctccggctgggctgcaccccggttctgggagacaaaggtggagccggcgttcgccatggagatcagcggcatactggtaaaggagaacagcttgcgcgcggcggtgtgccctgcaatggtcagcgtgcccagcccgttgatgccgtattgcagcaccaccgaccccgccgacacgatgctgctcatcagccccatggagatgctctggctgaacagctcccagtacaaatgctgtcccaccgcccagtgcttgcgggcgggcagcagcagcggcacgcggcgcatcacatacagaatgcacagcactaccgagatgccctgcgcaatgacggtagccaccgccgcaccctgcacgcccatgccaagcccggcaatgaaccatagatccagcgccacgttcagcccggagctgataagcaaaaacaccagcggcatcacgctgttgccgatggcgcgcagcagcccggcgcacaggttataaaggaacatcaccagcacgcccaagtcgatgacgatgatataccggtaggcgtcctctaaaatttcggcgggggtgtccagcagctgcaacagcggccgcaggccgaaaaagcccgccgtggtgatgacaaagcttgcgcaaagcccgatgaccagcgaaccggccaccgtccttttgagcagatcctcgtcctgcgccccgtaggagcgtgcagccacgatggaaagtccgttgccgatgccgatgccaaagcccaccagcagctcgtagatggacccgcaggagccgatggcagccagtgcggtatcgcccagcacattgcccacgatcatggtatccacggtattatacagctgctggaataaattggacaccagaatgggcagcatgaacagaaaaaggttcttgaaaataggcccgtgcagcaggtctgcattccggttaaagaggtttgttttcaggggtcgcgtctgggtcatagggttcctttcttcgcgcaaaaaggaggccgttgcacatttttgtgtgcagtggcctcttttgcggttaaacgatttaaaaaaattttatttgtgtagttatgaaacaccgtaggtgtttcgcaactacttttttataactcctgctgctcaaacccgttgacggtcagcacggtcagggcggtaaagcctgcggccttgatggcggcggcggcttcgtcaaagccgaaggtcagcgcggcggtgtcgtgggcatcggcggtgatgatcaccctgccgcccagcttgttccactcacccagcagccatgcgccggggtagaagtccttgcggtagccccggtatacgccgccggtgtttacttccagaatgcagtcgttctcccgggcagtgtgcagcgccttgagcgctgctgccttgtagcggggggattcctcgtcaaaaaagctgccgtccgcgttcagctttttgacaaggtcgatatgtcccagaatatccggctttttggcggcaatcttttccacctcggcaaaataggcttctaccgctgccagcgggtcgccgtcaaaatcgttgttgatgcagtcccgcagatcctcggggcggaaatcgatctcgtagtatctgccggtgttcctgccgtacaggtggtgcgcgctgccgatccagtaatcaaagcccttgggcgtgccctcgctcagcaggtcccactcgatgccgcacaggatatccaccttgccccggtactcgtttttcagcttggcgatggtggcgcggtactgcgcggtgcggccgggggtcatgcagtattcgcggtcaggcgttgtgtagctgtggccgctgaaaccaagggtggtcagcccctgcgcacaggcggcacccgccatctcctgcagggtgttcttgccgtcacacagggtagagtggcaatgtacgctggattttctgtaatctgccataggcttctcactgcatcctttcctgcttgaccttgtggtcgatgacatggcgcttttccagctcccgggtcacatcctctacggtgatgcccgcgctgaccatcagcaccagtacatgataggcaaggtcgctgatctcgtagaccgtctcggccttgtcctctttttcgcccgcaataatgacctcggtgcattcctcgcccacctttttcaggatcttctccttgcctttttcaaacaggtaggtggtgtagctgcctgcggtgggggtatccttgcggcccttgatgaggttatacagcccctgccagctgaactgcttcaactccggggagacgtatacttcattgaaaaagcagctttccgctccggtgtgacaggcggggccgtctttcacgacctctaccaccagtgcgtcggcatcgcagtcagcggtaatggacaccacccgctgcacgttgccgctggtctcgcccttgcgccagatctcctgacggctgcggctccagaacacggtgcgcccctcggcaatggtcagcgccagtgtttcggcgttcatgtaggcaagggtgagcacctgctttgtgtagtgatcctgcacgatggcggggatcaggcctttttcatcaaatttcagttccatgacggttctccctccccggatggggatactgtgtattttatcgtattcaagacaaaaatgcaaggtgtttttgcgctttttacagccgcatttccacgccgttggcgttcaggtactccttcagttcccggatacccagcagcttctggtggaagatgcccgccgccagcccggcgtcgatgcccttgtggtggaacaactccagaaaatcctcttttttgcccgcgccaccgctggcaatgatggggatgttcacccgggcagccaccgcgtccagcatttcaaggtcgaagccgttgcgcacgccgtcggtgtcgatgctgttcaggcatatttcgcccgcgccgtgggcggcgcaccagctgatccagtccagcgcatcccggccggtatcctcacgcccgcccttggcgaacacccggaactgtccgttcacccgcttcacatctgcggaaagcactacgcactggtcgccgtagcgctgcgcggcggcggggatcagcccggggtctttcagcgcgccggagttgacgcttaccttatccgcgccgcatttcagcacccggtcaaaatcctccagcgtgttgatgccgccgcccacggtcagggggataaaaatctctcccgccacccgggtcaggatgtcggtaaagagggcgcgtccctcaaagctggcggtgatatcgtaaaacaccagctcgtctgccccggcggcgttgtacagccgtgccatctccaccgggtcggccacgtccttgatgccctcaaagttcgtgcccttgaccacccggccgtcgcgcacgtccagacaggggatgatgcgtttggttatcataaagctccctctttctcagtcctgcaccagctgcacgcagcgggcaaggtccagcgcgccggtatacaggcttttgcccagaatcgccgctgccgtgcccatctgctgcaattccagcagctctgcctcggaggagatgccgccgctggcggtaaaggccaccccgggcacttgggccgctaattgccggtaaaggctcaggtttgtgccctgcatcgcgccgtcacaggcaatgtcggtgtagatgatggcggtgcagccggcttctgccagccgcttgcagaaggctacgcccggctcggcgctgacctccttccagccgtggatggccacatagccgtccttggcgtccacgcccacggcgatcttgtcgctgtatttttgcagcatccgggcggtaaaggaaaaatccgtcaccgccacgctgcccagaatgcagcgccccaccccgagggagaggtatttttcaatgcgatcctcggtgcggatgccgccgcctacctcgatgtacaaaccgccctgctttgccagtgcggcaatggtgtcgtagttggaaagggtgccgtccttggcaccgtccaagtccaccacatgaagattttttgccccggcggccacaaagctgcgtgcctgtgcgcaggggtcctgcccgtaaacggtcatgcggtcgtagtcgccctgtgtcaggcgcaccacctgcccgccgcgcaggtcaatggctggaaatagctgcatacattatgacccctctcgtgaaaatgcgtttggagcggcccgcggagcttgtcggggagaagccccctccatctgctaacgcagaccgctctgccacttaaaagccccactggggctttcattgctacgcaaacgcggtcgctccaaacgcgaaattaaaaataatttttccgctaaatatgcccagagcgcaagcggagggcatttaaaatcgttttactcggtgactgagagggcgagcccgctcacaattcgctgaacgccttgaggatccgcagcccggtatcgccgctcttttccgggtggaactgggtgccgtatacccgccccgcccgcaccgcgccggtgaccgggatggaataatcgctgacggcaagggtgctttcggcgcagtttttgccgtagtagctgtggacgtagtacacatactcgccctcgcggatgtagtggaacagggggtcgtcctttacgatgtgcaaggcattccagcccatctgcggtactttcagacttttgtccgcgaggtcgggccccagcgggcagacctcgcctttgataaagcccagcccggcgtgctcgccgtattcgtagcttttttcaaacagcagctgcatcccaaggcagatgccgagcaaaggcttctcttccgcctgctccttcagcaccggcacaaggccggtggcggtaagctttgccatggcatccccgaatgcgcccacccccggcaggataagccggtcggcggcgcggaggacatcggcatcggcggtgaccaccgcctgcagccccagctgctgcaagctggaacgcaggctgaacaggttgcccacgccgtaatcaagaatggcgatcataccagcagtcctttcgtggagggaatctcgtcccggtgtgccgcgtcgatgcgcacggcttcggccagcgcgtggcccgcgcccttgaagcaggcttccagaatgtggtgggtgttctcgcccgcaaactgcacaaaatggacggtggcgggcacgctgcgggcaaagccgtaccagaactccttggcgcactctacgtcaaaatcgcccaccttttcggtctggcagcggatgtcccagttcagggtgcaccggccggaaagatccaccgcgcacagcaccagtgcttcgtccatgggcagatggaagctgccgtagcggcagatgccgcgcatctcgcccagcgcccgggcaaaggcctgtcccagcgcaatgcccacgtcctcggtggtgtggtggtagtccacctgcacatcaccgtggcaggtgagcaccagatcaaaccgcccgtgccgggcaaacagctccagcatgtggttcagaaagccgcacccggtgtcgatctcgtagcggccggtgccgtccagatcaagggtcagctcgatctgggtctcgttggtgttgcgttccagcgttaccatgcgctctgccattgtcacacctccagtattttgtccacagcgtccatcagtgcctgcatctgctccggcgtgccgatggtgatgcgcagccagttttcaatgcgcggcgcatcaaaatgccgcaccagaatgccgttttcctttaactttttgtatagcgcaccgccatttatccgctctgtgctggcaaatacaaagtttgtgcggctgtccagcacggtaaagccccggtcagtcagctgctgcatcgtccatgcgcgggtgtccataatggcggcgcgggtcttttcaaagtaggcagtatcttccagcgcagcctgcccggccttcaaagtcaggcggttgatgttgtaggggttcaggctgaacttgacccggttcaaatcggcgatcagcgccgcgttgcccatggcaagcccaagccgcgcacccgccagctgccgggatttcgagaaggtctgcaccaccagcaggttgtcgtatttgtcgataagcggcacacagctctcgccgccaaagtccacataggcctcgtccacaatgaccacgctgtccgggttcgatcgcaaaatgccctcgatggcatcccggggcaagcacagcccggtgggggcgttggggtttgcgatgacgatggtctcgtgcaggccgtggtaatcggcggggtcaagggtgaagtcctcttttaaggggatgatatgggtggggatgtgcagcaaaccgcaccacacgccgtagcagccgtaggtgatgtccgcaaaggccagcgggtggctctcgtcacagaaagcccgcagcgcaaagaacaggttctcgtcgctgccgttgccgggcatgacctgggaaggctgcaagccgaaatgcgccgccgccgtgcgcagcagctgggcacaggcggggtcggagtaaaggcgcagcttttccacctcggcttcgcttacggctgccaccacccggggcgacggcagataggggctttcgttggtattcagtttgatgtactgctgatcctgcggctgctccccgggtgtgtagggggtgacagcagacagggcaggggaaagaaaacggctcataatggtttcctcttacttctcataccgaatggtcacgctgcgggcgtgggcgtgcagaccctcgcgctcggcaaagtctgcaatgcggggcgcaacggcttccagcgcgtcccgggtgtagtagatgaagctggacttcttgacgaaatcgtccacgcccagcgggctggaaaagcgtgccgtgccgctggtgggcagggtgtggttggggcctgcaaagtaatcgcccagcgcctccggcacgttgcggccaaggaagatgctgcccgcgttgcggatctcgttcagcacgccgaaggggtcctccacgcagacctccaagtgctccggcgcgatgatgttgcaggcctcgatggccttgtgcaggtcggtgcagaggatgatcttaccgttgtcgtccacgctggcgcgggcaatggcagcgcggggcagctgcgggatctgcacctccaactccgcctgtaccgccttggcaagggcttcgctgtcggtgacaagcaccgggcttgccagcctatcgtgctcggcctgacttaacaggtctgccgccacccacgcgggattgcagctgccgtctgccagcaccagaatctcgctggggcccgcgatcatatcaatgcccaccttgccgaacaccttgcgcttggcggtggcaacgtagatgttgccggggccaacgatcttatccaccgccggaatgctctgggtgccgtaagccagcgccgccacggcctgtgcgccgccggtcttgaaaattttggtcactccggcggtggcggcagcggccagaatgaccgggttcaccttgccgtccttcccggcgggagtggtcatgacgatctcggacacccctgccaccttggcggggatgacgtccatgagcacggtggaagggtacgccgccgtgccgccgggaacatagacgcccgctttttcaatgggagtatatttctgccccagtacaatgccggggcggtcgttcatcacaaaattcttgtgcacctgctggcggtggaactgctcgatgttctccgccgcctgccgcagggtctcgaggaaatacgggtccatacccgcaaaggcttcatcgatctcggcctgcgtcacctgtaaattttcgattgctgcgccgtcaaatttcagggcgtagtccttcagggcgtcgtcgccccgggcgcgcacgtccgcaatgatggcgtccaccacgtcctccacattcttctcggcgcggatgtcccggttcagaatttcctccggcttcagctcatcaaaattatacagcttgatcatttctcttcctcctgcttgtgcaaggtgtcgcgcagcttttccagcatggtgtccatctgccggtgcttgaactggtagctggccttgttggcgatgaaccgcgccgagatgggcatgaactcggtgaccacttgtaagccgttctcccgcagggtggtgccggtctccacgatgtccacgatgacatccgaaagcccaaggatgggggccagctcaatggagccgttcagcttgatgatatcgatatcccgccccatggaggcgtagtagcgctttgcaatgttgacgaacttggtggccacccgcaccgggcggctggggtcgtcccggtagcccgccggggcggctacgcacatccggcagcggccaaggccggtgtccagcagctcgtacacgtctgcggcggcctcggtcaggatgtccttgcccacgatgcccacatcggcagcgccgtgctccacatagatggccacgtcgctgggcttgaccagaaaataccggatgcccgctgccgggttctccaccaccagcttgcgggtggcgttgtagtcctccgggcagccgtagccgatgcccgccagcaaattatacaccttgtcgcccagccgccctttgggcagcgccacgttcagcatcaccttgccggtgtcctgatgctgcaccggcggcatcgcgttcagccggtccagctcatccagatacaccgcaaagccgatggcgcccgccccgggggtgaacttttgcagcagtaaatcgtaccgcccgcccttcagcagcgggcggggcagggctttgagatagccctgaaacacaaggccgttgtagtattccatctcaccggctaaggtcaggtctaaccggatgctgccgcccgcgtgtcccagcgtgggcgctagggcggtcagctctgccacagcggcagtcatagcggggttacggcagagcgctgccgccttggaaagggtggcagcgtacccgccggaaagctccagcaccccgcacaaagcgtctgccgccgtttcggaaagccccgcagccagcgcggcggcgcgcagctcgtgggcgtttttctgccgcagcttttccagcagctgcgcccgggcggcttccggcacgcccagcgcatcgaacaggccgaacaggtagcccatgtggctgacttccagcacccactctgcgcccagcgccgccagcgactgcgccgccagacacaccgcctgctgcacctcagcctcgcccacagcgcccagcatctccagacccatctgggagatctctttaaaggtgtggctttcggcagaggggcggtagacgttctcgtggtagtagtaccgcagcgtctcgcccggcgcgggctgcgccgtcttggcgatggacagggtcacatccggcttgagcgccagcagacggccatccaaatcggtaaaggtgatgacctgctccgacgacagaaagctgcggttctcctgatacaggctgtactcctcgaaccgtcccatgtggtacttgcggcagcctgccgtctcgtacaggctgcgcagcgcaaaggaggcgcgctcctttggctgcaaatgctccagactgaactccatttcgctccctcgtttcctttcccttgtttctttccctgcaccggcacaattccggcgtctctatacacaaaaacatccggcgcggcatcctccgcaccatagaatgaaaggcttctgtttttattttactttatctgggtaaagttgtaaagcgtgaaagtgacgtcttttccattcttatcctacaatttttcagtgcgtttgtacagaaaggcgaaaatttttcaacccatcagcccctctcgtgaaaatggagcaccggagtgtccgcagacgctccggtgctccgaaattataaatattctttccgctgaccatgcgcagcaacgatgacgaccgccgccagcggcggaaacagggaggagttgttggggcagcggccagcaagacgcgagtgccgcccaaggcacgatgcggatgctgggtgccgcaacccgtaaaacgcggagcgcattccaaatcgtcctcctcctggcagccttgtgttccgccgcgcaaaagcgtatactggggcaaaaaggaggcgtttgccatgtggttcgtttacgcgctggggtctgcggtgttcgctgcccttacctcgattctggctaaaatcggcatcgagggggtcaactccacccttgccaccgccatccgcacggcggtggtgctgctgatgagctggggcatggtgttcctcaccggcacccagaccggcattgcggacatctctcgccgcagctggctgtttctggtgctgtccggccttgccaccggcgcaagctggctgtgctactaccacgctttgcaaatcggtgcagcgtccaaggtagtgcccattgataagctcagcgtggtcatcacccttgcgctggcctttgtggtgctgcacgagccctttaccgccaaaagcctcatcggctgtgccctcatcaccgccggcacactgtttatggtgctgtaacgggatatgcaaaacggctgctgcacgtttttgtgcagcagccgttttatcgtttttagtcctcgccttttttcagtatgtccagttccggcatcagctcggtgctcacgatggtaagcatctgttccagcttggcgcattcctcgggggtaaagcgctgccgggcacgctccactacggtgtgcagataagagtagctgatgttgtagtagtcgatatacttctgggtggggcgcagatggtactcccgccggtcggtggtggactggatcttttccacatagccctttttcaccagactgccgatcttgtacgccgcattgggggtggagatctgcatcatgcgggaaaactccgcaatggtgggctcgcccatggccatgatgccctccatgcagaaggattccaccgtggtcagggtagcctcacgggtggcaaagcgctggaacacgttctgataaaaatgcagcttgaatttggtgtagacgtcctgaaaagctttttccagcatgggtcatgcgcctccaatgctttagttttcttgctatacggctagtataccacgaaaatgccccgctgcatagcggaattttacgcagcatccccggaagtttttgcccgggtgcgggcgcggatgacgctgagcaccgccagttccagcacgatggctaccaccagcagcaccagcgaggtgacaaggcttgcgcggttgcccagcactgcctgtgcaaggccggtgatgatgtagcacaccgccgagcaggccgccgccgtaatggcatagggcagctgggtggaaacgtggttcacatggctgcaatgcgcgcccgccgaggccatgatggtggtatccgagatgggggagcagtggtcgccgcacaccgcgccggacaggcaggcggcaatggacaccaccagcatctcgccgtccgggaaggcctgacagacgatggggatcaggatggagaaggtgccccaggaagtgccggtggcaaaggcaaggaacactgccacaaggaagatgatgaacggcagcagatactgcaaagccgccgcagagctgcccagcaggtttgccacataatactttgcacccagcaggccggtcatgccggacagcgtccatgcaagggacaaaatcagcatggggctgaccatggccttgaagccctcggggatgcaggcggcaaagtcctgaaaggtcatcacgctgcgcacccggtaaaatacaaaggtgaacagcaaagcgatgctgctgcccagcaccagacccgccgaggcgttgcagtccgcaaaggcggtgatgaagtccacgccctcaaagaagccgccggtgtacaccatgccgaagatacaggccgcgatcagcaccagcaccggcgcgatcaggtcgatgacatggccgtttgtatcattaccatcgtccacatcgtcgccatagggacggtcggcggtggtaaacaggtctccgtttttggcgttgtcctcgttcagcttcatggggccgaactctgccccggtaaagatgaggaacaggctcatcaccacggtcatgacggcgtaatagttataaggaatggtacgcaagaacatggtaaagccgttgatgccggaacccgccgggacgctggaggtgaccgcagccgcccagctggacaccggcgcaatgatgcagatgggcgcagcggtggaatcgatcaggtaggccagcttcgcgcgggacactttctgccggtcggtcaccgggcgcatcaccgagcccacggtcaggcagttgaagtagtcgtccacaaagatcatcacgcccagcagcagggtggcaaactgtgcgcccgcccggctgtggatgtgggtggaggcccagcgcccgaaggccgccgagccgcccgccttgttcatcagtgccaccagaatgcccagcatcaccagaaaggccagaatgcccacgttgccggagtccgacagcttggtgatcatgccgccgtcctcgttgaagaacagagtgttcagcgccagctcaagattgccgttggcatacagcagcgcaccggaggcaatgcccaccaatagcgaggtgtacacctccttggtgttcagcgccagcacgatggcaatgaccggcggcagcagggaaaagaaggtgctgtacaccgcacaggtgtaggtggcggggtcggccaccttgccgggggtcaccgccgtgcaccacagcagcagggcaaagacgaacaacgcccccacccaggataagtttttgtttttcataagctcctcatatcaagtatcagtcattttctgtgaaaaacgctccggcgtatcggggcgcaggctgcggggcagactacccacagaaatgcaaagggggtgtgcaccgtgccggattacaaggccatgtactttgaactgttccgcgccagcgtgcaggccgtgcagcttttgcaggacgcgcagacccgcgccgagcagcagctgctggccgcagacttgccgccgctgcggctggacgaaacagaaccggacgatccttagccctttttggcctcggccttagcggcaaacttttcttcaaagatgataaagcgctcgtgggtgccgccgcccacagggcctttctcgtccgcaagcgtcaccttgaaggtcagcttgcggccctctacggccaccagctcactgtggcaggtcacggtcatgcccacaggggtgggtgcggtgtgctccagctccagcttggtgcccacggtgccgctgcctgcctccagcgcaggggcaacgctctgccagcaggtcttttcggccagtgccaccagtgcaggggtagcaaacacgtccagcgtgccgctgcccatggtttttgcggtattctctgcgctcacgcgcacgctctgctcgccgcagatcccggtttccaacttcatatacagttcctccttatgcgtcctatggacgcagttgtgttatttgtggttacacacttttataagatatcacaaaacgcaccggaatgcactattttttgcatattttttcaggggagcacccggaaggcggacgatttggaatgcgcagcgctccgcggggaaag

SEQ ID NO: 13756 - DNA, 4030 bp, Unknown
  gut microbiota DNA sequence
actcgcccttgacgatcctaaagaagaagtcgaagcacaaaaaagctagcgctgcgccagtcggcgctatcgctttaacgcttttttcgcttctccatccatagcccctcagtcgctgcgcgacagctccccccgggggagcgagcgagcgcccgcagcgctgcgctttcgcagaaaacggcgctgcaaatgccgtttccctctacgacccctcccgtgaaaatagcgtttggagcgctccgcagagcttgtcggggcaaagcccctccatctgctaacgcagaccgctctgccgcttaaaagccccactggggctttcattgctgcgctacgctccgcaaacgcgaaattaaaaataatttttccgctgaacatggctagcaacgacgacgaccgccgccagcggcggaaacagggaggagttgttggggcagcggccagcaagacgcaagtgccgcccaaggcacgatgcggatgctgggtgccgcaacccggaagaagcggaagccattccaaatcgtttatttgcagcacagaatcgtgcggtcttttaactttttcaccctcaaaagttaaaaatccagctgaaaaacgctccagatggttcaaaaaacaatttggatgtgttatactagaagccaaggtgtctgtcggacggggaaaccggcgggcatgactgcgtgttccatgtggaacaaatctttccccgggaggaagaaaagcgcgtggcaaaaattgtagcgatcgcaaaccagaagggcggggtgggcaaaaccaccaccgccgtcaacctttcgtcctgcgtagcggcgctgggcaaaaaggtgcttatcgtagatctcgacccgcagggcaacaccaccacaggctatggcatcccaaagcgcagtgtggaggcaggcacttatgaggtgcttatcggcagggcaacggcggcacaggccatccggcacaccgagtaccgcaccgatgtcatcggctccaacacccgtctggccggtgccagcttggaaatgatcgacctgcccggccgcgaagggcgtctgcgcaaggcgctggctgaggtgcagaaggactacgacttcatctttatcgactgcccgcccagtctggatctgctcaccctcaacggcctgagcgcctgcgacagtgtgctcatcccggtgcagtgcgagtactatgcgctggaaggcttgtcggagctcatcagcaccctcaagaccatccgcaaaaagtataacccgtatctggatatcgagggcgtggtgttcaccatgttctcgctgcggtacaacctgaccgtgcaggtggtggagcaggtgcagaagtacttcggctccaaggtgtacaagaccaccatcccgcgctccatccgcatttcggaagcgcccagctacggccagcccatcaatttctacgagccaaagggcaagggcagcgaagcctacatggatctggccatcgaattcgtcaagcacaaccgcccgcaggagcctaaaaagtcccgcgcaaaggctgcacccgccgcagagccggcgaaaaatgctctggaagattaaaacagggggaacaaggtaaacaatggcaagaggaaaaggagggctcggacgcgggctggacagtctgtttgaggacgcagcaccggtctttgagtcagagcacgcagcggtggaaacgctgccgctgcgcgagatcgagccggacccagaccagccccgcaagacctttgagcaggagaccctcagtgagctggctgccagcatcgccgagcacggcttgctgcagcccatcgcggtgcggccaagacccatgggcggttacagcatcgtggcaggcgagcgccgctggcgcgcctcccgcatggcgggtcttaccgaggtgccggtggtcatcaaggatgtgtccgacgagcaggctatggagctggcgctggtggaaaatttacagcgcgaggatctggacccggtggaagaagctgccggcatccgggagctgatgacccgctgcgacctgacacaggagcaggccgcccgcaagctgggcaagagccgcagcgcactggccaacagtctgcgtctgctcaacctgccggaaacagtgctggagctgctgaagagcggctttatcaataccggccacgccaaggtggtgctgggtctgcccacaccggaattgcaggccgaagccgcgcagatcatcgcggacaaccagctgaacgtccgtcaagccgaggcgctttgcaaaaagatggcaaagcccgccaaggagccccgcgaacccgccccccgcggcactttgccggtggaggtggaagagagcctgaaacaggtgctgggcagcgaggtgaacgtggcctaccacggcggcaagggcaagctgacggtgcatttttactccgacgagcagctgcgcgcctttgcaaacctgctgggacagtaccagatggaaaccgaataatcatgcgatccaaggcgggaactgccgcctttgaacggcagcggaaagccccaggtgcaccgctgcaagcccaatagagttaaggagagtcaatcatgctggatatcaaatttgtccgcgagaacccggacgccgttaaggaaaacatcaaaaagaagtttcaggatgcaaagctgccgctggtggacgaggtcatcgaaaaggatgccaagtaccgcgcagccctgaaggaagtggaggccctgaaggccgcccgcaacaagctgagcaaggccaacggcccgctgttcggtcagctgaagaagtgcaccgacgaggcacagaaggctgagctgcaggcacagatcgacgccaacaacgccgccgtcaaggcggacgccgacaagatggcagagctggagaaggaagaggaggaactgtctgcccgcattcaggagatcatgtactccattccccagatgatcgaccccagcgtgcccatcggcccggacgatacctataacgtggaggctcagcgcttcggtgagcccgttgtgccggatttccccatcccgtaccacaccgagatcatggagagctttgacggcatcgatatggacgccgcgggccgcgtggccggtaacggcttctactacctgctgggcaacattgcacgcctgcacgaggctgtgctggcctacgcccgcgactttatgatcaacaagggctttacctacgtcatcccgcccttcatgatgcacggcaacgtggtgcagggcgtcatgtccttccccgagatggacgccatgatgtacaagatcgagggtgaggacctgtacctgatcggcaccagcgagcacaccatgatcggccgcttcatcgaccagacgctggacgagagcaagatgcccctgaccctgacctcttacagcccctgcttccgcaaggagaagggcgcacacggcattgaggagcgcggcatctaccgcatccaccagttcgagaagcaggagatgatcgtggtctgccgccccgaggagagcgccgactggtacgagaagctgtggaagatgtccgtggagctgttccgcagcatggagatccccgtgcgccagctgaactgctgctccggcgatctggctgacctgaaggtcaagagctgcgatatcgaggcttggagcccccgccagcagaagtacttcgaggtctgctcctgctccaatctgggtgacgcacaggcacgccgcctgcacatccgcatcaagggcaaggacggcaagacctatctggcccacaccctgaacaacacctgcgtggcacctccgcgtatgctgatcgccttcctggagaaccatctgcaggccgacggcagcgtgaccattcccgaagtgctgcagccgtacatgggtggcctgaaggtcatggtccccaccaataagaaggactaaaactgcaccgggttttccacaaccggacagaaaaaggttgaaaaaagcaccgctttccgcacagggaagcggtgctttttgtgtggggagcgggagcttaactccctcagtcaaagccttacggctttgccagctccctctgggag

SEQ ID NO: 13757 - DNA, 1339 bp, Unknown
  gut microbiota DNA sequence
gttccctttgcttattttgaattttttatcttctccgtttcatctgacggcggcgctggttgagggtcagcccgccgccgcagcgcagggtggcaaagcccagtgcgcacaggatcaaaatcagggcgcagagcagcagcagggtggctttgatatcggtgcggaaatccgacacatactcccggtgggtcacaaggtctacctgtcccacctcgtagccgtccagatagacggtagcggtgcccagcttctgaccttccttgacggtagcggagacgcgctcgggcaggtcgaaggaatagcttaccttatcgtcgctgtggccgtagccgctgaccggcgcggcggcgtacagctccacagacggctcggtgcggcacttgttcaggtctacggtggtcagcacggtcttggtatccaccagcggacggtcggcaaagctggcaaaggcccagtcgaacaggtcgtcacactcggtaaacaggtgctccagcgtgtcgcagccaaggatcacaagcccgtagttgtggccgtcctgctgggcaaaggccacgatgcagcggcctgccagcgtggtaaagccgcccttgacccactggacatactcccggtagtttgagctttcgctgttcatcaggctgttggagctgctgatggtatactccgccttgcgcagattggtggcaggcatcacatagctggcagtgcccgccacctgtgcaaaggtctggttctccgcgcaggcggcggcgatctttgccagatcctgcgcggtggacacgttgccgtagtcaaacaggccgtgggcacaggtaaagttcgtgccggtgcagcccagttctgccgccttggcgttcatctgctgcacaaagcccaccacgctgccacccacgtcccacgcaataacgctggcggcgtcgttggcgctgacgatgagcatggcgttcagcaggtcgatgcggcgcacggtctcgccgatgcgcagacccatggtggtgccgttggcgttctggatatccttgaactcctgcgtcaggtcggtgggcacggtcacttcaccgttcaggtccttgccgctttccaccagcagcagggcggtcatcagtttggtcaggcttgccacatatttctgctggtcggcgttctggctcaggatggtcttgccggtatccgcgttgaacagatacaccgactcggtctcggtagcggtctggacgggcatggggtatgccgcaaaccccggcagcgctgccgaaagagccactgccaatgtgagcaccagcgccgccagccggcggcagaacgtgttatgaagcatgagcgtaccccctaatcaact

SEQ ID NO: 13758 - DNA, 32087 bp, Unknown
  gut microbiota DNA sequence
gacgaccaagttcgcacaaagcgaacttgattcctcaaagcaaaaggcaggataccaccgtcatagtgataccctgcctttgctcgtttaacgctctgtggagtccttccgcagaacttccgataaacaaaaaacgtacccgaaccctttttcgtaaagaatcgggttcgagtacgaactgtatggtggacggtacaggactcgaacctgtgacctcctgcacgtcaagcagatgctctaccagctgagctaaccgtccatgtcatatcgacttagatagtttaccacagctttttgcaaaaagcaagaccttttgtgctttttatgcgttcttttttacttttccggcgaaagcgcccggcggatgatatcgtacagcaccggcttcatggcgtcgatgttgtccggcttgccctccagaatgctggaatagcacactgacatacacatactgcccaaggcggtgatgcgctggtatacctcccgctcactacgtccggccatctccgggctggaaagcacgatggcaagcagcttgcgcatcaggggctcggcttccctgctggcttcgatttggtccaacccgggccagacgaagttgcgctccagaaaccgcagcaccagcgcatcctgccgcaaagcctcgatgatatggtcgatgacgaacaccacctgcgcggtaaagtcgggcagctcggggtgctgctcgaccgcaaggcaggcatcgctcagcagctggtagctcacccgccccagcagcgcctgcatcaccgcgcccttatcctgaaaatacagataaaacgtgcctttgcccacctttgcccggctggtgatatcctccacgctggtcttggcggtgccccgctccagaaacagctcgtaggctgcatccagcagggcgcgccgcttttcctgcttcttcccttccacggtgctcatgctttgggtagattcctcttttctctgaatttggacgcaggtatgtgccgcgtccggtctgtgtaccttagtttagcagtccttgccagtttgtgcaagcccggtttactatacaattttttgcaggtgataaaaaaactgactttcggtcactttttctgcttgacactctgcccggggtggatataatagtgtttgcccggaagatgaccggcagtcagtttcgcgggctttcccaatcaactttctattctggagggttctcatgaaaaagatcgcacaaggcatcgtgcgtctgcgcaagctgatcttaacagtggccgtgctgctgttgatcccttccgcgatcggcgccattgccacccgcatcaattatgacatcctcacctacctgccacaggatctggactccatgatcggcgaggtagcccttgaggacgatttccatctggcctccaccggtatgatcacggtagagggcctgccaaccaacgaactcatcgctatgaaaaaggagatagaagccgtgcccggcgtcacccagaccttctggctcagcgatgtgatcgaccccagcatccccaccgccatgctgcctgccgatgtgcagcagttcatgttcggcaaaaacgattccaccatgctgatcgtccgctttgacgcccccagcgccagcgacgagaccatggaagccgtcaagcagattgaaaaactgctgcgcaaggactgcttcttcggcggcatgagcgtcattctgcaggacaccaaggcgctggtcaatcaggaaatgcccctgtacattctgattgccgtgggcgccagcctgctggtgctgttcctctcgctggaaagcaccatcaccccgctgctgttcatgctgggtctgctgttccccatcgcgtacaacttcggcaccaacatcctgctggggcagatcagctacatcaccgaggcactggccaccgtgctgcagctgggcgttacgatggacttctccatcttcctgctgcaccgctatcaggaagaaaaggagctgcgctccaccaatgaggaagccatggtcagcgctatctgcaagaccatgacctccatctccgcttccagcctgaccaccattgcaggcttccttgcactgtgtgccatgcgcttgacgctgggccgcgatatcggccttgtcatggcaaagggcgtggcactgggcgtcatctgcaccgtggtcatcctgccctccctgatccttacctttgataagtgggtggaaaaatacaagcaccgcaccgttatcccccggctgaccaagctgagctactttgtttccaagcattccgtgcccatcgtggtcgtctttatcctcatcctcatcccctttgccattgcgcagaacaagaccagcgtgtactacaccctgttcgactctctgccccaggacctgaccggcatcgtgggtaccaacaagctgggcgaggacttcggcatgaccaccagccacttcattctggtgcatgacgacctgaccgctacgcaggtgtccgacctgtgtgacgagttaaaggacgtggatggtatcacgcaggtggtaagtctggactccattaccggccccggctttgacaccgagctgctgcccgacagcgtgatggagatcctgcagtccggcggctacaagctgattttggccaacagctcctacaagaccggcacggacgccatcaacagccagctggacgagatgatcggcctgatcaagaacgtagaccccgagggcgtcatcaccggtgaaggtgccatgaccaaagacctgatcgaggtggcagacgtggacttcaagaacgtcaacgtctggtcgatcatggccgtgctggtcatcatcgccatctccttcaagagcatctccatcccggtgctgctggttgccagcatcgaggccgcaattgccatcaatatgggcatcccgtactttaccggtacgcagctgcccttcatcgccagcatcgtcatcggcaccatccagctgggcgctaccgtggactactccatcctgatgaccacccgttatcacgaggagcgcgcctttggccgcacccccaaggaggctgcccagcagtcgctggagcattgcagtcagtccatcctgaccagcggcctgaccttctttgccgctacggtcggcgtggccgccatcagcaagatggagctgctgcggagcatctgcctgctgatctcccgtggtgctctgatcagtatgctggtcattctggtggtactgcccgccgccctgatgctgtgtgactggctcatccgccacaccaccctgaaatggatgatccctgaatctgccaacgccaagaagtctgaaaaggagtaatgcgttatgaaaaaatcgcttcgtttcgccagtgcggcgctggcagttgcccttgccgccagctgtgcagccccggcttttgccgcaggcggcagcagctttaccaagtctgagaccgtgtacgctgtgatgaacgccgatggctccatccagagcaccaccgtcagcgagcacgtttacagtgcctccggcctgtacaaggtgaccgaccagagcaccctgaccaatatccagaacaccgagagcagcgccgagttcacacaggacggcgaaaagctggtgtggaacaccgatgataccgatgtgtattataaaggtgacaccgaccgcgccctgcccattcaggctaccgtcacctacgcgctggacggtcaggaagccgcgctggaagatctgatcggcaagagcggtcatctgaccatgaccatcgccctgaagaacaacgagaccggcaccgtgaatgtgaacggtaccgaccgcaccatcgtcaccccgctggtcaccgctgtgggcgtgatcttcgggcaggatgccaccaacgtggtggctgcccacggtctggtggaaagcgccgccaagagcaatgtggctgcctttgtcaccctgccgggcgtgaaggactccctgtccggtctgctgccggacgaactggacaccattgaggactatctgcaggacaccatcacggtggaggcagatgtcaccgggctgacctgcccgcaggtgatgatggcctgcgccaccagcgctgcggctctgggcaccgacaatgtgtttgacctgagcagcctcaacgacctgaccgacggcatcaaccagctgaatgacgccatgagccagctgctggacggtgcttctcagctggaggatggtaccacccagctgagaagcggtgtgctggcactgctggacggtgccaacaccctgaacaatggtgcagccgcactggacaagggtctgggccagttgaccaacggtctggacaccctgagctccaacaacagcgccctgaacagcggcgcacagcaggtggcagacggcgtgctggcttctgccaacaagaccctgaaagagggcggtctgatcgacaccgatatgacctgggacaactacgccgcagtcatcgacaacattctgaccatgaacgacaagacgctggctgccggccgccgcaagatggtgcgtaccatctgggagcaggctcccagcttcaaggacagccagctggatctggcgctgtacctttccgctaccaagacgaaccatgatctggaggctgctctgcacctgatgcagaactacgacccctccatgctgtgcggtctggtgcagctgctgaccagtcaggaagctaaggacaccgccaaggcagagctgaagtatcaggtagagaacagtcaggatatcgccgatgtgcgtgccctgaaggacagcctttccaagattcagtactttgtctccagcgtgggtcagtacaccgccggcgtgcagaccgctgcagatggtgcccactctgccaaggacggcagcgcccagcttgccgccggtactaagacactgtacgatggcgtgaacaccctgaacaatggcgcaagccagctgaatgacggcacccaccagctgaacgacggtctgaaccagttcaacgaggagggcatctccaagctgaccggcgcactggatcaggatcagctgcacggcctcaagaccgtgctggacgagatgaccgaccggctggaaagctacaccagctttgccggtgcacccgaggacgccgagagcagcgtgaagtttgtctacaagaccgccgagaccgtggcctctgccgacaatgttgtggctgagactgagacggtgaaggagggcaacatcttcacccgcctgtggcagcgcatcgtggacctgttcaagttctgataatgccaacatccttccagaatcgtatatagatacacagaagcgccccgcagccattcggctgcggggcgcttcttgtgtttataattatttaaatcagcttactgatccttttccaccatcatcttgctggctttatagatatcgccgcagccgagggtgatgaccaaatcgccgggctgggcgttctgctttacccagtcggcggcctcctgcaggctgttcaccagcacggagccgggaatctgtgctgccagctttgcgctggtaatggtggggtcgttgggctcgcggctgcccatgatgggggtcagcaccgtgatgtccgggatcttgagcacatccacaaagtcgttgaacagcatcttggtgcggctgtatgtaaacggctggtggacggcgatcaggcgcttgtagcccatttctttggcggtgttcagggtggcgcgcagctcggtggggtggtgggcgtagtcatcgatgaccagcgcaccgttgcactcgccgtacacctcaaagcggcggcctgcgcccttgaagttcagggcagcctcggcgcactgctctgcgctcaggcccacaaagcggcacacggcgcacatggccagtgcattataaatattgtggcggccgggcacggacagacggatgcgggtggtgtcggtcgtattccactccttcaggtcgaactcgaagaagccgggcttatactcgttgatgttgacagcgcggtagtcgccgtggttgtcaatggcaaaggtgcgcacccggcggtccagcgtgtacatcacgtccatagtgttcttgtcatcggcgttggcaaagatcatgaactgggtcatcagggcaaagcgcttgaaggcgaacttcagctcgcccatgctgccgtagtaatccagatggtcgttgtcgatgttcagcaccacggacaggtagggggtcagcttcaggaaggtctcggcgaactcgcaggcctcgataacaatatcatcgcccttgccggccttgccgtagccgttgatgaggggcagcttgccgccgatgacggcagaggggtcgcggcctgccagttccagcgcagtggtgatcatggaggtggtggtggtcttgccgtgggtgccggacacgcagatgctctgcttatacaggcggctcacatagcccagcagcacgctgcgctccacggtgggaatgccataggaggcggctgcgttcagctccacgttatccttggagatggcggcagagtacaccaccatgtccgcaccgacaacgttatccgcattgtggccaaggctgaccttcacgcccatctcccgctcgtagcggatgatgctgccgtccagcacatcgctgccggacagctcgtagcccttggcggcaaggatctggatcagcgggtacattccgctgccgccgcagccgataaaatggattttctttacatggtccagcagatgctggctataatccgagtacatgaacatagtaaggctctcctccaaatattaacggctgcagcgcagaccgattccttccaaacatagggacacactcttattatataatttttgcagcataaaataaacaggtaaggccgaattttcggaaagaaccataatttttttgtgaattttgtgatatgtgtacaacaaaatcccggcagtattactttgcccgccgccgcaggatctcgtccagaatggcatcggccacgtctgccttgctcatcaggggcaactcccgggtgccgtccggggtgatgaaggtgaccacgttggtatccaccccaaagcctgcaccggccaccttaaggttgttggccaccaccatgtccagatttttcttggcaagcttcgcggaggagttttctacaaggtccctagtctccatggaaaaaccacacaggaactggtgggtcttgcgggggccgatggtgccaaggatatcctcggtgcgctccacggggatggaaaggtcgccttccttctttttgatcttgtcgtcggccacggtggcggggcggtagtctgccacggcggcggccatgatgagcacatcggtggtgtcaaagcggtcagtcaccgcctcgtacatctgccgggcggtggtcaccggcacatcggtggtgaacttgaccggcggcagcgcggtctgcccgtggatcagggtcacctccgcgccccgcatggcggcggcacgggcaagggcgtagcccattttgccggtggagtggttggtcaggtagcgcaccgggtccagtgcctcctgcgtggggccggcggtcaccgcgatgcgcaccccggccagatccttcgggcgggcgatggtgtgcaggatgtgctccagcagtacctcctccttgggcaggcgtccgctgcccacatccttgcaggccagcacaccgctttcagaggggatgacggtaaagccgtatcgctccagtgtggcaaggttatcctgcgtgatggggttttccagcatcccggtgttcatggcgggggccaccagcttggggcacttggcggccagtaccacggtggtaagcatatcgtccgcaatgccgtgcgccattttggcgatgacgtttgcggtggcgggggcgactaagatcacatccgccttttttgccagcgagatgtgggtgacctcaaacttgaaatcccggtcaaaggtgtccaccatgcacttgtggccggtcagggtctcaaaggtgagaggggtgatgaactgggtggcgtttttggtcatgatgacctccacatccgcccccagcttgcgcagtgcactggccacattggccatcttataggcggcaataccgccgctcacgcccagcaggacgcacttgccgttcagatccatggttcgtttacctcccggaaaaacagttcttttccacatatcttaccttagtataatgcaaaacttccaccagcacaacaaaatctttgccgggaacttgtatcctgaacaaaaatgcggtaaaatacgcttgacaaagagcaaaccggttcttttcttttattttgaaaaggaaaacagaattatgatcttagccattgatataggcaacaccaccgtcgcccttgggggcatccgggacggacgtgtatgctttgtggcgcgcatggacacggtgcgcacccgcacggctgcggaatatcgtgccgaaatggataaaatttttgcgcaccgccgccacccggagcgccccatgcgctttgaaggggcggtgcttaccagcgtagtgccccagatcaccggggcactggccgagtgcgcccgccactacaccggcaaaaagccggtcatcgtttcgccggacatccgcaccgggctgaccatgggggtggacgagccccgcgccgtgggcaaggatcggctggtggatgccgcctatgcggcggcaaactttccgctgccgatcgtcacggtagaccttggcaccgccaccacttttaatgtggtggacaaagaccgggtattccggggcggcgtgatctgccccggcctttccaccgggctgcgcgcactgggtgagcgctgtgcccagctgccgcaggtgcatctgggctccccgaaaaaagccatcggcaccaataccgaaagctgtatgctgtccggctcggtgctgggcaccgccgtgctcattgacggcatggtgcagcgcattgaagaggaattgggcagcccggctacactggtggtcaccggcggtctggcaaagtacgtcaccccgctgtgccgccaccccctgacctatgacccggagttgctgatgaaggggctggcactgctgtaccagctgaacgccccgcaggagcacggccgcagccatggcggcggcagacactacggtcaacagggacgcctccgggcaaagcacccgcaccccaaccgccgcacccgccgcgagccggaggcgctggtaggctgagggaacaagaggataagggagagcattatgaaactgggcattcttggcacgggtaagatcgtgcaggaatttttgccatggcttgtggagcacacgccgtttactgtgcaggcggtgtgtagcaccccgcgctcggcggcaaaggccgcagagctgtgtgcacaatatcagatcccgcagcacaccaccaattattttgagcttttgcagtgggtggacgcggtctacatcgccgtgcccaacttacagcacgcccgctacgcccgggtggcgctggaggcaggcaagcacgtcattgtggaaaagcccatggcggtgaccgccgccgagaccgaggagctggctgcgctggcacagcgcaagcggctgttcctctttgaggcgatgaccacccagtaccagcccaactacgccaaactccgggagctgctgccccgggtgggcacggtacgcatggtacagtgcagcttcagccagtattccagccggtacgacgccttttgcgccgggcagaccccgccggtgttcgacccgctgtgtgcgggcggcgcactgatggatttgggcgtgtacaacgtcagctacatcgtgggtctgtttggtgagccgaataaggcggtgtatgccgccaacatggagcgcaatatcgacaccagcggtgtgctgatgatggattacagcggcttcaaggcggtaagccttgccgccaaggactgcgcagcccctgcccgctgcatcattcagggcacgaagggctatatcctgcaaaaatccaccccgaactactgcggcggcgtgaccttccatcccaacgagggcaaggaggagcactacaacctgaacggagatcgtccccggcaggcggcagagttcgaggccttttaccgcgccatgaccgccggagaccaagagctgtgcgcccgcatgctggataccagcatcgcggtgagccgggtactcacggtggcgcgccgcagcgccggggtgcgcttccccggtgacagattctaacgcatttttctctggaacacgccctgacacaataacgcgcttccaaagatttgaatattcacctaaaacccgcaaagagcgggcaggtttgcgccgtatccgacaaaaagggcggaacggcagcaggaggaaaactgaattatgaagaataccaataccaagactctgactcgtgtggccctgctggtggccattgaactggtgatgaagcttgtcggtctgggcagtgtgcccgtgggcccgctgtacatgagcttcctcaccctgcctatcgccgtgggcgccatcaccatgggccccgccgtgggtgccctgctgggcggcgtattcggcgctgtgagcttctacgatgccatcaccggcgcatctgccatgaccggtgcactgttccaggtcagcccgctgaacacctttatcctgtgcgtgggtatgcgtgtgctcatgggtctgtgctgcggcctgatcttcaagggcctgcaaaagctggataagtcccgcacctggagctacatcctcagcgccatgaccgcacccgccctgaacaccctgttcttcatgggctacatcgtgctggctttctacggctgcgactatgtgcagaatctggtgtccgtcaagggcgctgccaaccccttcatgttcgtagtgctgctggttggtgtgcagggcgtagccgaatttctggtgtccggcattctgggcggcatcgtcgcccgcgccgtggcaaagttcctgaagtaagcccggctgcgcaccatgtcagggcggcgcatccgtgtttagaatagaaaaatgaatgctcctccggcaactgccggaggagttttttgttgggaacggctccaatatccttcctgtgaaaatgcaatgccggagcgtctgaggacgctccggcattgctctattcacaaaaatatcgtcccgcctactctgtggcctttacttcttctcccgcagctgctccagatagccatcggccttgatggcctccggggtgaaggagttattcttccaccagttcacaagggcggcggtcacggtcaggccggtggtcaccagctgctccacggtggcactctcgatgggcagcatgggcttgccgcaggcgctcagcacctgattggtcagtgccagcgccagcgcagccgtgcgtgccagggtggcggcagaaattttgcaatgggtatcgttcataggttcagttcctctctttctctaaatctgcgatgcggtggttggccaccttcatctgttcttctaaaatgggtacgcggcgggcaaagttgttatgctcccgcacctcccgggtcagttcttccagcttggtgtcggtcaccgcctggctttttccgttggcgatcagcacgccgatcagggtcaccgcgcctgcaatgatggctgagatgatgcctgtcatcgcgctcaccccctccaccgggctttgtctgcccgggtgtccacgtgcacccagccggcggcgcggcccgccttgacggggtagcgtcccacgccgccccggtccggcatcaggctttcggcgtaggcggccacgtcctccacgctcacgtcctgcacccggatatccgctgcccggccatacaggtgctggctgaactttgccccgcctgccttggcgttgtgtgccggggtgcggtaggcgctggtgatcgtcaccggttttccgaagtgctcccggatacgctccagcagttctgccaacgccgtgtcgatgaagacagggtcgctgccgtccttgcagcggaactcccgcacacagaagtgcggcgagagggcggtgctgccgtcccgggcaagagaatacgcttgcaatgccatcgtgcgcccccttacagccgtttcagcagcgctgcgatgggctctgcataaaaccgctcgtagcccgctgcgttggggtgggtgccgtcgctggtgtacttatcgcccagttcgctgacgccgtgttttcccataggcggggtggtctccgcaatgtcaacgtagggcacgccccattttttcagcgccgcaaggatggcaggcttataggtcttgtaccagttttcgctgcctgcaaacatcccgccgtgcgggaacacataggccacgcgcttgtcgctgtgattcgttgccagatcgtccagcatcttctccagtgcgccggtcatggtcgtttcatcgtaggcagcggcaaacccatcggtcaaggtgcccacaggggcgttgttccaggcatcattcacgccgccctccaacaggatgtagtctgcctttgcaagcgctgtggagtttgtcaccactgtgctgatgcagccacgggtgccgccgtataccttatcggtaatattcggggtcagcgttgcgccgtccaccgcttcattggtcagggtcatgccgtacttgtctgcaatacatttgccgtagccgcctgcgctgctcttgccgtaagcgatgctgtcgcctgcaacgtacagcgtttttcccgccagcgggctgatgatctgaccgctgatgtcaaacacttccattttaccaccccttctcgatgtaatcgttcaccttgtcgtcactcagcaggcctttatacaccctgcactgatacaacgtaccagaccagaactgctgctttttgctgccgtccgcgctctgcgccgcaccgatcaggaaggtctggggcacatctatgattgtgccgtttgtggttttccactcggtcagcgggcagtaggtactgccgccgcgatattttctgccgtcgatctgcaccgcataccgcgtacgagtcttgaagtgttcgatgctgtctgacagggtcacgccgccgtagttgtagtaggcaaactcggtctttttgttcagcgggctgctggtggagttgaagccgggcagattgccggtatcaccggtctcggtcaggcagtgcaggaaggcaggccaggtgttggcattaaagtcgtcccccgctttcgcatccactaggatcgtgtattgcggcgtctcggtggaggcgtgctccagcagcttcaggccggtgtccagtccctgggtcagcacggtctcgccgggcagactgtagatcagctgtgctgtctccactacttccaccgttaccgcgcagcttgcactcttaccgcctgctgtggcagtcacggtgcagttacctgctttgatgcctgtcaccacgccgtttgtcacagtggcaaagccggcaggcagaacgctccacaccaccgccctgtcggttgcgttcgcgggcagcacggtggccgtcagggtcttactctcgccctcgttcagggtcatggtcacggcactcaggctcacgctctgcaccggaacttcctgtgcactgccgccccactctgcacgcagagcattcagggtgggcagcatcgtgtcggtcttataggctgcattttcaaacaggttcagcagcagcgcctttgcgttggcggtaaagccctcgcccgggtcaccttttgcacccgccgggccggggtcgcccttttctcccttgtcgcctttttcgccctgcgttccggcagcattggcaatgcctgcttccatgtggttcagctgggcagccgtcagggtctggccgtccacaaaattctgttttacgtagctcatttgttcctccctaagatcatttttccaaggatcgcctgccccagcacggcaaaaacgttctccttcggcggctgcgggttgccccacagcgtcgccagacggtcacagacatccatggctgcgtcattgcccgccgccagcatgcgcagtactgtcagcagcgcctgtttttccgcggtggtaataccgccgcctgtgcccagcagccccaccagcgcctcccacgcaggcgtagccggggcgggcatcgtgccctctgccgtgccgctgttggcgcatactttgcaccgcacatcagcgctggtcacggtgcggctgccgtccgtgccctcaaaggtgatgcagcccgcgccgggcactgccgtcaccgccgccggtacggtcaggattccgttttccaccagcgtagccgcgcttgcgccgggggtgtgccagtgggcacacacggtcagccccttccactcgccccgctgctcgatgcgcagccggtagttgccccggttgcccgcataccccagcagcagctgtccgccgggcaccgctgccgcgccgtttctgtccagccggatggtcatctcattcatgctgcaccgcccttacacatactggtagccctccacgttgaagggataagcgttgtcattgctcgccaggtttacatcgaccacgccgatgttcaccgtgccgttcgcagcaaaactcaccttcaccagtgcttcgcccttgcagtaaacgccgtcccgcagattgtaggtgttgccgccgcccactatggccaccgccgtaccgccccgcacgatgcgggtgcagccgtagtccgcagccgccgctgcggctactccgccggtggtagcgatcgtggtacattccagagggaccgccatccttaccacaatataatccacctcgtccggcacagtcatcgtcttgttgcttttgcccgctgcaccgtcgcttgtgtagacaagctttccgttcatgtccgtcactcctctcagttgattcagtttttctgccagactaaagcccagcaccgtgtcaaggttttccgccgttacttccagtgtgccgtctgcgctcacggtcaggccccgccccaccttcacgccgcccagcacggctgcagtggcgggtggcatggtgcagcccatgccgaatttccggtctgcctcggccttggagtagaaccggtcgtccgcgcccagctgcaatagtgcggcggccttttcctgcgccgaccagcctgctgccccggcggcgctggtcagcgctttttttacgccgtagggcagcaacgccggggtcaggggcgcataggcttcggtcatgcggtccagctgtgccgctgtggcgggcacggtggtcagggtggcgtctgcccgcaccgcaacaccgtactgcccgtctgcacgcactgcgccggacgtttccgctgtgggcacggtctcgctgcgcacataggggcgcagatccggcagcggggtcgtgtccgtctgcaccgcaccggtggcactattcacgctgaggatgcgcaccaccgcgccgggcaaaggctgtgccgggcgcggcaccgccgccacatcctgtgcggtcagccgcaccgcgccgcccttgccgttcacgctcagcacccgtccatcggcaggggcatagctctcggcccgcagcgcagcggcctccgcccgctttgcgcaggcgttggcatcggtgcggtcggcaaggatcttgtccgcagccttttgcgtcagcgccgcctgcacggccgtgtctgccgcaccgttctcggcgcggcgggcgctctccgctgcggcgcgggcgctttccagcacgcgcgccacgaactgctcgtacaccgagggcggcagctcctcactgccgccgtccgtaggcagggtggcgtacacatcgtagctgccggggcgggtataggcggtgtagccgccgctgcctatggcggccagcatccactgtccccgcacgctgccggtcaggcggcggtcaaccgtcacactgtcgtcggcgtccagcggaatggcggccagctgcaccccatcgctgcggcgcagatacagcgccagggtgcaccccgcccacgctgcgggcaggatgaactgcagccggtccaccccctcggcgttctgtgcgccaaggtgcagccggtgcggccggggcacaaattcggtgccgccgcactgctgctcaaggatttcgatctccatgcaaaacctccttttctgtttgctgtcccgattgtaccgccgggggcgcaaaactatccagtgtgtactaaaaatgtgaaattttctgttcttcggcattttgctaaacggggttttggcaccggaaatgcgagctttttccccctgccgggaccgggtaattcccctgcaggttttccatgcaaaacccgcgatgtggggcagcttgttttgggcgcagcggccgctgctgcggccttattcgcagagaaaagagccggtgcaaatgttaaaaattcatgaacgaattgcccccagaaaaaaggaaaaaatcagaaggaaaccacctaaaaaccaaaatatcaaaagaaacactgtgaaaattgcacaaaaaataatgttacaaatctaacaaagtgcaagacacaaatttgacagatgctttacggtctggtaaaatagcgtttgtgcaacgaacgttgcagcgtttaaattctatctggatgaagtaaaaagccgtcctgcgtacggcacggcatgggcagatgcggcctgtgccggggcagttttgtggtctgcccgaagcggattccaacctgtaatacggtgctcattctttttacccgaagagagcatcgtatttgactgtgagacgcttatactcagagcagccacagtccgggcggccggggtgctgatgcaatacagacccgcggccgcgccaaatacgacaaagagaggagttgtctcgtatcgcttccgttaaattgaagaaagcagttactgccgcaaagcaggcagtatctccccgtgtgctggcattttgtgtcatggtggtatgccttgtggctacccttggcgtcaccgctgcaaatctgcggctgacctacgtcaccgactccaatggtgcacggcaggtccttctgaccgatgccgatgcttcccccgcacaggtcatgcacctttccggcatccgctctgaggagggcgatgaggtctactacaccgcgttcagcggcaatcttgcctccctgaacatcgagcgcgcattctccgtcagcatcaccgccgacgggcaggagtaccctgtaaagctggtgttcggcaccgtagccgatgcactggagcgcgccggtatcacccttgaaggggacgactacaccgagccggcgctggatcacgttgtgaccgccggcagcaagatcgtggtccaccgcgtagactacgcagagcgggtggaaactcaggccatcccctacgacacccagtatgtctacaccagcctgtacttccgcaacaccggccgcaccaccacggtgcagcacggcgcagccggtcagcagaccgtgaccacccgtgaccgctatgtggacggcgagctggaaaacagcaccgttgtggataccaccaccacggtggagcccaccgaccacgtcatcaagacctacggcgcaggcgcgccggtgtcccccctgaccggcgcggacggcaccaccaacgcccccacctcttatagcaaggtgctcaccggcaaggccaccggctactattcccgtaccggcaagggctcttccggtctgggtctgggctatggcaccgtggctgtggacccggacgtgattccctacggcaccaagctctacatcacctccaccgatggcaagttcgtctacggctacgccgtagccaccgacaccggcatcgccgtccagaaggggcagatccttgtagacctgttctacgagacctacgccgaaagcgttatcaacggcgccattcaggtcaatgtctacgttgtaggctgagctgtaaacaaaacacaataaccacgcaaagagaccgctgtacaaactgtgcagcggtctcttttgatgttaatcagaatactatttttatttcggggtcggggaaagtctgtgggctttccccgaccccttttctgttttcgcaacgctttcgccggaaccgtttgtcaaatgagcagtttacacgatgtcgagctgcaaattttggatggtatgcccacaacatacagagaagtcaagaaaatttgtggtaattgtatttgaattttggacaaaaagtcttgcaaaactggtcaaaaccttttaatataaaagagtacaaagctgcggatgccgctttcggcttccgcacggggaggagcagtttatgaaaccgaccgaagaaaagattcagagcaacacatcggacctgccggtgtacctgttcaagcagggcaacaactgcgaggcttaccgctacttcggcgcacatctggaaacacgggtcggggagtccggcgttgtgttccgcgtatgggcaccgcacgccgtagccatcagtgttgtgggcgacttcaacagctggaagcccggcagccatcccatgcgcaaggtggatggcgattccgtgtgggaattgttcattcccggcatgaaggaatacgatgtttataaatattgcgtaaccacccgtgcaggcgaccttgtctacaaggccgatccctacgccttccacgccgagacccggccgtccaacggcagcaaggtctacgatctgtccggctttgcatggcacgacgccgcatggcagaccgcgcagaaaaaggcagacgtgatcaacggcccgatgaatatctacgagatgcacgccggcagctggaagatgaaggagggcggcaagccctacaactactccgagctggcggacgagctgatcccgtacatcaaggatatgggctacacccatgtagagctgctgccggtgatggaatatccgtttgacggcagctggggctatcaggtcaccggctattttgctcccaccagccgctacggcacccccaaggactttatggcctttgtggataagatgcacgccgcaggcatcggcgtcatcatggactgggtgcccgcccacttccccaaggatcagttcggcctgtacaattttgacggcgaggcctgctacgaggaccccaaccccaagcgcggcgagcacaaggagtggggcaccatggtgttcgattttggccgcaacgaggtgcagagcttcctcatttccagcgcactgtactggctggagcagtaccacatcgatggtctgcgcgtggatgccgtggcctccatgctgtatctggattacaaccgcaagcagggcgaatgggagcccaataaggacggcggcaaggagaaccttgaagccatcgccttcctgcgcaagctgaacaacaccgtgctgggccgtcacccccacaagtacatgatcgccgaagagtccaccgcgtggcccatggtcacaaagcccgcttcggacgggggtctcggcttcaacttcaagtggaacatgggctggatgaacgatatgctcagctacatgaagaccgacccgctgttccgctccggcaaccacaacaaggtgactttcagcttcttctacgctttcagcgagaactttgtgctgcccatcagccacgatgaggtcgtgcacggcaagggcagcctgctgaacaagatgcccggcgagtatgacgacaagtttgccaatctgcgcaccttcttcggctacatgatggcacacccgggcaagaagctgctgttcatgggacaggagttcggtcagtttgccgagtggaacgaggcaaagcagctggactggatgctgctggactacgacaagcacgccgagctgcagaactacgtccgcaccctgaacgccttctataaagagcaccccgccctctggcagatcgattacagctgggaaggcttccagtggatcgtaccggacgactcgcagcagagcgtcatcgccttcctgcgcaaggatgccgccggtaagcagatccttgtcatctgcaacttcaaccccgtcctgcgcgagggctacaccctcggtgcaccggtgtccggcacctataaagagatcctgaacagcgacgatgccgctttcggcggctccggcaccgtgcacaacaagccggtgcgtacccacaaaaagccgcagcacggctttgagcagagcatcaccgttaccctgccgcccatgagcactttgtactttgaggtgcccacaaagcgcacccgcaaggcagcagaggacagcgcggacaagccggcaaaaaagaccgccaaaaaggccaccgtcaaggacgccgacaagccggtaaaaaagacccgcaccaccaaggccaaggccgccgaaacggcggatgaaaaaccggaaaaagcaaaaaagaccgctgccaagtccaaagcaaaacccgaggccgcagcggacaagccggtaaagaaaaccgccgccaaggcaaagaccgcggcaaaagcaaaaactgagaccgaagcagaaaccaaacccgcaaagcgcacccgcaaagcaaaagtacccaaggaataaggatgcccacacggatgcacgcacgaacattctgatctgttgactatcatttccaaaaaggaaatgctaaaggggagaataaagctatggcaaaagaaatcgtggcaatgatccttgccggtggacgtggctcgcgcttatacgcgctgacacaaaagacggcaaaacctgcggtgtccttcggcggtaagtaccgcatcgtggacttcccgctgtccaactgcgtcaactccgatatcgacaccgttggtatcgcaacgcagtaccagccccagaagctgaacgagtacatcggtaacggtcagccttgggatctggaccgtctgcacggcggtgtgcacaccctgcctccttacgagcaggcaaacggcaccgactggtacaaaggcactgcaaacgccatctatcagaacattggcttcatcgacagctataatcccgagtacgtcattatcctgtccggcgaccagatctgcaagcaggactacgccgacttcctgcgcttccacaaggaaaagggcgcagagttctctgtggccgttatggaagtggactggaaggaagcttcccgcttcggcctgatggtggcggacgagaccgaccgcatcaccgagttccaggagaagcccccggtgcccaagtccaatctggcatccatgggcatctacatcttcaactgggatgtgctcaagaagtatctgatcgaggacgaggctgaccccaactccaagaacgacttcggcatgaacatcatccccgccctgctgcgtgacggccgcaagatgtacgcctaccgctttgccggttactggcgtgacgtgggcaccatcgacagcctgtgggaagccaacatggaagtgctggaccccgagaactccggcatcgatatctttgataagacttggaaaatttacagccgcaaccccgtgctgcccgcccagaagatcggcgagcgcgccgttgtgcaggactccctcatcaccgagggctgcaagatctacggcaacgtcaagcactctgtgctgagcgcaggcgttgttgtggaagagggcgctaccgttgaggacgccgtgctgatggacggtgtcgtggtcaaggcaggtgccgtggtcaagcgctgcatccttgctgaggacgttgttgtgggcgcaggtgcaaaggtcggcggcgagggcgctattgcccacgttggcaccggtctgaccatcggcgcaggcgctaccgtcaaggagggcgcaaaagtgtttgaatccgtcaaggagggtgtggaagtatgctgagacagaacaccaatgcgttgggtatcattttccccaacagctatgacaataccgttcccgagctggtgaccgagcgcgcaatggcctcgatcccctttgcgggccgttaccgcatggtagactttgtgctgtccagcatggccaactgcggcatttccaacgtttccatcgtggtgcgtaaaaactaccactccctgatggatcatctgggcaccggccgcgagtgggatatggcccgccgtcacggcggcctgaacatcgtgcctccctttgcagaaaagggcgtgcgcatctactccggccgtgtggaggcgctgggctccattctgagcttcctcgagcaccagaaggagaagtatgtggtcatgagcgatgccaacatcgccgtcaactacgacttcaacgccctgctggctgcccatcaggccagcggtgccgatgtgaccgtggcctatcaaaagaccgagatccccgagggccgcaagaacgacaactacaccctgaccattgatgctgatggccgcgtgaccgagctgctgttcaacgactaccgctccggtgtgcagaatctggatctgaacatctatgtgctggagcgcgagaccctgatcaagctggtcaaggacgctaccgcccgcggcctgatctacttcgagcgcgacattctggcgcacaacgtcaacatcctgaacatccatgcgctggagtacaccggctatgtggctcatatctgcgacatgaagagctactttgacgagaacctgaagctgatcgatgaccgcaatctggaagcgctgttccccaagggcagccccatctacaccaagatccgtgatgataaccccacccgttacgtcaccggctccaaggtcgtggattccattctggccgacggctgcgtcatcgaaggcaccgtggagaactgcgtgctcttccgcggcgtcaaggtcaagaagggtgctgtggtcaagaactgtgtcctgatgcaggataccgtggtcgagcccaatgtggagctggactgcgttgtcaccgacaagaacgtgaagatcaccgccggcaaaaagctgtccggcaccgagagcttcccggtctacgtccagaagaaccacaccgtctgatcgagcaatatccataggggcggcttcctccccggtagcccctcttgagaggggcgggggcacctgtgtgcccccgcctgctcttttgtatgcaaggttcgcgccgcttttcacggcggcggggagcgcgaacatctgcctgtatcatggaaggagcgaatcctatgaagatcctgtatgctgcttcggaagccaatccctttgccaaatccggcggtctagccgatgtggcaggtgccctgcccaaagcactggtcaaggacggcgtggacgcccgcgtcatcatgcccctgtacggcgatttgaagtaccgcgataagctggaatacgttaccaactactccgtgcctgtgggctggcgcagccagtactgcggcctgttcaaggccgatgtggacggcgtgacctactatttcctggacaacgagtattacttcaagcgccgcggcctgtacggcttctacgatgatggcgagcgcttcgccttcttctcccgcgccgtgctggagactttgttctacatcgacttcacccccgatatcatcaactgcaacgactggcagaccgctctggtgccggtgtacctgaacctgtactatcgtcatctggacaagttcaaccgcatcaagaccgtgttcaccatccacaacattgcctatcagggcaagtacggtaccgatattctggaggacacctgcggcatcggccaccgggaccagcatatcgtggagtacgacggctgcgccaacttcatgaagggcgctttcgagaccgccgacaagatcaccaccgtcagccccacctacgcacaggagattttggacccgtggttcagctacggtctggacgctctgctgcgtgaaaaacagtacaagctgtgcggcatcctgaacggcatcgatatggacgccaacgaccccgccaccgacaagaacatccccttcaattacagcatcaagacctttgagaccggcaaggccaagtgcaaggaagctttgcaggacaggttcggtctgcataaagacggcagccccgtctttggcatggtcagccgcatggtgggcatgaagggctttgaccttgtgcagagcattgctgacggtctggtggaccgcggcatccagctggtcattctgggcagcggcgagagccagtacgagaacttcttctctgacctgtgcggccgtcacccgggccgcgtaggcacctacatcggctttgagcccaagctctcgcaggagatctacgccggtgcagacgccttcatcatgccctccaagagcgagccctgcggtctggcacagatggtggcctgccgctacggcacacctcccatcgtccgcgagaccggcggtctgcgcgactccatccatgacagcaccatgggcgacggcaacggctttacctttgccggttacaacgcccacgagctgtatgtggcctgctgcaacgcacaggatgcctacaacaacaaggaaaactggaagaacctcgtgcgtcactgcatggagtgcgatttcagctgggacgtttccgccaagagctacgagggtctgtacaacgagaccgcaaacctctggtaagcgtctgaaccccaaagcacccgctggggctgccgcacgtttgtgcggcagccccttttttgctttttttccgttttttacactctgcacaaacttttccgcaaagtttgtgcaatgatgcaatcatcggcgcacaatgtgtgttataggtgcacatttatggaatcagtcttaacaaactatgaaattttactatatttcggtggagaattgattgcaatatccgacgctttgaagtatactgagggcatagactttttggctgcctgtccgtctccggcattttttctaaatgctggaatgcgggcggcacccgcagaaaggagcggcgcagaacttgaagggctggtacaaggctttggaagatctggtctggctgacccagctggggctgaatatgctgctgccgctggtgctctgccttgccggatgctggtgggctgtggagcactggggctggccggaatggctgtttttgcccgctgtggggctggggcttgccgccggggcgcagaacttctgggtgttctgcaaggaacggctggagcgctccaagcacgaaaaaaatcatcgggtgggctttaactcccaccagtaatggaggtccgtttttatgaaattgcagccggaatccaaaaaggagctgctgcgcatcgcctgcggcgtgtccttatgcaccgccgtgatgtgggtagtgtttgcagcgctgcatctggtgggctgggtggtctttgactaccgggtgctgctgggcggcatcatcggcgcgctggtggctatcggcaactttgccggcatctgcttcgtggtgcagaaggtcattgacgagccggacgaaaaaaagcgtaaagcgcagctgcagatatcctataatacaaggatgctgctgcaggcgctgtggatcatcatagccattgcggctccctgtttccaagcgtttgcaggcgttctgccgctgctgttccccagagttacgatctattatctccagataaccgggaagtacaagccgctcacacccccgcaggagccggtggacatcgctgtggaagatgaccccgcccctgctgaggcgtctgcggtgcagccccgtgacgaagggggtgaacaagaataaatggaactgaacggcgcaaagatcctgtataccatccacaccaatatccctctgctgggtgattttaaaattacccagaccttggtaagcacttggatcgtcatggcgctgctctcgggttttgccatctggctggggcacgacctcaagctggaaaatgtgtccaaacgacaggccgcagccgagttcatcgtaacgcggctggagcagttcgtgcacgacaacatgggcttccacttcgatcagtatatccccctggtcggtgctatttttgcactgagcatcgggtgcaacctgatcagcgttgtcggcctgtggagccccacggccgacctgaacaccgaggcagcgtgggccatcgtggtgtttgttctgatcatgtactacaagatcaaaacgaacggcattctggcctacctcaagggtctgctcgatccgatctttatcatggcacccatcaatgtgctgtcagagatctctacccctgtcagcatggcgttccgtcacttcggcaacatcctgtccggtacggtcatctccacactgctgtactgggcactggcaagcctgagccacgtcatctttggctggctgccgggcttcctgagtcagatccagctgttccagatcggcatcccggcctttaccggtttgtatttcgactggttcggcggctgcattcaggcgttcatcttctgtaccctgaccacaatcttcatcaaacgtgctgccggtgaggactaaggccttccggcatcccccaaaacacaaacacattttaggaggacaaatcttatgactgatttccagtatctggctcgtggtatcgctctggcaggctgcggcatcggcgcaggctgcgcactgatcgcaggtatcggccccggtatcggcgaaggcaacgctgctgctgctgcctgtgaggccgttggccgtcagccggagtgcaagagcgacgttaccagcaccctgatcctcggcgttgccctttccgagaccaccggtatctacggctttgttaccggcctgctgctgattttcctggctcccggtatgttcatgaagtatctggcataagcctcccgatccgaaaaaataacgaaaggagacgcttatggaactgtatcaggcgttgatcacgctggatggctggacctttctggcccagatctgcaacctgatgatccagctggtcatcttcaaaaagttcctgctgaagccgatcaaacaggtgattgccgaccgcaaggccaaggccgacagcgagatcgcagatgcgcagaaactgcgcaccgaggccgaggccatgaaagcggagtacgagcagaacctgcagaacgcccgcaccgaggccaaccagatcgtagctacggcgcaaaagaccgccaccgcccgctcggaagagatcgtgggcgaggcccgcgcacaggccgctgccctgaagcagaaggccgaggccgacattgcgcaggagcgtaagaaggccgtgaacgaggtcaaggacgagatcggcggcattgccatggagatcgcatccaaggtggtggagcgcgagatcagcgaaaaggaccacaaggacctgatcgacgaatttatcaaaaacgtgggtgaagcatcatgaccgaaactgcaaagatgtacggcggcagtctgtacgatctggcggcagaggaagggctggagacccgcattctgggcgagcttgacgaggtgcaacagcttctgaagcaaaacccggactacctgcggctgctcagcacccccagcatccccaaaaaggagcgctgcggcctgctggacgaagccctgcgcgggcaggtccacctctatgtgctgaactttttaaagatcctgtgcgagaagggcaccctgcgggagctgtccggctgcgcacgggcttaccgcatccgctacaatcaggcgcacggcattctggaagctacggctgtctcggctgtcccgctgacagagcagcagcgcgcggcgctgcacgccaagctggaaagtctgaccggcaagaccatcgaccttaaaaccaaggtggatgccaaggtgctgggcggtatccggctggatatcgagggcaccgagctggacggcaccgtccagaaccgtcttgcctccctgcgccgggatattgcggcggtcactctgtaacattcccctgccctttgcaaacggggcagagcacagaacgaatttccacccgaaatgactattatgaattgagtggtgaacaaacaaagatgcaactgaaacctgaagagatctccaagatcatccgtgcacagatcaagcattacgaaaatgccattgagcagagcgagaccggcacggtcattatggtgggcgacggcatcgcccgggccagcggtctggaaaagtgcatggcaggcgagctgctccagtttgacaacggcgaatacggtatggcccagaaccttgaggaaaataccgtttccatcgtgctgctgggctcggatgccggcatcaaagaaggcagcatcgtcaagcgcaccggcaaggtggtttccgtgccggtgggcgatgccatgatcggccgcgtggtcaacgcactgggtcagcccatcgacggcgcaggccccatcgagaccaccgagtaccgcgccatcgagagccgcgctcccggcatcatcgagcgccagcccgtcaaggagccgctgcagaccggtatcaaggccatcgactccatgatccccatcggacgcggtcagcgcgagctgatcatcggtgaccgccagaccggcaagaccaccatcgcctccgataccatcatcaaccagaagggcaaggacgtcatctgcatttacgttgccatcggtcagaagcgctctaccgtggcaaaccttgtgcagagcctgaccgaagccggtgccatgggctacaccatcgtggtgtccgctaccgcctccgagctgtctcccctgcagtatatcgccccttactctggctgcgccatgggcgaatacttcatgcagcagggcaagcacgtcctcatcatctatgatgacctttccaagcacgcggtggcttaccgtgccctgtcgctgctgattcgccgtcctccgggacgcgaggcttaccccggcgacgttttctatctgcactcccgtctgctggagcgcgctgccaagctttccaacgagctgggcggcggcagcctgacggctctgcccatcatcgagacgcaggcgggcgacgtttccgcctacatccctaccaacgtcatctccatcaccgatggtcagatcttcctggagaccgagctattccactccggcgttatgccggcagtcaaccccggtatctcggtgtcccgtgttggcggcaacgcccagatcaaggccatgaagaaggttgccggcaccctgaagctgatctactcccagtaccgcgagctgcaatcctttgcacagttcggctctgatctggacgccgacaccaaggcgcgtctggcacagggcgagcgcatcgtggaggtgctcaagcagaaccgctccgcgcccgtgcccgtggaaaagcaggtcgccatcctgtacgccaccatccatgactaccttgtcaacgtcaaggtgccggatgtggcagagtacgagaagagcctgtacgagtatctggacaacgatgccgccggggctgccgtgatggacaccatccgcaccaccggcaatctggataaggacaccgaggagcagctcaaagccgtgctgacccggtataccgaaagctttgtcaaggcgcattaaagggaaggaggcgtaacgcatggctggttccatgaaggacatcaagctgcgcatcaaaagcgtagagagcaccatgcagatcaccaaggccatggagctggtggcttcctccaaaatgcgccgtgccaaggagcgggtcgagcacagccgaccctattttgaaacgctgtacaagaccctgaccgagatcgcggcagcggacccccgggcccgcaacccttacctgcgccgcagcgagatcaagcgcacgctgctggtggtcattgccggtgaccgcggccttgccggcggttacaacgccaatgtgctcaagctggccgcacaggaaagcggcaatgtggaggtgctgcccatcggcaagcgctcggcagaatattttgcccaccacgaagccgaactgttcacgcaggaagtgctgctggccgccgatatttcggtgggacagtgcttccagctggcgcgtcagatcaccgaagggtaccgcaagggcgagtttgacgccgtaaagctctgctacacccggttcgattccatgatgacccagacggcagtttccatcgaggtgctgccgctggccatggagcccaccgagcagcagaaggccgaggcgcgccgcagtcagatcttgtacaaacccagcagcgaggaagtattcagcgcgatcatcccggagtatgtggccggtgtcgtctacggtgccgtgtgcgagagcgtagccagcgagctggccgcccgccgcaccgccatggacgctgccaccaagaacgccggtgagatgatcgaccatctcaacctgtattataaccgtgcccgtcaggctgctatcacgcaggagatcaccgagatcgtggccggtgcggagaactaaaaccctctcagccgcctgacggcggcagctcccccgaagggggagcttgagcggaaaaacctatcaagaaggagttgtagcctatgtccgaaaaacatatcggcaaggtgatccaggtcattggcccggtgctggacatccagttcaaggatggcgagctgccggagctgctcaacgccattgagatcgacaaccacggccagaagctggtggtggaggtcgctcagctgaccggcgacaatgtggcacgctgcattgccatgagcagcaccgatggtctggtgcgcggcacagatgccgtggacaccggcgagtccatcaaggtgcccgtaggcgaccagtgtctggggcgcgtgttcaacctgctgggcgagcctgtggataacaagcccgcccccaccccggatgcctactggcccatccaccgtcccgctcccagctacgaggagcagcagtccaccaccgagatccttgagaccggcatcaaggtcgtggacctgatctgcccctacgccaagggcggtaagatcggcctgttcggcggcgccggtgtcggcaagaccgtcctgatccaggagctgatctataacatcgccactgagcacaacggttactcggtatttaccggcgttggcgagcgcacccgtgagggcaacgacctgtacggcgaaatgaccgagagcggcgttatcaacaagaccgcactggtctacggccagatgaacgagcccccgggagcccgtatgcgcgtggcactgtccggcctgaccatggcagagtacttccgcgatgtgaagaatcaggacgtgctgctgttcatcgataacatcttccgcttcacacaggccggttccgaggtgtccgcactgctgggccgtatgccctctgccgttggttaccagcccacgctggccaccgagatgggcgccctgcaggagcgcatcacctccacccgcaagggttctatcacctcggtgcaggccgtctacgttcccgccgatgacctgaccgaccccgcccctgccaccacctttacccatctggatgccaccacggtgctgagccgtgacattgcatcgcagggcatctaccccgctgtggacccgctggactccaccagccgcatcctcagcccggaggtcgtgggtcaggagcactacgagatcgcccgcgccgtccagaaggtgctgcagcgctacaaggagctgcaggacatcattgccatcatgggcatggacgagctgagcgaggaggacaagcgtaccgtcagccgcgcccgcaaggtgcagcgcttcctgagccagagcttccatgtggcagagcagttcaccggtatgcccggccagtatgtgccgctgaaggagaccctgcggggcttcaagatgatcctgagcggcgagtgcgacgagctgcccgagagcgcattcctgttcgcgggcaccatcgacgacgtgttcgcaaaagcgaagaaggggtaagccatgacgacctttcatctgacggtggtcacgccggacggctgcgcctttgaaggtcaggccgagcgcatcgtctgccgcgccattgatggcgacctcgccattctagcaaagcacggcgattactgcacggcactgggcatgggcgaggcgcacattgtggatgccgacggtcagcgccgccgtgcagcctgcatgggcggcctgctcagcgtgctggacggggacgtgcgtctggtggctaccacttgggaatgggccgaggacatcgatcaggcgcgtgcggaagcttccaagaagcgcgccgaggagatccttgcccgcaagaacctgaacgaccgtgagtacgagctggcacaggcgcgcctgaaacgcgcgctggtgcgtacctctgtccgttaaacctgtatgcaaaaaggcacccgcagccggatggctgtgggtgcctttttaaatttatcttacccccggttcgttt

SEQ ID NO: 13759 - DNA, 3900 bp, Unknown
  gut microbiota DNA sequence
ctccacagcggtgctgttctcaccgccgttgggcacaatgatgtccgcgttgcgcttgctgggctctacaaaggcctcgtgcatcggcttgaccgtggtaaggtactggtctatcacgctgtccaagctgcgcccgcgctcctttacgtcccgcagaatgcgccgcaggatgcgctcgtccgcgtccgtgtccacgaagattttgtagtcgaacagggcgcacagttccggctctacaaagggcagaatgccctccacgatcagcaccggggcgggctcgatgtgctgcacctcgttgctgcggttatggttggagtaatcgtacaccgggcagtcgatggcgcggcctgccttcaactcctgcaagtggtagatgagcaatgcgttgtcgaaggcgtccgggtggtcgtagttcagcttgcagcgctcttcaaagggcagctcgtcgtgacgcttgtagtagctgtcgtgggagatcagccgcacctcgtcctctccaaagcgctccttcagccgcagcgaaagggtggtcttgccgctgccagagccgcccgcaatgccaatgatcaggttgttcatgatgcaaactccttctgcacaaaatctgccggtttctgtggaaaaaccggccggaatggattataatagacttgtatatgctctgctgccgcccggcagcagttcttcccctttatcatagcacaaaatgtgtcatttggacagggcttgcaggctatcctccgacacattccaaaaaaaggacggtcaaaatgtcaaaagaaacattgcagcacaccatgagaagcaaggtccgggtatttgaggacggcggcatccgtctgctccgtaaaggccagaaagggctcatccatgccatcttcagccgctttgggctggtgctggtactgctggtgctgcaattcggggcgctcttcagcctgatgcgctggttcagtaacctgctgccccactacttgggcggcaccttgctggtcacggcggccatgatggtctacctgctcaatcaggacatgaacaacagcgtgcgcatcccgtggctggtggtcacggcgcttgccccggtgctgggcgtgctgctgttctgctacaccaagggggatgtcggtcaccggatgctcaaaaagcgcctgctggagctggaggggcagacccgcggccagctggcgcaggacaaaaaggcgagcacggcgctggatgccgactgccccggcgcggcctctctggcgcagtatctgcgcggacggggtggtggcttcccggtatacgaaaacacgcaggtgacctatttccccagcggagaagccaagtttgccgcgctgctaccccagctggaaagcgccacccagtacatttttctggaatacttcatcattgacgaagggctgatgtgggggcgcattctggagatactggcacgcaaggccgcgcagggcgtggatgtgcgggtgatgtatgacggcacatgcgagttctccaccctgccccgggactaccccagacggctggaagcgctgggtatccgctgcaaggtgtttgcgccggtcacgccctttgtttccacccactacaactaccgcgaccaccgcaagattctggtcgtagatggccgcgtgggctttaccggcggcgtgaatctggccgatgagtacatcaaccacgttgaaaaatacggccgctggaaggacgctgccgtcatgctggagggcgagggcgtgcgcaccatgaccgccctatttttgcagatgtggagcatccagcgggagccggagtttgcccagttcctcacccgccccctcccggaaacgcagacaaagggctttgtcaccccctacggggactgtccgctggacggcgagcgtgtgggcgagatggtgtatattgacctgctcaaccgcgcccggcacagcgtacatatcatcacgccctacctcattctggacggcgagttggagaccgccctgcgctttgccgccgagcgcggcgtggatgtgcacctgatcctacccggaaagccggacaagtggtttgcttatgcgctggctaaaacgcattacctgccgctgctgtcctccggtgtgaagatcagcgagtggacccccggcttcacccacgccaaggtgatgatcatggacgggcaggaggcggtcgtgggcaccatcaatctggattaccgcagcctgtaccaccactttgaaaacgcggtctggatgcgcggcgtggactgcctgcctcgcattgaggccgattttcaggatacgctggcacagtgccgcacggtggaacccacccgccagagcatctggcagggcaaaaagctgctgcatctggtgggcattatgctcaaattcatcgccccgctgatctaaacgaaaaacgccccggaaacgctgtcaaacgtttccggggcgttctttgcttatgcttttgcgcctgccggcactcttccctttttcagcgtggagggcatcgccttcaacgggtcacccaccacatgatgatagacctcctcgtaacggtccagcatcacgtcgtactcaaaatttgtatggatgtactgtatctgctgctgccgcattgcgtccgggtactcctgtgtgcattcccgttccagcgcccgggcaagatcgtccgtatcctccggtttgaaggccgcgccgtaaatgtcggtcacgaccgtattctcggggatatcgctcaccagacaccgtgcaccgatggacagtgcctccagcaacgacagggaaagcccttcagtgtggctgggcaaaacgaacagcccgcaattgctgtaaagctccttcagcaggtcgcccaccaaataatctgtcatgatgatattggggtcattctgtgcctgctgctgtactgctctgcaatattcgctgtcatccagcgggccgaccagtacaagctttttctctgtcttggccttgcggtagccctccaccagatccagcgtgcctttttctggcgagatgcgccccacatacaggatgtactctcccctcgccagcccgtatttttcccggatcaggctgcacgcgcgcttttcgtaaaagcggatggcattggggatcagaatagacgcgcggccatatttctgcaaaaaatagttccactccgtctccgaaagcaccaccagatcatccgcatattttgcggcgatccgctctcccagcttcatataacggctagcaaagccgcgccatttgtctaccttccagttcagtccgtgcaccgtacatacggtgcgcttgccgaatatcttagcaatcagcagcggtacgctgggcccgatggcgtggtaatggagcacatcatagccccggaacagcgcatcaaaagttgccagaaaagagtagatcgtggcattcagtgcaggcttttgcagcgtaaacacccgccgcgcgtgaacgccgtccacatcgtacacattatggtgcttttccaagccgcggttatacacggtaacgtcatagcctcgttccaccagacttctggccagcccgccaaccatgacctccacaccgcccgagcgactcggaaaatccttgtgcccgatcatcgccaccttcaccacaactacttccttccgttctgtaatatatccccgaccgatcccatttccaccacattgatatatctttattgtaacataagcgtcacttagtcgcaactaattcccacgaaatattttaacaaaatatgaattttcagttatatcttgttctatttgtagatatttcatctttttcactcaaaaaaacgctccaggaattctcctgaagcgtttttgttaagtcggcgactacctattttcacaagccgtttccagctaactatcttcggcacaagtaagcttaacttctgtgttcggaa

SEQ ID NO: 13760 - DNA, 10395 bp, Unknown
  gut microbiota DNA sequence
ggtgcagttcacgggcacgttgcgcatctcaccggagggcagacgaaccagagcgtagccattctccttagccatcagctgagccatgttgccagcggaacgaaccagctgagcgccgcggccgggatacagctcgatgttgtggatgatggtaccgacggggatgttctcgaagggcaggcagttgccgggcttgatatcggcagacttgctgctgacgaccacgtcgcccaccttcaggccatcgggagcaatgatgtagctcttggtgccatcggtgtactcgaccagagcgatgaatgcgctgcggttcggatcgtactcgagagtcttaacggtagcggggacatcggtcttctgacgcttgaagtcgatgacacgatacttggtgcggttgccgccgccctgatgacggacggtgatacgaccggtgttgttgcggccgctgtgcttcttcatgggctccagcaggctgcgctcaggagcgaccttggtcaggacgctgtaatccgtgacggtcatgccgcggcggcccggagtagtggggccatactttttgatagccattgtgctattctcctttgtttatcttatgaattattatcggggtcatatccccatagaggaaccctcggcgggttctatcagaccatgctgttgaagaactcgatctccttggagtccttggtcagggtcacgatagccttcttggatgcagcggtgtaaccagcgtgcataccctgacggcggaagcggccacggacggagacggtgttcaccttagcgaccttgacgccggggaacagaacttcaactgcctgagcgatctcgaccttggtagcatcggtagcgaccttgaaggtgtacttcttgtcagcgatgccagccatggagttctcggtaatgaccggcttcaggacgatatcatgtgcggttttcattagccaagcacctcctcgagcttcttagctgcgtcgacgctgatgatcagcttgtcggcgttcagcacatcgtaggtgttcacgctgcctgcgaaggtggtcttgacaccggcgatgttgccagcgctcttgacgaactttgcatcgacagtctcgttgaccagcaggttcttcttgccggcgcccacagcgttcagcatagcgaccacagccttggtcttgtactcgtcgcaagcgaacttgtcaacgacgaccatgttgccattggcagccttgtcggacaacacgctcagcagagccagacgcttgaccttgttgttgatgtggtagttgtagctgcggggcttggggcccagagcaacgccgccgtgggtccactgcggagcacggatggagccctgacgagcgtgaccggtgcccttctgacgccaaggcttcttgccgccgccggaaacttccatgcggatcttggtgttctgggtgccctgacgctggttggccaggaagttcaccacagcaatgtggacagccttctcattcggggtgataccgaacacggcgtcggaaagctcgatctcgctaacgtgctgaccgttcatatcgactacattaaactttgccattgtagctttcctccttacgccttgacgctgttggccagggtgatgatggtgcccttggaaccgggaaccgcacccttgacagcgatcagattgttctcggtgtcaaccttgacaacggtcaggttctgcacggtaacgcgcacgcagcccatgtggccgggcaggcgcttgccggggaacacgcgagaggggttggaaatagcgcccatagaacctgcatgacgtgccaccgggccagtgccgtggctctcacgcagacggtgctggccaaagcgcttgataacgccctggtagcccttgcccttggaaacgcctgcaacgtcaaccttgtcgcctgctgcaaagacgtcagccttcaggatgtcgccaacgttcattgcggaaacgtcgtccagacggaactcacgcagggtcttcttgggggcaacgtttgccttcttgaagtgacctgcagctgccttgttgaccttcttggcggaaacctcgccgaagcccagctgaacagcctgatagccatcgctctcgacagtcttcttctgcacgacggtgcaggggcctgcctcgatgacggtgacggggataaccttgccgctctcatcgaacagctgggtcataccgactttcttgccgataatgcctttaaccattttcttttcctcctgtaaaggttattggttggcagcgcacgtcactgccaacatgacccctcgggaaacgagggcatcgaatttgatcgtgtgtggtttacagcttgatctcgatgtccacgccagcggggagctggaggctcatcagagcctcgaccgtcttgttggacggcttcagaatgtcgatcagacgcttatgagtgcggctctcgaactgctcgcggctatccttgtacttgtgggtagcgcgcagaacggtaacgacctcacgatcggtgggcagggggatggggccagacacgcgagcgccagtgcgctttgcggtctccacgatcttctctgctgcggcatcgatcagctgagcatcatagctctgcagacggattctgattttctctttgactgccattgcttacgcctcctgaaaaattgtttttgccctaggcgagccgataaattgctctacacagttccgggtgttcctcgatttggcactataaaaaccggtgaaccgcatggcagttctcccggaaacatattagcaaatcaaatccgaacattggttccgcccgtttcgcagaggagtaacttctctgccgagggaacgtattccatcgctgtcagtaattttttcgcccggttctaagatcggacatactccgcggaaataacccatcgcagctatcgccggatgacaacctcccgcatcaacgcatatcgctggcctgcacgacttgtatcgcacaagccttttgcagccgagagatattttatcacatcttcgtctatttggcaagtgttttttgcagaaaatcacgatttttcttttttattttctctgttttgtcaatggccgcattttctgtgcaagatgcacaatctcagcgctttttgccggtggaaaactcccccgcttccctttgcagcatcagtatgggcgggaaaggcgggggttatacctattatataggataacccccgcccgtgaaaatggactaccggagcgtccgcagacgctccggtagtccgaaataataaatgttttttccttagcttatggccagagcaaagcggaggccatttcagatcatttcttcttcagctgctcttccagcccttcccgcggggtgatgtagacggtggtgtacacctcgtacagcaccatgccgggcttggcaccgtttgctttccagatgttcttcacctcggtggtgtccactgccaccttggcaccggtgcccgccttataggcgctggaatggatgaccgccagctccgcagcttcctgcttggtggtgtccgggatgtcctcgccccggctcatgaccacaacgtggctgccgggggctttctgcacatggaaccacagatccttgccccgggcggtgtgcagggtgagcttgtcgttctgggcgttgttgcgccctaccaggatctcaaagccatcgctggaagtatagcgcaaaaaatccgcaggcttctgctttttgtcccgctgcttgtagtacttcaggtacccctgatttttcagttccatgcggatctcgttcagggcggcttcgccggaggcgctttccacctcgtagagcaccgtttccagataggcgatctctttttcaccctcggccagcaggtccaccagcatccgggcggcggtctgcttctttttgtagttcttaaagaagttctgggcgttctggctggggctgaatcgcagatccagcgggatggtcacctctttgccctcgtcgtaccagttgggcacggtcaggctcttcatgcccttttgcgccagatagaggtttgcagacagcagctcaccgtacaggcgcagcttttcgcttttgccgctggcagcaagctcttcctgccgtgctgcctgcttgcgcagggcgcggtcatacatattgtgcaccgccttgtgcagctccttgctcttggtgcgcagccgctcagcgcggtccttctcggcatagtagccctccagcatcgcgttgaaggacggccactcccggatggtgtactgctcgccatactgctgcggacggaagaaggtatactccaccggcttgccgtccggtgcggtgacgctgcagggacagccgccctgcgtgtgcagttccttcagctcgtcgattgctgccatcaggctgcgcttctgggcatcggtcagttcgttggcgggcagatgttccccgtcaaaggcgcgccatgccgcctcgcggcagaccaccggcccaacgccagccaccgttttgttcagagcatccgccaccggcagttcccgctgacaggctgctgccacgatggatgcactgctcaccagcagaaagtccgggcgggcgggcttgggaggcgtggtgtagggcaagcccggcagcagctgccggacgtcgctgtcctcaaaatccactcgcttgagggcgtcgataatttttccgctctgcaccagcacaaggttggagtagcgccccatcagctccgcgcacagggtattgcgcacaaggtcgcccatctcgttggtgcactgaaaatcaaagtagacgatgcggtcgcccggctccatgtgcacatccagcagtctgccgccggtcaggtgcttgcgcatgagcatacagaaggagggcggcgtttcggggttttcaaaggtctcctcggtcagacacacccgtgcagagccgctgcgggcagacagcagcagggcataggtatcggtgcgggtgcgcagggtgatgaccagctcatcccgggtcggttcaaaaatttttgcgatcttggcatcggtcagggtggctttcagctccgctgccgtcagcgccagtgtcgcggcatccagtgccataaatgttacctcgttttatctataaccctctcagtcaacgcctgcgggagagcttttgctctttttcggtttatgctgaaagacctccccctttcgggggaggtggcattgcgcagcaatgacggagagggttttctctttataaataagtatacgggtcgcggttctcggtgctcaccagcacctccagctccggcagggcggtgcgcagagcagccgccacagcggcggtcaccgggaactcggtggcgtaatgccccgccgcaatcagggaaagccccagccgcttggcgtccagtgcatggtggtggttggcttcgccggtcagcagacagtccgcgtcctcggcgatggcttcggcaaacagactgccgcccgcgccgctgatgaccgccaaccggtgcaccggctttccggtgtcggcaaacttcacctgtactgccgtgccagtgtccggcgcgttgcacagggcagccagcttacgctgcgccagcgcggcaagttccggcacggtgatggggtcgattttccccacccggccgcagccgtctgcaaaggcggcgcgctgccgaatgccgaaaagatccgccagcacatcgttcaccccgccctcggcggcatccagattcgtgtgcatacagatggcggaaatgcccgcctgcaccagctgatagggcacatcggcggggcacagccgcttgagcgggtcaaagatgaccgggtggtgcgccacgatgatcgtgcactgctttgccgcagcttcctccaccacctccggggtgatgtccagcgtcaccagcacccggcgcacattgccgccgcagtccaccagcaggccggggttatcccagtgctctgccagttccggcggggcaagccgctgcattacttcgtatacctgctgtaccgtggtcatttcagtttccctctttcagaatggcatccatctctgcggcaagcgggctgccgtccggcacgcccagccgcatccgtggcagctttgcccgctgccacgcggcgtagcccgcgccctccggccagcgtccggtatcccccagcagacattgggtaaaggtgggctcggtcaccttaccggtgtactctgccgccattaccgcgtaccagcggcctgcggcctgcaccggacggtcggccacaagggcaaagccatgctgccacagccagcggcgcagctcgctgtgccgggtggcaggcaccatgataaggcgcggcccgcccacggcggacacccacggcgctttctcaatgatctcccaagtggtctgtgccgacacgcctgccagcacaatgctgcccacctccccggcagacaacacagaaagaccgtcgccgagccgaagctcagcgcggtccagacaacctgcattttccagcgtctgttttgccttggccagcgggccggggcgcaggtctgccccgatgaccttcgggtacttacccgaagccgccagcaccgccgtcagcttgccgtggtcgcagccgatgtccgccaccggctgtcctgggcgcaccagctctgccgctgcggtcagacgcgcatccagtgttggcagcactcaggccttcttagctgccagatgggtgttcagcttctccagcagctcgtcgcagttcacgccgtgcacttcgcaggcttcctcgatggtctccccgcgggaagccgggcagcccagacagtgcatcccgatctccataaagtagggtgcggtggtctggtccatatccagaatgtcgccgatgatggtatcgcgggtcacctgcttgggtgcggtgtgtgcctcttttttgagcatattgaaaatatcaaacatgatagcttttcctttctgttttgggtgagatacagtataacctactgttcctctatactataccccaaaccggggcagttttgcaagagccttggggaaatccgcttacccctccgcctgatagttcttttccagcgagaagccgcgcccgctcacctcggtaacatggctcacgatcataaagcaggtggggtcgatagtgtgcgccagcttttccagccttggcagctgccggttggagaccacgctcagcagcaccgactccggctcccgcaggtagccgccctcgccgtgcaggatggtcacgccgcggtccagctgcgcaaagatggcagcgcagatctcatcggacttggcactgatgatcttcacctcggtgcgggtggtgcccagcatgagcaccttgtccagcacgaccgtgtagataatggccatcaccacgccgtacagggactgccgcaccgggctgaacgccgcctgcgccgccagaatgataaagtcgaaaaccatcatggtgctggacaccggcaggtggaaccacttgttcagcaccagcggggggatatccatgccgccggtggaagcaccggcgcggatggtgatgcccagcgagatgccgatgccaaagcccgcgaatacggtgttcagcaccagatcatcggtcagtacaagattgcccagcaagcgctcccacagcgccataaaaaagggactgagcaccgtgcttgccatagtattcagggcaaagcggcggcccagcacccaccagcccagcagcagcatggccacgttgaccacgaacagcactgcggacaccggcagtccggtgaccttgttgaaagccagtgcgataccggtagcaccgccggtgatgaggccggagggcatcagaaataataccacagtcagtgcatacattgcattgcccaccacgatggacagtgcgttgaagagctgctgttgcttgcgtgttaattgcgtcatcttcatcttcctttgtttatagttgaagtatcttctactatgataacgaaaatatccgcatttatcaagccttcggcgataaatgcggatatcgggatcgatttttagggggtcacagggcagcttccggctgggcttcgtcctcttccatcagccgcagaccggcggtatcggtcaccggcagcgagaacacgatggtgcccgccttggggtttgccccctccataatggccttcatgatggtgttcttctggctggtgcggctgacgatgagcaccagctccttttcgttcaccagctccacgcccagaaaggcggctgcaccctccatgccggtaccctttgcgtggatcaccgtgccgccgcctgcaccggcggtgcgggcagcatccataatggagccggtgtagccctgatttgccaccaccagcagcagttcatagcgggtatccttcaaggtgctctcctccttccatgtaaggggctggtgctcggtaaggaacatcagcgcccgtttgccgccgatgctgctcagcggcacaatgaacgcaatgccggtgcccggcacatcgatctgcattttgcggcgcagatccttctggatcttctgccagctttctgccgttaccacggccagcagcaccgccttttcggtcttttccagcccaagggtggaaagcgtctcctgcaccgccgtgccggaaccaacggtgcgcatacttaccgttacgccgtggcttttgtacagctgcaaaaagccatcggtagagcggcggtcggtgatggtgatcatcaaaaacaaactgctcacgttctgcctcctttacagctcgataatggcgtcatccggcagatctgcaaacacggtggcaagtaccgcagcgggctgcgccacacgcgccttgcgggtgcgcagctgcgccaccaaccccatcatctgcacggtgatgagcggggtcatggcgaccatcgccaccacgccgaaagcatcggtgacgatattgccgcccaccgccacgcaggcaccctgcgccagcggcagcaggaaggttgcggtcatggggccggaggccacaccgcccgcgtcaaacgcgatggcggtaaacagcttgggcaccacaaaggagatgctgatggcgaacacatagcccggcacaaggaaccacaggatggagatgccggtcagcacccgcaccatggcaagacccaccgagatggacacgcctgcggaaagcgccagacccatagcctgcgccgagatggcaccgtcggtcacctcttccacctgcttgttcagcacatagaccgcaggctcggccttgacgatgaagtagccgatgagcatcccgatgggaatgatcacccagcgcatcccgccgcctgtcagcacctgacccagatagttaccggcaggcataaagcccacgtttgcgccggtcagaaagagcacaaggccgatataggtatacacaaggcccacgccgatgcgccccagcgtgcggcggtccagccgcagggcgatcagctgaaatgctccgaacatcagcacgatgggcagcagcgagcgggcgatctcggccagataggtgggcagaccctcccggaacagctgccacagctccaccgagtctgccacctccggcagaacaggcgggatataggtgctgtccgctgcgcggaacgcgatgcccagcgtcagcactgccagaatggggccgatggagcacatagccaccagaccaaagctgtcgtctgccgcatggcggtcgcttcggatagcagaaacacccacgcccagcgccatgataaagggcacggtcatggggccggtagtcacgccgccggaatcaaacgccacagcgaggaactccttgggcacaaaggccgccagcagaaagatgagcccatagaacagtaccagcagcttcggcagcgcaatgccaatgagcatacgcaaaaaggcaaagaccaggaacaggcccacgcccgccgccaccgagaggatcagcgtaccgcttggaatagagggcacctgatctgccagcacctgcaagtccggctcggagatggtgataaggaagcccagcaaaaagccgagcacaaggatgaggggcagcttgcggctgcgggtgatgactgcacccacccgctcgcccatgggggtcatgctcatctctgcacccagagtaaagaacatgatgcccaccacgatcatggcagcgcccagcaaaaagcacagcaggatgctgggcgataccggtgctaccgtaaagcagagcaccagcacaatggccacaatgggcagcaccgcctgcagcgcctccaaaagcttttcccgcagcttggggagcgatcgtctgagaatgatgtccaccgcctttcgtctgtatcctgtttgtacacttttgtgcaagatatatttatagtatacgggttccgggggatgccgtcaatccgcagaaggaaaaaacttgagcatattccataaattgtaaaaatatattactcacctttatgtccttcccc

SEQ ID NO: 13761 - DNA, 9092 bp, Unknown
  gut microbiota DNA sequence
cggggcaggatgcgccgctctgcgatctcctcgtcgatgacaccccggtccagcatggtccactccaccgagcggaacacctcgttgcggatcagcttgcggtcctcgccggtgagggaatagcggtccataaacagctccgggtcaaaccgaaccagaacgtttcccatatcaaaaacaatattttttatcacgaatatacccttcctgttttaccagttggtttatgactgccaccttatttcacagttcatacaacgaccttctatttatctttcaaatgttgtatgtaatgttatagagtagctttcattgggagcgatgcaagccgctgccgcatgttcattccactcggaggtgtcagtctctgcagctgggagactctgccacggctcaatgcagataaatcgcataggtttcgtaggtgcactccaaagtagcgtatacggatattccgaaatatcgcagatgatttttcgctcagaattcttttcatatattccaatcgttttggaacggagtccggcaagacagaaactatcattatcaaacagcgtatccgtcagtggaatcgcctgcgtatttttccattgataaaaactttttccagagagcagaccatgaggaagacaatccaaaatgattgggctttcctcttgctcaaaccgaatctcataatccgtagttgtgtggttttcatcaaacggaatattaaatcccggatgaaagccaattccacaccgcatattctcgtcgccgcagtttttcacatggacttcatggtggagcgtatgcccgtcaagagtgaaaacacttgtgaattcaaaatcaaacggaaatcgcagagttttcgtttcttcgtctgctcggaacatcagttgagcagaaattccgttattctgctttaagatatgctccagatcacgaataaaaccatgctgtccaccgctatagtgcttcccgttatgaatcaattcaccattggcaagtcgtccagcccacggaaacaatactggagaatgacgatcccaaatagcagggtcagcctgccagataagctcttcacctttgctattttttacactgacaacctctgcaccatgcgtatcaattgtcacggtcagaaattcattgctgatggtcgtttgcataaactgcctccattattctgtaacaatgtccgtatccgatatgaactgctcgtcacaagaatttgcgacaatgggacgttcaaatccttcaatcgtgtttccgctgatagtacaattgtccaaaagatacaggtctattgcttttccaccattcacacctttcagagtgttgtccttgatggtaacatttttgatatgcttcggagatttattgtttgtggtaatctccaaaacggtcgccttcggatcactgacatcaaatgtattgccttcgatggtaaagtctgttgtgctttctgcgcccgttgggtcgatgaacgaaccataggtatcagccaaaattccgtagcggtcgatctgctccgaatccgaagtaatggtgaagatattgttacggatggtaatgcggtcataggccatgaaatgaatggcagtataagcggcattatcaaatgtgcagtcctcaattacgatatcagagcatttcacccctgcctgctgagagtgtgttccgatggccgccatatagtgcggcgtgttttcactgccaccaaaataacagttgcgaatcgtgacattcgtagagggagctttgttctgcactagcgtatagggataaccctttaccgtaccgggttcgatttgaagaagctcgcgcgttttgtcgccgcttccacggaaggactggccttcaaaacggcagttttcaatcagaacattgtccgagccagcaacctgaatcacgtgtccgttgtagcaatcccggaaagtaatattgcggatcgtgatattgcttccgtaaccgatgccaagagcgttgatggactccgcattgggaagattttttggcgttccggattcatccagctgaccgttcatatcccagatgccaccttcgatgatgatattgctgttgccttcagccttgttgtgcttataagggtggttgtaggccatcatgggattcttgtcctgactgcagtttagcagaattgcattatcgctcagtttgaatgtcatattttctttgaacacgattcgacctgccagcggatatgttccgtcctgcaaaaacagcacgccatcatcaggcagttcatcaattgccttttgaagcacttcggtgacatcggatatcgtgttcaaatctattttatactttttcacaaagtccacttctttgctctggctacatgcactaaaaaggatgcagttcagcaacagaaatactaaaacaaaaagctttttcgtcttgagcataaaaatacctctctacaaattggaagcgtcttcgttaaaagcaaggcatcacgataggcgtttatagttcttcgataaattttaaatgcggaatatgccggagcgtatctatcatactgtcatgaggacgatgttcaaggctgcgaacggtgacaacaaacgcaacactgttgatcgaattggttccgagatagtccggctccatctgcaagttgctcatggtcaaaccggcatcacgcataaactcgataaactcacccatatactcacgattttcaagctcgacgtagatgtcaatgacactcgtatgcttccgtgtaaagtagtccatgttctgcatgagcgacaacacaatgaaaatcaggatgccgcctgcaatggcaacttcgtaaaaaccgatgccaatagccagaccgatgcaggctgctgcccacaagccggcagcagttgtgatgcctcgaacctggttgcgtccagttttcataatcgagccagcaccaataaagccgatgcccgaaaggacctgcgcacccatacgaaccggatcgcccgtgttcatacactgggagacatattgattcgtcatcatcacaacggttgatcccagacagacgaggatataggtgcgaagtcccgcaggtctgcttttccgtccgcgctctaagcccaaaactccgccaatgacgatagacagaaaaagtctgaagaaaatcgttccgtatgttatttcgcgtattgtatgaagattcatcagggttcacctagcttttaactatattttcccaaattttacatgatgggtaaaaagaaatgtgttctgccttacctaatcattggcagaacacattcttttcagtattacacgcttgtgacgacttggaaaccagcttcttttatctggctcataaaatcgccaccaaagtgcatacagtagacccgatttctcatttcaggcggaatgtactcacatagccgtttcagagaacaatgcgacggactttccttcgtcaaaaatgtgcaatcgtgataaataacctgaatttttccctgcttgaactgctggaggatatcgtctgaaagttccgaagcatctgcactgaaatagatggtttcgtcctcatcgcgaatcagaaaaccgcagcacttcatatcagaagcatgcttgacgggaacagcctccacatgcagaccatcctcaaaaatttgggtgtaatctgtcgtgaaatcgtacatatcagcaggaacacccatgagcttcaagatttcaactacggtatcatcctgtgcgatgactgtgatgcgtttttggagaacggacaaacagtaggaggcaaatgagccaaggctaccaatgtgatctgcgtgcagatgggtgatgaaaactgtgatcttgtcacaagtccgaatctcatcacgcgcctccattttccgaaatgtgctttcgccgcagtcaatcataaagagatgattgtttttcacaaagaatgccgcattactgcccaaccgaggataatatgcagcgccagtgccagtaaaatgaagttccattggtttggaatctcctctcctcgaaataattagcctttattgccgccagcggtaacgccagaaataatcttatcagacaggaatgcgtaaataacgaccgtcggaataaagacgatgacaacggatgcaaacatgccagcccagtcgccggagttcatcatggaggtgaccgtctgatacagaccaacaccgatggggcgcagattggacttgtttgcaaaaatcaatgccatgaaatattcattccacttgccgatgaagttaaaaatagaaaccgtaacaattgcaggctgtgccagagggaacataattttccagaagcactgaatcgggccacagccatcaatcgcagccgcttcctcaaacgaagtgctgattcctttgaagaatgtcagaaggaagaatgtggtatagggaaccgaacatgctgtgtacaggaaaatcagcgtgaaatgcgtaccggacaaattcagcgcactgacgatagaaaacagcggcatgacgatcataatattagggattgccagaccgatgatgataagagcctgaatcaaaccagcaccacggaacttaaaacgagacatgcagtatgcagccggtgcacaaaccacaatgatcaaaatacacgacggaacggtgtaaatgacagagttcagcaggttcaaagccgctttattcgtaaaaagtgccttagtgtagttttcaaaatgcagtccgctcgcaagcaggctacccgtgaagatttcctttgtagtagacagagatgcaaggataatccagccaatcatgcagaagataaaggccgtccacaaagtgacgatgatatagcccggaagacgcggaagttctttcttcagcttaaaaggattcgcttccattttttctttttttgcttttgccattgtctgctttcctccttacagttcgtagccatcgtctttgatactcttacgagaaatcgtagaaactgcgacgacaacaatggtcataatgcaggctgctgctgctgcaacacccgtgttcatgctgtctgcactaatctcactgccgaacagggtttggtaggtgtacatcatcggagtataggtgcttacaccgccgaaaacctgtgccaaagcgaagaagcccatcgttttggtagtccacagcaccagagaagtgccaagaacgcccttaatcagcgggagggtgatgtggaagaatttgtcaaaaacatttgcaccctcaatagtggcggcttcatagtaatcgggagagattttttcaatagctgcaatgtacatcagcatgaagtagcccacattgctgaatacataagcgatgcacattgagaggaacatgtggtctgtaccaagccactggaagttcgccatggactcccagccaagggcagtgaaaaaggagtggaacaggccaaattttgcattgtaaacatacagcaaccacatataaccaacggcgactgctgcaataacgttgggcatatagataatagcacggaaaaacttctgaccgcgaagaccacttgtcaggatgattgccagaacgattgcaagcccaaggcaagcaataccgcagtacagccagatcttaccgatatttttgaccgatgtgatgaacagcggcgtatggaacagcttaatgtaattgtccagtcctgcccaagaccatgttgaaacagcgcttgtaacgctcttcacgctgaaaaagctcataatagcggttcgggagacaggataaataaaaatcaagcagaacagcagcatggctggtcccataaaatacaagatagatgcttttgtttgtttcatcgttattttcccttcactatgcaaaagggtaggaaatccgtaaacctcctacccttttgtaaaaacaattgatttagaatgcgcttgccatcttgacgaactcgtctgcggagatcgagccgcccatcagcttcaggcaggcatctgcaatgatctgcttgctgtcactgttggtgatgatagcagtctgagaaggataacgggaggtgtagctgttcaggacgacctgagcgtcggccaggttttcgggccagacatgatcaacattcatagggatggcgtttgcctgattggtaaactcctgatcccactcgctggtcgtcagataaacgatgaattcgactgctgcctgtgttgcagcatcatcgcaatccttattgactgcgattgcataggtggagtagcaaccaccctccgtgccttcgacaccgttaggaacttccgggaaagcaaatgcgccccacttgaagtcatcgggagtagttgcagcaacttcgttcggcagccaagtgccgttgatgtacattgcaacgttctcgctgataaccatatcctgctgtgctgcgggatagacgtttgactcaatgttgggatcaaagtagccctttgctgccatgtaagcgattgcctcggcggtgtccttgacaccctgctcacttgcccactggctgctatcctttgccagttccatcacgcgatcgttaccgagacggcgagacatataatagccaacccagctggtgcagtagttggagtcagtcgttacaggaatatgccctgcggccttgaccttctcgcaagcgtccatcagctcttcccaagtctgaggatactcggtaacaccgcactcttccagcagacccttgttgcagaagatcatgaacgcctgcggaatgtaaggaatgcacatggtcttaccatcgaacagggaaccagccagagagatcatgctgggaatgacgacatctttgtatgccttgccgttggtggtgtcgtaggtcttatcaacgtaagaagagaggtctttaatgttctcgctccacagcttctgaacattgtcaatgtttgcatccatcagatcgatctgggtgcctgcttcaattgcggaaacgacgaggttgcggttatcacggccattgaaggtaaaattgattttcacgttcggatgcagctgagtgaaagcgtccgctgcctgcttcagaaccaatgcctgattctccgtctcactccagctggaccagtactcaatcgtaccggacagcgtatcagctgccgcatttgcagcagtggaagatgcagctacactcgaagaggaagaactgctgccaccacatgcggccagacccattgcggcagcacctgctccggcaaccttgaggaaattgcgacgagaaatcttattcatgataaactctccttctaattatctctctggcaaaaatactttgtgcagcgtccccactgcacttcactgtaactatagtttacacaaaaacttgaaacgtgtcaattatcatttcggcaaaatatatgtaaaaaacttgtgcatagtaacaaatttcagtaattctacttggattttacatatcctgtattgacacgtttcaaattatagtgtattcttgttcaaactttattcatctgtctcttttatacgtgcagggaggcacctcctataatgattacacagaatcagctttctcttatccttttaatcattttcgccggaatcatctttttctgtttacagtaagcttttcacacatttctccttcaagatagcataaggccgggatcgaactagcgatcccggccttatgcattatttcggagctgtgatttccgaaggagaatagcatcaatatttctgaataatacgcatcatatcagcgaaagcagcctccatccctttaacaagggtgaactgcgtgcgtgctcgatcaaggttctgtgcagggcgactaatacggaaatagtggtcgccctcaagataatcggtaaggaatcgcattccacattccagcgtcatcagctttgcgccccagaccagactgctcttttcctgctcggacatagttgctccagcggtcgagaggaagccttttgcaaacacctcaaacaagtgcaggtcaaagtggaccttgtgctgatcgggttcatcctcggcgcagtcgtttgcgccaaaacggatggagtcgccaaagtcatatgcagccaaaccgggcattacggtgtccagatcaataacgcaaacaccctttttactcgttttgtcgatgaggacattgttgagtttggtatcattgtgagtaacgcgaagtggaatctcatttttgctcagcatatcgaccagaacatggcagtcagcctcacgagagcgaacaaatgcgatttcatctgcaacatctttcgcacgtcccattgcatcctctgcgacagctttctcaaaattctggtagcgcgtaggagtatcgtggaatttgacaatggtttcatgcagcgtagcagcaggaaatgcggccagctgattctggaacgtgccgaaagtttccgctacagtgtaaaaatcattttcgttttcgactttttgcagacagacagtatcctcgacgaagatataagctcgccatgtgccgccgtcgctatcagtatagaaaggtttcccctctttggtcggaataacgttcagcgtctcacgctccgggtcaccgcccttttccagaatcgccttgcgcaggaaaccggtaacatggcagacgttttccatcaattctttcgggttcttaaatgtgtcagtattgatgcgctgcataatgtagcgcttgcatttgtcgcttgcccaaacgacaaatgtatcattgatatgtccttcgccatagcgagaaatttcacccgttgtacggtcgaaggcaaatgcatcagctgcttctcgcaggatattttctgtgatagcgttcactttttttcctcccataagtccatcggatagattccagcttcgattttattcttgatggcattgacgaccgcaggcttatcctcgcgataggtcacgccataccacttgtccgcactgtgaagaacggtgacagtcgccttcttttcgtcaatcagctcactgacaacaaggggcagaaaatattcgcacttcagcggatttttcggaagattttcgttcaaccaatctgcaaagcggttctctgcctcctgcaagaagctctttgtgaagccccacagattcatgctcacaggggtgtcgccgggcaggtccacccagctctcgccgccgtcctcggtgtaatgtgcgccgccgtcgcagggc

SEQ ID NO: 13762 - DNA, 29089 bp, Unknown
  gut microbiota DNA sequence
cgtaccggtttctgaagattggagggatgttcaggagggatgtaagaaatcctgcttcgacaaaccttcaaaattcaacgcacactcgtgaatttctcgtacagacaagaaaaatcacgaagcggattttgagtccccctcgtctgccattccgacacaccggcgcatcggtttgaacgacttttattataccggattccctgggcaaaatcaagagaaagtttgcgtcttttttcagatcgtcccgcatggcgtaaaatacatgactccggttcttgcccggcggcgcgggctgtgctacactaaggtcagatcaaaacgtaaatgatacccacaaggagggaaccggactttgaaacatctgcattcttttgcccgccgcgcggcggcttttctgctggcggcggtgctgtgcgtctgcatcccggcggcagcggcttcggctgccaccaccatcggcggggccgatacgaccctgattcctgcagaggacgaaaactgtctcagctggctgtttggctccaaggataagatcaccatgccctacctgaacatcaaggggcaggggctcaagcgcaatgttacgctggatcttgaggactgtctggtgggcatcacctataccgagcttggctccattggcagctatgtcagcgccagcgccgcgcagcaggcgtggaaggcgcaggcggtggcggtgcactcctatctggaataccacaagcagtacggctcgtccaccaatgcgctgatctataccccggtcgatcagatcccttcctcggcccgcaacgccatccgcaaggcggtgcaggcagtcaaggatgaggtgctggtgtacaacggcagcgtgtgcgatgcggtatggtcggccagtgcaggctacaacacccagaccggcgtgtacggcacctgcgccagtctggacgcatggggcacggatgtgccttacctgcaaagcgtggaaagcccctacgaggagcagtaccacaacctgctgcgccgggtgatcggcaaggactacacctatatagaatacaacgacagccgcaccggtgagccctaccagagcgccgacactacccacaaggatctgggcggctttgtgcagtacaacacgctggtgtccaatgggcgcagctaccggtacatcaaccagtttgtttcctcccgctactgctttgactttggcgcagacgcaaacggcaccccctgcatgacctactatggctttggccacggcgtaggcatgagccagtgcggcgcagtgggatacgccgccgaggaaggtatgaattacaagcagatcttacagcactactacaccggggcgcagatccgtaccagcagcacccgcagcggcgggctgttcggctggctggcggggctgttccgctgaacgtgtttgactgaaattttggaaaaaccttctcaaacgccgcaggatttggtatactatatccgtttgtgaaaaatgaacgggaaacataactgcgtggaaaaacgcacggattggagtatcagcatggagttggatcaggaaaagcaaaatcaggaggccgacgagcgctgccgtgcactggcacagcgcatcgtgcgggagctggctccccgcagcgtacaggtgctggaggacagcgggctgctggaaaaagctttttgtaaaatgaatactgcggtggtgcaaagcgccccggagctgctggtggtggcagacccccagtgggtcagcctgcccgccgtacaggcggaaaaagtgctgctggtgtgcgcagagtacgccggcatggcagactgcgcaaagcagcttgctgcacagggcttctgccgggagcttgcgtggaaggatcacggcaaggagcagctgaccgcgctgttttgccgcatggacgccccggagctgccggagctggaaaacggctacgagcagcagctggacatcttgcgagagcgtaccctgctggccgagcgcaccgcagccgagcagtctgcccagctggaacggctgcgcagtgacctttccctgagccgcagccacgagcagaacctggaaaagaccctgaacagcgtggtcaactccaccttctggaaggccagctggccgctgcggtatctggtaagcaagtgccgccagctgtggcgcaccttcccgctgttcgtcttttttgccaccctgcgtcaggtgggctttgcgggcgtaatggcacaggccaaggctaaaaaggagtacaaaaaactgttcccgggcaaggcgatgcccgccgaccgctttgcggacgtggagctgctggtaaaacaggccgcagaccagcccgctgcacccctgatcagcatcgtagtgccgctgtacaacactcctcacgattttctggtggagctgctggactcggtgcagaaccagacctaccgcaactgggagctgtgcatggtggatgccggacaggacgcggacgtgggagccctcgtgcaggagcgtgcccgcaccgacagccgtatccgctaccggaaactggacagcaacgagggcattgcgggcaacaccaatcagggttttgcccttgccaccggcgaatatatcgccctgctggaccatgacgatattttgcacccctgcgcactgtggtatgtggcggaagccattgccaagcagggtgcggactttgtgtacaccgacgaagtgacctttgagggggacatcgaccatctgacggtctaccacttcaagccggattatatgctggataacctgcgctccaacaactatatctgccatttgagcgtgttcagtgcggcgctgctggcaaaggtgggcggcgatgagcgggcagagttcaacggcagtcaggattacgacctctacctgcgcctgaccgagcaggcagagaagatcgtgcacatcccgcatctgctctactactggcgttccagccccgctagcgtggccagcaatatctctgccaagacctactgtctggaagcagccatgaaggccctgcgcgcccactacgaccgcatgggcgtgcaggtggatgcggtgaccatggtgcccaataccccgggcttttacaagaccgattacaccattacaaagcccgggcgggtcagcgtgctgatccccagctgcgaccattcgggcgacctgcggctgtgcgtggagtccatctaccgcaagaccacctacccggattttgaagtcatcatcatcgagaacaacagcaaggagcctgccaccttccgctgctacgagcagctgcaaaaggagcacccggacaccctgcgggtgctcacatggcagggcaccggcttcaattacagcgccctgaataacttcggcgcgcgcgctgccaccggcgagtatctgctgctgctcaacaacgataccgaggtcatctctccccgctggatggaggagatggtcatgtacgcccagcaggaccgggtgggctgcgtgggcgcaaagctgctctacccggacaacaccatccagcacgcgggcatcggcttcggcttcctgacgctggcggcgcatatgcacaagaacttccctgtggggcaccccggctatatgggacggctctcctatgcgcaggatgtatacgccgtgaccgccgcctgcctgatggtgcgcaaggacgtgtacgatcaggtaaacgggctggacgagagctttgccgtggcctttaacgatgtggacttctgcgtccgcgtgcgggaggcggggtacaccaacgtgttcaccccctttgcccagctgtaccactacgagagcaagagccgcgggctggacgaaagcccggccaagcgcaagcgctttgcctctgaggtggagcgcttccagaagcggtgggcaaagcagctggctgcgggcgacccctgcatgaaccccaactttgacctgatgaaggaggacttcagctttgacatcaagccgctggagtgagccttccgccaacgataaaacgaaagggggaacgcagatggagctttcggcctgtatcgtggtgtataacggcgccggggaggccatcagggccgcccagaccgtgctggactgcacccgccgctacccgctcacgctgtatcttgtggataacgccagcccggacggcagcggccagcagctgaccgccgccgcaaaggacggcaccctgcgcaccgccccggggcagacggtgcaggtgctctgccggctggagaacggcggcttcggcaccgggcacaacacggtgctctcgctgctgcacagccgggtgcactttatcctgaacccggatatccagctgacggcggataccctgagcgaccttgcggactggatggcggcgcaccccggcgtggtgatgacccgcccggggctgacctttccggacggcaagccccagcagctgccgctgcgccggtgcaacgtgcgcgccatggtctaccgtcagctgccctgtctgcgcttctgggcaaagtacaacgaccgctacctgatggcagacaaagacctgacaaagcccaccgagatcgagttctgcaccggcagcttttcggcggtggacactgccgctttcaaggctgtgggcggctttgacgaggggtacttcatgtatgtggaggacgccgacctgacccagaagatgcgcacccggggcaaggcgtatctggtgccccagtacaccgccatccacgcatggcaccgcgcggcgcaccgcagcctgaagccctttctgtggcagctgcgcagcctgctgcgctacttttccaagtggggctttgcgtggtgagcggggacgaaaaaatagtgtttttgattcgcagaaagcggtgtgccgacggcacaccgctttctgtcgtttccgcctcttgcattttgcgtgctttcatagtaaaataaagtgtactgccatcgtcttttgcaaaaatgcggccttggcagacccaaaatcgtttacagcggacgcagctccgctttgaattaagctgcacatctttttataagaaaaaaggagtgcacaagtatgaaaggcattattctcgccggcggtgccggcacacggctctatcccttgaccatggtcaccagcaagcagctgctgccggtctacgacaagcccatgatctactatccgctgtccacccttatgctggcgggcattcaggatatcctgatcatctctacccctaccgatacgccccgctttgaggcactgctgggcgatggcagccagtacggcatccatctgcagtataaggtgcagccctctccggacggtctggcacaggcctttattctgggcgaggagttcattggcgacgactgctgcgccatgatcttaggcgataacattttctacggcaacggcttctccaagctgctcaagagcgccgtggccaacgcagagaacaagggccgctgcaccgtgttcggctactatgtgcaggaccccgagcgctttggcatcgtggagtttgacaaggacggcaaggtgctcagcgtggaggaaaagccccagcatcccaagtccaactacgccatcaccggcctgtacttctacaacaaggaagtggtgcagatggcaaagcaggtaaagccctctgcccgcggcgagctggagatcaccaccctgaacgatatgtacctgaagcaggacgagctggatgtgcagctgctgggccgcggctttgcatggctggacaccggcacgatggagagccttgtggaggctgccgactttgtgcacatgatcgagaagcgtcagggcatcaagatcagcgcaccggaggagatcgctttcaagtacggctggatcgaccgcgacaccttgctggaaagcgccgagcgctacggcaagagcccctacggccagcatctgaagaacgtggccgacggcaagctgcgctactaagcataaggaaaggcacattggtatgaaaatcattgtcacaggctgcaaggggcagctgggcacagagctgctcaagcagctgcaggagggccgcagcgagctgggccccatccccgaaaagctgctcaacgctacggtgatcccggtggatctgccggagctggatatctccaattacaggatggtggatgagttcgtgcggcgcaaccgcccggatatcatcatcaactgcgccgcctacaccaacgtggacgggtgcgaggtgcaccacgacgatgcctttaaggcaaacgccctcggcccccgcaatctggcacaggctgccgaaaagaccggcgcacggctggtgcacgtttccaccgactatgtgttctccggccgggagaacggcggcatcccgcaggatgaagccaccctgcccgggcccatcagcgcctacggctctaccaagctcatgggcgaaaagtatgtggagcggttctgccaccgccacttcatcgtgcgcaccgcgtggctgtacagctactacggcaaaaacttcgtcaagaccatcgtgaacgcaggcaaaaagttcggcaagctggaagtggtcaacgaccagtgcggcaaccccaccaacgctgccgacctcgcccacgagattttgcagctgtgcgtgacccacgagtacggcctgtaccactgcaccggcgagggcatctgctcgtggtacgattttgctgccgagatcatccgcctttccggtgtggacgctaccgttgccccctgcaccagcgaggagtacaaggcaaagcacccggacagcgccgaccgtcccaagtggagcgcactggacaaccggatgctgcgctgcaccgtgggcaacgatgtccgcgactggaaggacgcgctggcctgcttcttcacccactgggacggcgaaaacggcatgaagggctgagaaaaactgaaaatcccccctgcggaagaactgaggatgtatcatgtttgatgcgatttttggcagatctgtcaagatattaaagatccttgcaaaggtgcagtgtgtgctggcctttgtgcttgcatccatgctgtgcggcgcggtccatgaaatgctgaagccctttagtcggttttcagccatcgtgctggggctggtggtcgccgtggtgttctgggtcttgcagatgtttcttgcatgggcgctgtacgcctttgcggaactggtggagtacaccaaagagacccacaaggagctcagcaacatgagcgcgggtctggcacggtacacccaagccacttatgaggagcttcacagcatgaacaaagggctggaagcatacaccaaggccatgggcaagaccatgaacagcatgaacaagaacctctaccttgtggcaaaacactgctgcgccgaggaggaacgcgcccgcgccgcagcccgcccgcagtccgggaacaacaacaaataaataaagagggatactgacctatgaaaacctatctgatcaccggctgtgccggttttatcggttccaactttgtgcactatatgctcaaaaaatacccggagatcctgctggtcaatctggataagctgacctacgcgggcaatctggaaaacctgaaggacgtggagggcgacccccgccatgtgttcgtgcagggcgacatctgcgacaaggagctggtggagagcctgtttgcaaagtacgattttgactacgtcatcaactttgccgccgagagccatgtggaccgctccatcaagaaccccgagatctttgtgcagagcaacgtgatgggcactgtcaacctgctgcagcgcgccaaggaggcatggtacgacgccgatgccaagacctggaaagagggcaagaagtacctgcaggtgtccaccgatgaggtgtacggcgctctgggtgcggacggcttctttatggagaccacgcccctgtgcccccacagcccctactcctcctccaaggccagcgccgatatgttcgtcatggccttccacgacacctacggcatgccggtgaacatcacccgctgctccaacaactacggcccctaccagttcccggagaagctgatccccctgatgatcaacaacgtcaagcaccacaagcagctgcccgtctacggcgacggtatgcagatccgcgactggctgtatgtggaggatcactgcaaggccattgatatggtggcaaacggcggcaaggtcggcgaggtgtacaacgtgggcggccacaacgagcgccccaacatcttcatcgtcaagaccatcatcaaccagctgcacgaccgcctgcaggacgagggcatcagcgaggagctgatcaagcacgtcgccgaccgtctgggtcacgaccgccgctacggcatcgaccccaccaagatcaagaatgatctgggctggtaccccgaaactcccttcgagaagggcatcgtgctgaccattgactggtacctgaaccacgaggagtggatgaaccacgtcactagcggcgactaccagaactactatcaggatatgtacaagaataagtaacagcctgtaaatcaagcaaaagcaaaagccggacagccaatggactgtccggcttttgctttatttagtggtttccaccacaaaatccgcgctttcggcaacgccgtactgcgcaaaatagccctcttccagcggcacccaccgggcggcaaaatccgcgtagcgtgcgccctcccgcgcctgtaagcgccgggtctgctcggccttggtgcaggtcacgaacacccgcagcgtctcgtaggggcgcagcagcgggtggtggctatagctgccctctaaaatcaccagcggctgcgcgggtagctgcaccgggggcaggtaagccccctcccggcagctgtacgcccggtaggctacgggctgccccgcgtaggccgggcgcagggcctcgtcccgcaggcgggtaaggtccatgttggcgcagggagtgcgtgcccagtccgggctgcgccgggcgggcggcaggtagaaatcatccgtgcgcagcagggtgcagccgggcagctgcgccgccagcccgttggcaagggtggtcttgccgctgccgcagcggccgtccagcgccagcaccagcgggcgggtgggcttttgcgccagcgcggcgctaaccagcgcagacagggtggacgcggtgatgggtgtgggcatgggggtgaacctccttggcagggtgcgccccaaggggcagacccgataataccccattatatcataaccgccgccggaagggtagcacgggtgtggtttgccataaataacttttttgccggaagggcttgacacagcccgctgcgttgtggtacactactggcgttaggaataactaaccgtgtgagaccccaccggcagcgcccgcagaccgggtgtgctgcttcttttttggggtgatggttagccatgtcttacttataaccgcccggcatccggggcacactgaccccgacaccgccgccaaaggagaaccgccatggagcgtgattttgagaccgtaatgatcgaacaatgtgccccggtactggcggggctgaagcctgcggggctgttccgctacgaaacgcgaaaccgtgccgaccttgcccggcgggtggcgggctggaacgcccagctgaaccccaagggcttacaggtgcgggtgctgcgggggtgcatcgctacccggcagtatctggtgtacgtctaccgcgccgccaagctgcaaacggtgctggcagatgccgctgtgcgcggctttttagcccgggagggctaccgtctgccggaagatgccgcggactgcaacgcgctgctggaccagctcagcctgcggctgtgctgcgcggcggaggcggcggatttcccccatgagatcggggtatttctgggctatccgctggaggatgtggtgggctttatccggcaccggggcaagtgctttacctgctgcgggtgctggaagtcctacggcgaccccgccgccgcccagcagcactttgaccagctggccaagtgcacggcggtatacctgcggctgttccacagcggcacgcccattttaaagctggcggtcgccgcctgaaaaattgatattctcttttcaaatactctcttttatcctggcaactctcctatgcttccgacacaggagagagcgatcctcctttttttacacatgaccgcccggtgcagctttgacccctgcgccgggcggtcgtgtttctccgtcaccctgccctataaaagggcaaaacgaccccctgaaaatggtaacattggctaactttagctcaagaaatagagttagtcattgatgattttgataaaaatgtgggccggttccggcataaaatttgtttgttcatataaactaactatgagatatgaaaaatctattgacaagccgggttagcagcgataaactatctacgctgatagttacggctgactaaccaccgcagcatcacatcatttttatggaaggggagcacagcgatgatgcctttgacgatgacaaaagcaggcgagaccgtcaccatccgcaggatcagcggcaaggacgaggtgcggctgcatctggccgagctggggttcgtggttggcagcgaggtgaccgtggtcaacgagatcgcgggcaacctgatcgtgcaggtcaagcagagccgtctggcactggataagaccatggcaagccgcatcatggtggactgaggcagcgccttcccggtgctgcatgaaatactgcaagggaggaatgagtacgatgaaaacactgaaagacgtaaaggtgggcgagaccgccaccgtggcacggctgcacggcgaaggcccggtgaagcgccgcatcatggatatgggcatcaccaagggggtgcagatctatgtgcgcaaggtggcgccgctgggcgaccccatggagctgaccgtgcgcaactacgagctgagcgtgcgcaaggccgacgctgagatgatcgaagtggtctgatacgaccaaaagggaggaaaggtatccgcaatgagcattaaaattgcactggccggcaacccgaactgcggcaaaacgaccctgttcaacaacctgaccggctccaaccagtacgtgggcaactggcccggcgtgaccgtggaaaaaaaggaaggcaagctcaagggcgacaaggacgttgtcattcaggatctgcccggcatctactcgctgtccccctacacgctggaagaggtggtctcccgtacttaccttgtgaaggagaagcccgacgccatcctgaacatcatcgacggcaccaacatcgagcgcaacctctacctgaccacccagctgatcgagctgggcatcccggtggtcatggctgtgaacatgatcgatctggtgcgcaagaacggcgacaccatcgacctgaagaagctgagcgcagagctgggctgtcaggctgtggagatcagcgcactgaagggcgagggcaccgaggccgccgcaaaggctgcggtggcagctgccaaggccggcaagaccggcgagttgccccatgtgttcaccggcagtgtggagcacgccattgcccacatcgaagagtccattcagggcaaggtggatgaccgcttcctgcgctggtacgctgtcaagctcttcgagcgcgacgacaaggtgcaggatgagctgaagctggacaagaccctgatggatcacatcgacgagcacattcaggactgcgaaaaagagatggacgatgacgccgagagcatcatcaccaaccagcgctatgcctacatcaacaccgtggtgggcaaggctgtcaagaagaaggcccgcgtggagcacctgaccgtttccgataagatcgaccggatcgttaccaaccgcgtgctggcactgcccatctttgcagtggtgatgtacctgatgtactccctgtccatgggcacctccattgcggacggcggctgggccatcggtacctttgccaccgactggaccaacgatgtcctgttcggtgagatcgttcccaatgcgctgggcggctttttggagagcatcggcgtggctggctggctgtacggcctgatcatggacggcatcgtggccggtgtgggcgcggtgctgggctttgtgccccagatgctggtgctgttcttcctgctgtctatccttgaggacgtgggctatatgtcccgcgtggcctttatcatggaccgtatcttccgcaagttcggcctttccggcaagagctttatcccggtgctggtgggcaccggctgcggcgtgccgggcattatggcaagccgtaccatcgagaacgagcgtgaccgccgcatgaccatcatgaccacctgcttcatcccctgcggcgcaaagatgcccatcatcggcctgatcgccggtgcaatgttcggcggctcttcgctggtggcagtgtctgcctacttcatcggcatggcagccatcatctgctccggcatcatgctgaaaaagaccaagctcttcgcaggtgatcccgctcccttcgtcatggagctgcccgcctaccatgtgcccgcatggggcaacgtgctgcgggcaacttgggagcgcggctggtccttcatcaagcgcgcaggctctgtgattttgctcgctaccgttgtgctgtggtttatgcagggcttcggcttcgagaacggtgccttcggtatggtcgaggatcaggacaactccgtgctggctgctatcgctaccaaggtcgcatggatctttgcacctctgggcttcggcaactggaaggccactgtggcaagcgtctccggcctgattgcaaaggagaacgtggttggcaccttcggtgtgctgtaccacttcggcggcgagctttccgagaacggcgacgagatctgggcagcggtcgcacaggactacaccgctctgtccgcttacgccttcatgatcttcaacctgctgtgcgctccctgcttcgctgctatgggcgccatcaagcgcgagatgaataacggcaagtggacggccatcgccattggttacatgtgtgctctggcttactgctctgcgctggtggtgtatcagctgggcggccttatcaccggcgaggtgcacttcggcctgttcaccgtggtggctgttgtggtgctggcagcgttcatctacctgatggtgcgtcccaacaagtacgccgacaacaacgaagtcaagctggatacttcccgtatctgataaaaacgaaagggtgtatgctgtatgatggaatttattgctacaaactttaatctgcccaccatcatcgtggcagcgctggtgttcggcgcgctgggatgggtcgtatggcacacccacaagcacggcggcggctgcagctgcggcggcgattgcagccactgcaagggctgccactaaacactaaacactgaaccgcaaggagcgcgggctgaaactctcggctcgcgctccttttttaagtgaaataaagttagcttatgataacaccgggcagaccccggcgcgtaaaaaggagagtgaccggtatgcagctgaccgcagcgcatctgcgctatctgctggccatctacgaggtaagccgcacccatctggacatcagctcccgcagcattgcggaaaagctgggggtgacaaaaccctcggtggtgcgcattttgaacctgctcatggagcagggcatgatcgtaaaggagtactacggtaaaatttacctgaccgaccgcggcatctgggtggcaaagcgggtgcagcaggagctggacgccattctggcgcactttccgccggtgagcggggagctgagtgacgaggagcagtggaacgccgcccttgccatgacgagcgctttgccccagcgcctttttaccgccgactatgagcggatggtggaagaggaggaggcgggctgcgccgcaggcgggacgatttgaaatggcctccgctgcgctctagccataatcagcggaaaaattatttataatttcgcgtttgtcgcggcctgcgggccgctccaaacgctattttcacaggaggggtcgtggagggaaacagcatttgcaacgccgctttctacgaaagcgcggcgctgcgggcgagtgcttgctccccctcgggggagctgtcgcgcagcgactgaggggctataaatggagaagcgaaaaaagcgttaaagcgatagcgccgactggcgcagcgctagcttttttgtgcttcgacttcttctttaggattgtcaagggcgagcagcccttggcccgttgcggggtgggtggagtccagaggtagggaggggggagtcggaacacccctccctgcctctggcctagcggagcgtccttgcacgctgaaggcaggcagaaagttgccccgcggagcgcgatgcattttcaatcgtcccactcccggcaagggcgactgttcaaaagtctcctatgatacacagggggttttgaacaactaaaaaataatgcgcagaaaggcgcagctttcggcggcttttgagccttgcaagaaaacaaacaacggatatacgctatatctctagttgttcaaaaagcagagggggttttgaacaactagaaacgctaaccgtacaaaaacggtggtttttgccctagttgttcatcttgaacaactaggaataagcatagatacgttaaaaagttctagctgttcaaaagtccatagtagtaatagagttttataaaggggttttgaacattcagaagccctgcggtgcatcaagccagctgtatttgctggttctggtttgtgatatccgcaaccacagaggcttcttccagttctggctgataccaatagtttttgcggttgggctgatttccaatgtagagtgttttcaaccccagtgctacgcgggcgcggcgtatggtgcttaccgagatatcccgctcggcgcacaggcggtacacctcgcccgcctctacccagcccacgaaggacagctgtttttccagcgcctcgatggcgttggcaagggcggcagaggggcggccgttgccggtggcgggagtgcccgcctcccggatgatggcgtcggcggtaagggtgcaggggccgtcgtaggccaccgtgccctgcggacagatgcggtagcgctggctttcgccgggctgaccaaggctgtttttggcgtgcgccaccacccgcacctccgggtgctccgggtcccgcccggcgatgaggatgctgcgggcggcgttgcggaaatcgctggagccaagcagacggtccagcgcgctgcataccccggggccgggcttgctcatgtggctgatgagcagcaccgccatgtccagctccttggcaagggcacccagatggtcaagcaaggggcgcacctgctcggcgcggttcatctgcaccccctgccccagatagctctggatggggtcgaacaccagcagcgccgggcggtacacccggcacagggcggcaagctcctcgtcgcccatgctgtaactggcaccatcctgaaaatacagccggtcaaggtctgcccccatggcctcggcgcggggacgcagcaccttgttggggtcgttctcggcggtaaggtagagcacggtggcggggggctgcggcggggtgtccggcgcaaaggctgcgccccgggtaagccgggcgcacacgtccagcgcaaggctggtcttgcccgcagcggacacgccgcccagaatgcttaccatgccccggggcaggtagggctgcaccagataggcagcgcgctccggcgcaaaggcgctggcgggacggatgcggaaccgcccgcgcccggccttttgtttggcttcggcctcggcgcgctgctcctcggcaaggcctgcctgcacatactgctggcgggcgtttgccacaaagccctcgatatcctgccccatgcgcgccccgcagtcggtgaaccagctctctacccggccggtgtcccgcagctgacggctgtacagctgcccccgcagcagccgcagggcttcctcgcggcggtctttgtccagcgtatacaccagcgtggcggtgtaatcgctgagcaattgggcgtccggcgcgtgctccagatgctggcacagctccgtccacacctcgtgctggacggcctgcgccttgtcgtaggcggtacggtacttgtttgcgtccatgtaaaaaacctcctttggacataaagtatctacccttatcctaaggcgatggacgcggaaaaaccagtgtgtactttttgagggccagagggtattattgcacgatggatatacacgttgtaaatgcaagcgcagccgccgcaaaacaaaaataaacgcagcagcgcatggcagcgcccgccgcgcgggaaaactctgccaaaaactggcgaagtatttcaccccgcgtaatccaccgaaaacgtgcgatttttgggggagacagcaaatgccggacagcttgcaggctgcccggcattgtgcgttgtggttattttttgatcgcccgcaggatgcggttggcgatgtacttatgcccgctcacggtggggtgggcgtcggtggcggtcatggcaaaggggatgggcacataggtcacattctcgttctgggcggcaaggttcttgctaagggcattcagccgccggaacagctgcgtccactccggcagcaggggcacagggttggtgtagcccaaaaggatgatctgcgcgtccgggttcagcgcccgcagctccgctacgacctgcggcatatgcacggcggcttcctgatacgcctgctcgcagatggcgtccgtaccgccgcccagcagcagctgggtggtggcctgtttttcttcccttgtcagccgcaggcgggaaaggtcgctgttcagccgctgcaggttctcaaagctgggctcgcgcagcacgccgctgaccatggtggctaccagctgctcgctcttccagttggtggcgttgcccagcgccacaagggcgggcaccagcgcatcgttggagccgatctgcacgctgatgacatccgcgcgcttgaggtagtccagcatctgggggtagacgtagtaggtgcccgcctgctggttcatctggggcattgcgccggtgtgcagcatatccgcaaggtcgccggtggtcagcccgggcaggccaaggttgatggcgtgctggcgatccagcccaaggcctttgcctaccagcgaaacatagcactgctccgggtagccctcaaagtttggggccacgtctatgccgatggcggctgcagtgtacttgaaatccggcagacccacgccggaaacgatgctgtcgcccagcgccacataggtgcgctgaggatcggcggcaggggcttcctcagtgggggcttccgcgtccggggcagctgcctcggcggtctgctcctgcgcggcgggggcggtctgttccggcggcagggcgtcgggctgctgggcaaaggcaggcacagccagcagcaccagcgcagcggcgctgcacagccatgcagtaaaacggggatgtttcatggagaattccttctttcttaaaggcagacgggacgattgaaaatggcctccgcttgtgctctggccataatgagcggaattgttttttttattctggattcagaaaagcctgcgggcttttctgaatccccttttcacgggagtgttcaccccacctcttcttccagtttgcggtagtcggccttaccggcgggggtcaggggcatttcgggaatgatcttataggccgaggcggcgggctgcacatactccggcagctcctcaaggcacagctggcgcagctcccgcaggatctggcgctttttgccgatggcggcaggctccagcaccacaaagacgaagggcagacgtccctgagtgtggtcggtatcggcgcagcccaccacgcagcactgctgcacggcggggtggcggctgatgacgttttcgatcatggaggggaacaccttgaagccgtcgtgccggatgatgatgcgcttgatgcgggcatccagatacacaaaaccgtcctcgtccatggagccgatatcgccggtgtgcgcccacagctggccgtccgcgtggcggcgcagcaggtaggcggtctcctcgggcttgttgtagtagcccttcatggcggtgggggtgcagatgcagatctcgccgcgctgaccgatgggcagctcggtctcggtgcccggctcgaagatggagaccaccgtgttgaccatggggatgcccacgctgccgggctttgtcacgttgccggcggcgatggtggcagccgaggatacctcggtcatgccgtagccctttgccagcgggtactccaccccgtgggctttgaggaaccggttcaccgtctgttccgcgcccagcgagagggaatcgcctccggcggcgtagttgcggatgaaggagaggtctttgtttttcagcagcgggtcggcggcaagctgctggtagtgggtgggcacgccgaacatgtgcgcgggcttgtacttccacaccagtgcgcccagcttatccgggtccagattggggatgatgatgatatgcagccccatgaccagcggcatatggatgccgcagctgtaaccgtaggcgatgaagggcggcatgacgttcagcagcttctgcccgcggtggaacagacggctctgggcggcaaactcctgtgcaagggcgttgaagcagtagtcggtcagcataacgcccttgggcgaaccggtggtgccgccggtgtgcaccaccacgcaggtgtgctgggggtcgtagggcacggcggcggggctgtgccctttgcctgcggcgataaaagccttccagcgcagcacgttggaggcgtagcggtttttatccggctctgtcagcttgtagcccacggctttgaccagcggcagactgtcggcggggctgagcaccaccacccgctccacgctggtgcgctttgcggcctgatggcagcgggggtacaccacgttcaggcagatcagcaggcgggactccacctcctcgatgtactcccggatgccctcggcgctgtaccgggggtctaccagattcagggtagcgcccagcaggtcggcggcgtagaaggtgtagaccacctccggggtcatcacgctgaccaccgtgatgatatcgccctttttcacccccagcgcctgcagggcggcggcggtcttttttatctgcacgatcaggtcggcgtagctgaacttgcggccgtagtattccagcgcggtgtcgcccaggtgccgctcgttgttgcggcagaccagcgcaaaggccgagcactccggcacggattggtggatgtacttttcctcataatatttcagccatggctttgccttggaggcgtagaccggctccttgccatcttccatcataggatcagacctttctttatcatcattcggagaccgactctccgagagcaggtgcagttacattggcaggggcagcgctctgcccggcggggacggcagcgggcagggcggtctccgcggccggggtggcggtctccgcagtctgggcggtggcttcggcagcggtctccgcagcgttttccgctgccttggcggcctcctcggcggccttggcggcgcgctcggccttcagctgctcggcgcgctgacgtgcctcctcctgccgtttcagggtgcgcgccttgatgcggcacaccgagcacagaccctcggcgctgtccggggcaatgggcttgccgcactgcttgcacagggtcttggtgcacttgtacagcaccacggggccaagggtggtcagctggtacagcttcatgccgtcaaagcccttgttggagcacacgttcatgcacacgccgcactcgctgcacttccacggggtaagcaccatgcgggtctggccattgggcatctcctcaaacttcagggcattggcgcggcaggctttctcgcaccggccgcagccaaagcagttgtcggtgaacttgggcatatagtagccgtactgcaggggcgtttccatggcggctttcagctgctttgtgcgctggtgcagcagcaggcggaagtccaccccgctgtcctcctcgctgcgcagaccgggcagcatctgcagcagctttttggtgccgctcttggagccgtggctcacctgttccagcatctcgcggcgggtcagctcctgcacatggtaggggtactccttttcctcatacgccagcgagaaccgcgcttcgaacatcggctgaccgaaaaagtccacaaggcgggtcagttccttgcgcagctgctcggcgcacaggtcgttctcgcactgcccgcagggggtcaggtccagcacgatctttttgttcagcgccagatacgccagcgcctcccacgagagggcgcagatgcagctgcgcaccacggtgttcttgcgggtggacttctcacagccgatccagatggtatcactgtcggtgtccgccgcggcggtatcccgctgcacctgctccggcgaaggcgcaatgcagccgctgcggcaggcggaaacgcacagtccgcagtcggtgcaggggtcccagtccttgacgaggttcgggcgggtaaagatctcttcgccatagggacagatgtccttgcaggtcgtgcagggcttgcggtgagggtgcaaattccagcactggcggcggttgatttcaggatggctggtcttcatcagggcatccattgcagttctggtaaaaaagcccatggtcttactccttttccacaacagaggtaagggcggcgtggtcgagcaggaaacgctgcaccttctggttggtcacggcggcggcgatggcgtcccggctgagcaccttgcggatctcttcttccggggtatcgtgcagcttggaaaggcgggcgatctcggcgtccacctcctgctgggtcacggtgatcttttcggcttcggcgatggcgcgcactgccagcatggcccgcagctggcgctcggcttccttgcggtagccctcccgcacctgctccggggtcagcccggcgctcttgcagtagagctccatggtcatctggctcttgcgcagccgctggcgcagctgggtcatctggtattcggcgttctgcgccagcagctctgcgggcagctccacggtcaggttcgcgcccgccatatccagcagcgctgctccggcaatgcggtcggcgttggcctcgtgggaaaggcgctttttctcccgcaggctctcccgcagggcctccaagtccgcatagcccagcgattttgcaagggcatcgtccaccgggggcacctgcttgcgctccactgtgtgcaggcagatctcaaactgcgccgtcctgccggaaagctccggcacccggaagtcggcaggataggtaaagtcgaaccggaaggtctcgcccgcgcagtggccgtacaccgcttcttctgcggcgggcatcagctgcccggtgcccagcaccacggtcacggcttccatccggctgtccgggatgggtgcaccctccagaaagccctcgaaatccagcgtgacccgcatcccgcgggcggcgggcgcgtcagtgggcacaaagggcgcgtggacccgcgccagattgccgatatccgcttctacggccttatccgataccgggcgcacccggcgggtgaaggcaagccccttgtactgccctaaagtggcagcgggcatggtgtttgcagtttgttccatagtcgaacactcctttttacaaaagcggcgttacagcccgcgggcggccagccagctttctgcgatctgggagaacatctccgggtactgggcatcttcttctttaaaggcgctcaggtaatactccacctcggcgcgggtgggggctacggtgcgccgccagatggtaaaggtggtgccgttgcccatatcaaaggtggcctccagcgcaaagtactcgtcccgcaccgcaaggaacctctcgttcagcttgtgggacatctcgccgttgcccacaaaggtctgggggaaggggtcggcggtgaggacatatttggcctcgaagaactgcatggggaagttgtgggtgcccggcaccgagaagccgaaggccagcttatcgttgatgggggttgcgggcagctggcagttcttgaagtgatccgggcagtacagcatatcgtgggggatcatgtagctgatctcgccctcggcgcagtgggtgtcgatccagttggcaatggccttgatctgcggcagatccttgcggtcatagatcagcttgtccagccggacgaactcctcagtgactgccagcgggaagtgatccaccagaaagcccggcagggcaatggtggtcaggggagagcagcgcaccgaggtggcaaacacgagggtgaacacccagaacacgacctttgccgtccggaagcggttgatgccctcggccagcgccgctgcgcccagcaaaaacaggagaaaccaccccgggaggaacagcagcatctggtgggagccggtattctggatgcgggtgaacagcagcatgctcagcaggatctccagcccggcaaggcagggcagtgcgggcattttgcgctttttcaggcagaaccacagccccatgcccacgagcacaaggttcatcagacccatgcgccagaactgcaggctgatctcggccacaaagccgccgccgttatagtaggaatagcgctcggcgtagctgtaagcgaggatgcggctgaccatcggccagagcaggatcagcatggccaccatgctcatcaggccgaacagcacgaggttgcgcacctgcaaaagcgcctgctttttctgcccggcgcgggcagtgcgcacgctgcttaccagcaccagcaccgcgtaggcaaagtagtagcccaccacaaaatataagtaccaccggcgggaaaggatgatagctgccgtggcggtaaacagcaggcaaaagcgcaccggctccagcttttcaaaccggaagtccagcgtgagcagcagaatgctgaagccgaagatgaggccgaaccagtccggctggctgagcatggcgctcatgcgcagccacgggtaggtgaccatccaggtcatgccgatgaggaagtaccagaagcggtttttcacccgcagcatctgccccaccttgatggtaagccctgccagcagcaccagcagcatgggcaggatgctgaacacctgacagaaggcaaagctgtcgccggtgcggtcgctcaggcagaagggaaactccagaaacagggtgatgaagttggtgtagtcctcggcaaaggagccgaagatgaactggaagcccgccgccgggctttgcagaaaggcagcttcggcccagtactgtttgttgatatagttgacgtaatcccagatatacacaaagctgcggcggccaagcgcccagaaaaagtagaccagcgccgccgcccacaggccgacgagcaccgccttgtggaagaggtcaaatttgattcccgccacccgcagcaccagcagcacacaggcaaacagggcaaggttgcaccacaggctcaccagcgggaaaaagaatttgctgccgggcgcagcctgcgcaaaaacggccagcagcaccgctgctgccgccagcaccagcacgattttcgccgcagcggaaacgcggggctttgtaatgggttcggacatggaataggaccctccttgcaaaatttcacaccttacagtataacaactcccccgggcactgtccagcaccccggcggcgaaaaatgcagaatgtcccgccgctttcaaagcagacgggacatttttgcataaatattacttatcggaaacttctgcagcggtcttagcagcctttgccgccttgcgcttttgtgccagcgccctgttggcgctcaggcgggcggcgtccgggttcggggcttccggggtaagccgcagcagatagctgcccatggcgggcaggtccagcgtcagggtgtagtcccggccgaacacaccgccgtcggtggtgtggaagttctgcttgcggtgcgccttgtgcacgccgccccatgccccggcctcggtgtccagcaccagctctgcgctgcagggggacttgaggtacagggggaactttttgtgggcgtggtcctgggtgttcatgacgcagagcaggttctgcccgcgccccttgcgcagccatgcgtacacgccctcggcgcagctttcgctggccacccactcaaagcagtccgggttgtactcgccgtcatacaaagcaggctcggaggcgtaggtgcggctcagagcggcaaagtacttctggaacgcatcgtggaaggggtattccagcagattccagtccagctcccgcttttcgtcccactcccggaaatgtgccagttcgttgcccataaagttcagctttttgccgggatgggtgtacatataaaaatacagggtgcgcagctgggcgcatttttccgcgtagctgccccacagcttgtcaatgatggtctttttgccgtgcactacctcatcgtggctcagcgccagcaggtacagctcgttgtaaaagtagtgcatactgaacagcagcttgccgtagcagcccgggcgctcgccgaagggggtggcaaagtagtccagcgtgtcgtgcatccagcccatgtcccacttgtagtcaaagcccacgccctcgtagcgggtgggagcggtcaccttgaggaagttggtggagtcctccgccatgtagatgccggtgggccagcgctcgttcagcccgtggttcaggctgcgcaaaaagttcaccgcgccctgattcacgccgcggttggggtcgccctgccagtacagcgcccgggagatggcgtccatgcggatgccgtcgcagtggtacacgtccatccacagcccggcggcgctgctcagaaagctgcacacctcccggcggtagtagttgaagttgcaggtgccccactcgctctgtcccacgtcgctgtcgtactcgtacaggtaggtgccgtcaaactttgccagtgcgtcggcgttggcggcaaagtgcaccggcacaaagtccatgatgacgccgatgcccatgcggtggcaggcgttgacaaagcccgcaaactgggcgggggtgccgtagcggctggtcaccgagaagtagccggtggtctggtagccccagctgccgtcaaaggggtgctcggccagcggcagcagctccacatgggtaaagtggtgctccagcagccacgggatcagctcccgcgccagctcctcgtagttgtaccacccgtccgagccgtccggccgggtggcgccgggcttgtgcttccagctgccggcgtgcagctcgtagatgttcagcgggcggttgcggcatttgtcccgccgctccatccacgcggtgtcgtcaaaggtgaaatccagctttgtcagcttgctggcagtgccggggcgcagctcggtggcaaaggcgtaggggtcgctgcgcatcacggtgctgccgtccgcgccatgcacgcggtatttgtacaggtcgccttccgcaaggccggggataaaggcgctccacacgccggtatcggctttttccatgggcacgccgcgctcccagccgtcaaagccgccgcacacctccacggcggtggcaccgggtgcccacacggcaaaacgccagccctcggcgccgtttgggtcggtgcaggggtgcgcacccagaatgcggtaggcatcgaagcagtcgccactgaaaaacgcgcgggggatcacagggtaattcatgcaaagatctccttacttctctatgttgaccggcggtgtgcgccggttgatacaaggctgtttgggcaaactatccaagaaaaacgcctttttaccggcacagtagccgataatcttagcgaatcttgacaaaaatcggtaaaaatacacatatttgccagagggtgtggtatactgttgctaccgccttgcaggcggtgcaactttttagagcaacagaatgggagcgaatgatcatggcttggtatgacgaagcagtattttatcacatttatccgctggggctgtgcggctgtgcgcacgaaaacgacggccagcccaccccgggcgcttttgcaaagctggaagcatgggcagcccacgcggcaaagctgggctgtacagctatctacatcggcccgctgttcgagagcggctcccacggctacgataccatcaactaccgtctggtggaccgccgccttggcaccaacgaggagttcaaggcttttgtggcggcctgccacgcccgcgggcagcgggtcatcgtggacggcgtgttcaaccatgtgggccgcgatttcttcgcgttccaggacctgaaagcaaaccgcgagaacgcccgctataaggactggttctgcgatgtgaacttctggggcaacaacgagtataacgacggcttttcctacggcaactggggcggctacaacctgctggtcaagctgaaccagcgcaacccggaggtgcagcagtatcattatgataccgtccgcttctgggtggagcagtttgacatcgacggcatccgtctggacgcagccgatgtgctggatttcgacttcatgcgcgggctgcgccgtctggcaaacgaggtaaagccggagttctggctgatgggcgaggtcatccacggcgattacagccgctgggcaaacccggaaatgctgcactcggtcaccaactacgagctgcacaagggcctgtggagcggccacaacgaccacaactattttgaaattgcccacaccatgcgccggctgcaggggctgtgccacgacacccggctgtatctcttctcggataaccacgacgtggagcgcctgcccaacaagctgcgcaaccgggagcacatccggcatatcgccattctggtgtacagcctgtggggcatcccgtccatctactacggctcggagttcggcattgagggcaaaaaggagtggggcagcgactggccgctgcgcccctgtctggagctcagtgactacgctgatgcagaacgtacaaatcctgttaccagtgtatacaaagcgctggggaaatgcaaggctgaattgccggaaatgacctatggcgaggtaaaggaattgcagctcaccacccagtgctacgcctttgcccgggtgctggacggcaaggcggtggtagcggtgctgaacaacggcgatacccccgcacagctggagttccagctgccggtggaaaccgccaaggtcaccgacctgctggcggacaccgtgggtgcgcaggaggtgctggtctccaccgagtgggaccgcatgaaggtgcagctgccctccaattacgccaccctgctgcgggtagaataaagcaacgcctgcggcgtgaccggcgcaaaagcctttaccctttggagataggtttcccccttccgggggaagcctttgttcagaaagctgagattggaataaccttgcacattttgccgcgttttgctacaataaggagagaaaagtcgttttacggaaaggaagcctgaccccctatgaatgcagcacagcgcagagaacgcatcctgacccggctgaacagcgccggtgcccctttaagtgccagcacgctggcggcagagctgggggtgtcgcggcagatcgtggtaggggatgtggcgctgctgcgcgccggtggggcgcagatcgatgccaccccccggggctaccagctgcacccggcggagaagggctataccggcattctggcctgtgtgcaccgcacacaggaggagatgcgccgggagctgtacaccgtggtggatcagggcggcacggtggtggatgtggcggtggaaaacagcctgtacggcgagatccgcgccaccttgaacctgtgcaaccggtacgacgtggataactttatccgtcaggctgcggatgcacccgagagccttttgagccgcatgaccggcggcgtgcacctgcacaccctgcgctgcccggacaaggacacctttgcccgcatccgcacggctttggagcagcaggggcttttgtaccgcaaggagtaacgccgctccgcttatacccagtataaaaagggctgcggggcttgtctatccgcaaaaccggaaaaatgttggaaaatcaacaaaaatgcaaaagaggtgggttttctggatatccgcattgaaaagaccgagcgcgccatcaagcaggcctttatggagctgcgccgcgaaaagccggtggaaaagatccgtgtcaaggagctgtgcgaccgtgcctgcatcaataaatccacattctacgcccattatcaggatatctatgcgctggccaacgccatggaggacgagatggtgcacgcggtggtggaaagcttgccccgcctgaccgccagcgatgtgagcgagcgcaccgagtggcttgcgcgggagatgttccgcgccttcaccgcgcatcaggccgagatcagcgtgctcttctccggctcccggcaggggctgttcatcaaccgggtggaacaggccatgtgccagtgcatcgcccagaccgaccccacctttgagacggacgtagtgcgcaaggtggtgctttccttctgcgtgcaggggtgctactacacctttaccacctactgcggccagatggacgaaaagcgccttgtgaccctgctggcctccatcgcccgcgccgcgcagcggatacgcatgtaacgggactggctttgcatgcgctccgtgctgctctgcgcataaacagcggaaaaattagttttattatcgggatagcggagcgtctgcggacgctccgctatcccatttttataggggacgcgtgcttttggcagaactgccaaaaaataagacgaaaattcgtcatctgcacttttttaccagattttttaagaaagagtttacactatgccggaaacggtggtattatataaaatagtatggtatggggtaaaatgcgcctgcgtactccgggagggtatgggatgaagaacaagatctcgcgccgcagctttctggcggcggctgcggtctcggcggcggcaccgaggccgagatcaacggcgcagtcacctttttaaagtggttcaccgaaccgcagaataatatcgctttcgcggtggagtcgggctatctgccggtgaccaccgccgccaacgacatggacgccatccgcgcaagcgggctggaactgaccgacgactattttgaggcgtggtatcaggccaccctt

SEQ ID NO: 13763 - DNA, 7723 bp, Unknown
  gut microbiota DNA sequence
cagtacgagggctgaccgcccgcaaaaaagacggaaaggaggcagggcgatgtttgacgcatggaaacagcgccagcggcagcgcttggaaaacagaccggaaagaaccgtgttctacaatatttttgccaccatgatgctggtgctggcggtggagctgctgatgtcggccgccagcatccttgccatcaacgtgaccgggcagctggacgaaaacgccaaggatctgcttaccatgcgggtgcgcaaccgcgccagctatgtgcaggagatcctgcggaacgcggaggatctggagcagctgagcgagcagatcaccgccaccacccagcagctgctaaaaagcggcgatatctcgctggacacgctggataacagcagcgaacagagcgatgccctgctggtagcccttgccccgcagcttctggacaccctgcgcacaaagcaggtgaccggcatctttctcatcctgaacacccacgatctggacacctgcgaggtgggcaaaaaaatgcccggcatctacctgcgggatatggacccggacgcccgcccttcggagcgcaacagcgaccttttgctggaacgcgccagcgccacagtggtaaaagagctggccatcggcacggataagggctggcagcccgctttcccctatcagggagataccaagggcggcatcctgcgcacggtgtttcagaccgcgtataagggcgatgccggcctttcggcggaaagctatggccgctggaccaccaactcctactgtctggccggggacgaccggcacgccattgcctactccatgccgctgatcctgccggacggcacggtatacggcgtggtgggcgtggaactgctcacggactatctgcaaacaaaactgcccttcaccgagctggacgaggacaaggcaggcacctattttatcgtgaccactaccgatgatgcgctgacggacggcgtgctcaccctgcgcaagaccgtgacctccggcgaggacctggtaacggcagatgcaccgctgggcgttttgaactgccgcagcaacggcaacggcggcaactgggtggagctgaacgataagcgctattatatggtgctggagccgctgcaggtgtataaccgcaacgcgccctttgccgccgaaaagtggtttctggcgggtaccatggaacagtcggtgctgctggctttttccagccgggtgcgcgaggtgctgctgaccaccatagcgatcacgctggtgctgagcgttttgggcagcctgctggtctcggcacggctggccagacccatcaaccgtttgtaccgcgaggtgatagacgcgcaggagaaaaagaccttcccccgcctgtcccgcaccgccatccgggaggtggatcgctttgccgagaccattaccgagctgaacaaggagctggtgaccaactccaccaagtttttgcgcatcatggatatggccagtgtggagatcggcggctacgagctgcgcaccgacaccggcagcgtgtttgtgaccgataatttcttctccctgctgggtaagcccgagatgcagggcaagccgctgagcgtgcgccggttcgaggaggtgctcaagggcatccgggaaaagaatccctgtgaccacaccgccgagggggacgagctgctgaccattcagcagccggacggcgtgcggtacatcatgctgcgcagcaccatcgaggggcacgccaagatcggccttgccgaggacgtgaccgccgccgtgctggagcggaagcgcatcgagcacgagcgcgatcacgatattctgaccgggctgtacaaccggcaggccttcaaccgggtgtgcaccgagctgttcgccgcgccggagcgcatgggcgtagcggcgctgatgatgatggatctggataacctcaagcacatcaacgatacctacggccacgactggggcgaccagtacatccgccgcaccggtcagtgcctgcgggacaatacccccgccgggacagtctgcgcacgcctttccggcgacgagttccttgtgctgttccacggctaccgcagccgggacgcagtgcgggaaaagatcgactgcctgacgaaggccatgcagcagagcgtggcgctgctgcccagcggcaacgctttgcacatcagcctttccggcggtattgcgtggtacccggacgacgggcaggactgggagaccttgaaaaaatacgccgactttgccatgtatcaggtcaagcattcggagaagggccgggtggaggagttcgacatcggggtgtacaaccgcgaagcctacgccgagcgcacccgcagggagttccggcagctgctcagcaatgcgcaggtgttctactgcttccagcccatcttctcggcgcgcagcggcagggtagtcgcctacgaggcgctgatgcgctccgacctgcccaccctgcgctccccggccaccatcatgaagctggcgcgggagcagggcgcactgtacgagatcgagcgcctcacctttaccaaggcgctggagaccttcgacagcctgtgccgggcgggcagcgtgtccggggatgccatgctctttgtcaactccatcgccaacacctgcctgtcgcatgaggacggcaaatatataaacagccattggcacgagctgtgccgtcgcatggtcattgagatcaccgaagaggaagaaatcgactacgaagcactggagagaaagcgcaatgcaccgggcttttccgggatgtttgcactggacgattacggcagcggctattccaacgagaatacgctattgcagcttgcaccccggttcgtcaaggtggatattaccatcatccgtggcatcgacacctcgccggacaagcagcagatcctgcgcaatatggtggcctacgcccacccccgcagcatgaagatcgttgccgagggcgtggagaccgccgccgagctgcgcacggtcatcgagctgggcgcagaccttttgcagggctattttctggcacgcccggccattgtgccgggagcgatcgcgccggaagcagcggggatcatccaggagttgcagcgccggaaaaaagactgaaatatatgccctcccgggcgctgcggcgctgggagggtttttgcaacggaggtaaaaagatatggttcaggtggatctcatcaccggctttttgggcgcaggcaagaccacctttctgcgccgctatgtgcggtatctggtgcagcaggggcataaggtgtgcattctggaaaacgactttggcgcggtgaacgtggacgccatgctggtgcaggaggtgctgggccccggctgcgatgtggagaccatcagcggcggctgcgactgcgacacccaccagcgccggatgcgcaccaagctcatcgccatggccatgcgcggctttgaccgggtggtggtggagcccagcggcatctttgatgtggacgagtttttcgatatcctgcgggacgacccgctggaccggtggtatcagctgggcagcgtcatcgccattgtggacgcccttctgccggaaacgctttcgccgcaggcagagtatctgctggcctccgagaccatgaacgcgggctgcgtgctgctgagccgcgcccagctggcagcgcccgcccagtgcgccgccgccgctgcccacctggagcgtgcactggaagccgcaaaatcttcccgccgctttgcgccgggggagatccttgccaaggactgggacgctctgaccgatgccgaccttgccgcccttgccgcctgcggctaccggcaggccagctgcgaaaagctgcattttgaccagcacgcggcctttacctccctttgctttctggaactgcacctcaccccgcagcagctgcaggccgccgcacagcggctgtttaacgcaccggaatgcgggcaggtgttgcgggtcaagggctttgcgcccgccccggcaggcggctggctggagctgaacgccaccgccgccggctgcacccttgcgcccatcccgcaggggcaggaggtagtcatcgtcatcggtgaagcactggataaagccgccattgaagcaaacctgaaggggtgaaaggcagttttcccccataacaaaacgcattgtggaaaaacaggagggactatcatgcaggaagtacgcgcagccgttatcggtacaggggtcatggggcgcaagtatgcccagatgatcgcagaaggaaaggcgggggcattgcgcctgaccgccgtggtctgccgcagcgccggggcgcagcagtgggcaaaggataccctgccggatacggtgcgggtgtgccccagcgccgaccagctgtacgattatgcagaagagtttgacgccgtgctggtggtcaccccgcacaagacccacccggcgctggtgatgcaggcttttgcccacggcaagcacgtcttgtgcgacaagcccagcgcaaacgcgctggcaccggcactggaaatgaaccgcgccgccgaaaaaagcggccttgtttttgccatgatgttccatcagcgccgctacaaaaagtatatgcggctaaaaaaattactggatgatggggcattgggcgagatcaagcgggtgcagctggaaaacagccgctacttccgcacatggatgtaccaccactccggcagctggcgttccagctgggcaggggagggcggcggtgcgctgctcaatcagggccagcacattctggacatctggcagtggctgttcgggatgccaaccagtatttatgccgtgataccctacgggaagtataacgactttatggtggacgacgaagccaccctgctcatggagtacccgcagcagcgcacggcaacctttatcctttccaccggcgagggcagctacaccgagcggttggagatcgtgggcaccaagggcaccgccctgctggaagaggacaccctcaccctgcacacctacacgccggacaccgagacctaccgccgcaccgcagactgcaccgagcgccagcagcttaccgagaccaccgttaccgagcagttcgcgccgcaggccgagccttacccggagatgctggcaaactttgcggacgccatcctgcacggcacgcccctgaccgctcccggcgtggagggcgtgcgggcgctggaactgaccgatgtggcttacctgtccgcatggctgggggagaagatcaccctgccgctggacgcagaccggtttgaacaggagctgcaaaagcatattcaggaggaacagaaaaatggctaagctgcggtttatcgtagtaggctccggctggcggtcgctgttttactggcgcatcgcgcaggcgctgccggaacggttcagctgtgcgccatgctttgccgcaccgaggaaaaggccgaaaaaatgcaccgggagtacggcgtgccggtaagcacctcggcggagcagtgcattgccctgcacccggaccttgtggtggtggcagtgaataaagcgtccatcgccgccgtcagcaccgaatggcttgcccggggctttgccgtgctgtgcgagaccccggcggcgctggaggaggacgcattgcgcgccctctggcagctgcaccggcagggcgcaaagctgcaggttgcagaacagtactggctgtaccccacgctggcaaaacggctggcagcagtgcgcagcggcgcactgggcacgccgcagtttgcccggctgtcggtggcgcacggctaccacgcggtcagtctggcgcggcagttcctgaacgccgggcagcagccggtgcgggtgaccggacgcagctggacggaaaagatcatcgaaacggattcccgctggggtgcggtgcataacggcgcactggtggaaaagaccttgcagcagcacacgctggaatttgcgggcggcggcacagcgtttctggattttaacggtatgcagtaccactcctatctgcgcagcacccacaccagtgtgcagggagagcggggcgaagtgttcgacgacaccctgcgctgtctggatgccgccggggagccggtgtgccgtcaactgaccccgctgcccgacccgctggcagctgccgccgcgcaggcggggctgaacgaggacgagaccgccatcgcctgttttctggacaggatgcagggctatcttgccggcggggcagaggtgtacccgctggcagacgccttgcaggacgcctaccttgccctgctgatggagcgcgcccttgccgtccccggtcagtcggtggaaagcaccccgcagccgtggaatacagaagaacgataaaaaaggctcaggagcacctgtcggcgcttctgagcctcttgatttataatgattggatcacatcaggtcgatcagcgcttccacctcgtccatgtgggtggcccagctggtggcgatgcgcaccacggtgtgggtgtcgtcgaacttctcccagaagccgaactttgccttgccttccagcgcagccagctgggtgttttccagtacaaggaagatctggttggtgggggagtccataaagaagcgatagccctttgccgcaaaaccggccttcaggcggttggcggtgacaatggcgtttttgctgatggagaaatacaggccatccgtgaacagcacgtcaaactggatgcccagcagccgcccctttgccagcagtgcgccctgctgcttgaccatggtcataaaatgcgccggtgcgccgtgggggaacaccacagcctcgccgcacagcgcacccaccttggtgccgccgatgtagaacacatcggtcagccgggcaaggtcggccagcgtcacgtccgtgccctcggcagccagaccatagcccagccgtgcaccatcgaggaacagcggcatcttgtactcctgacacacagcgtgcagggcttccagctccgccttggtgtacagggtgccgtactcggtggggtgggagatgtataccatgccggggaacaccatgtggtcgtggttgtcgtcggcgtagaaggtggccaccagtgcccgcagctcggcagcgtccagcttgccgttgtgctggggcagggtgatgaccttgtggccggtgtactcaatggcacctgcctcgtgcccggctacatggccggtggcagcagctactacgccctgccaccgctgcagcatggacgcgatgacgatggcgttgctctgggtgccgccggagatgaactgcacatcggcctccgggcaggcgcaggcggcgcggatcttctcgcgggcgctggcgcagtaggggtcggtgccgtagccggagaccttttcaaagttggtctcggtcagcttttgcagaatggcggggtgtgcaccctcgcagtagtcgttttcaaaatacagcatggcaaaacgctcctctatataattgtaagaaaacagtacctctattctacatcgccgcgaaaaccctgtcaaatccaaaaccgtgcacagcgcacgcaaggcaccgcaacgcgtctgcaaatgccgcaaaaacgcctgcacagcgcagccgcactgtctgcaaaaaatgcgaaagtatgatcctttccaaaaagatgaaaagtttttcaaaaaagtgcttgacaattttgctgcatctggtataataactatcgttcccggcgccacggcgcaggaatacaacagaatatgcggatatggcggaattggcagacgcgttagattcaggttctaatcggggcaactcggtggaggttcaagtc

SEQ ID NO: 13764 - DNA, 46432 bp, Unknown
  gut microbiota DNA sequence
caaaaaattatatttagatgacttattacttttcttcttatttttcttgctccatttacctcatcttcatcatttaatatttctccttcttttcgtgcatccattatagcctttacgaatctctcttctgtaatttcactttttgttccatcaaggactatatcccgttctaatgcccaatatttcatgctatattgcccaaaactaatagtccccttcaccttttctgcatagttataatcatcacgtagttgataatacggattactcataatttcttcaagtggatcaatttttcttttcttcatactttttctcctcttaaaactaaaaccctccccggcaaaaccattcagtttcaccggggagggtttatcatacgtttatcttcccatgttttgcgcgattagtgcatcttcatgcaacaatcttactttctgggatttttgatagcagcctgggcagcagccagacgggcgataggcacacggaagggagagcagctgacgtagtccagaccaacgttgtggcagaactccacgctcgtggggtcgccgccgtgctcgccgcagatgcccagacccagatcggggcgggtctcgcggccgtcgtgggcagccatcttgaccagcttgccgacaccgacctgatccagatgctggaacggatcactctcgtagatcttgttctcatagtatgcgcccaggaacttggcagcgtcatcacggctgaagccgaaggtcatctgggtcaggtcgttggtgccgaagctgaagaactcagcttccttggcgatctcgccggcagtcagggctgcacgagggatttcgatcatggtaccgacctgatacttcatgtcaacgccggcagcagcgatcagctcgtcagcaaccttgacgacaacgtccttgacgaacttcagctccttgacctcgccgaccagcgggatcatgatgtgcggggtgatcacatggccggtctcagcagagacgttcagagcagccttgatcacagcgcgggtctgcatagcagcgatctcggggtaggtaacagccagacggcagccacggtgacccatcatggggttgaactcgtgcagagaagcaaccacgttcttcaggtcttcgtaggtcatgcccatgtcggcagccagttccttgatgtcctcgtccttggtgggcaggaactcgtgcaggggcgggtccagataacggatggtcatcgggcgctcacccatgatgcggtacatagcctcgaagtcgccctgctggaacggctcgaccttggccagagcagcctcgcgctcttccacggtgcgtgcgcagatcatctcgcggacagccttgatgcggtcctcagcgaagaacatgtgctcggtacggcacaggccgatgccctcagcgcccagatccactgcctgctgtgcgtcacgcgggttatcagcgttggtcatgaccagcagctgacgtgctgcgtctgcccagcccatgaagcggttgaagttcttgttgccggtagcggccacggttgcgacctgctcgccatagatgttgccggtggagccgtcgatggagatccagtcgccctcgacgaacttgtggccgttgatctcgaaggtctttgcctcctcatcgatcttgacctcgttgtcgttgccgcagccggaaacacagcaggtgcccataccacgtgcaacaacggctgcgtggctggtcatgccgccgcggacggtcaggatgccctgagagacctgcatgcccacgatatcctcggggctggtctccagacgcaccagaacgaccttcttcatcttgccggacttgaccatctcctctgcctcttcagcagtaaagacgatctggccgcaggcagaaccgggagaagctgccaggcccttgccgacgacctctgcagccttcagggcagcagcgtcgaactggggatgcagcagggtatccagctgcttgggctccacgcgcaggacagcctcctgctcggtgatcatgccctcgtccaccagatcgcaggcgatctgcagagcagcctgagcggtacgcttgccgttacgggtctgcagcatatacaggtggccgtcctcaatggtgaactccatatcctgcatatcgcggaagtagttctccagacgggtagcgatctcgacaaactgatcgtacacctcaggcatctgatccttcaggtggctgatgggagaaggagtgcgcacgccggcaacaacatcctcgccctgtgcattgatcaggtactcgcccatcagcttcttagcgccggtggcggggtcacgggtgaatgcaacgccggtgccggaacggtcgccggagttaccaaaggccatctgctgcacgttgacagcggtgccccactcgtaggggatctcgttcatcttacggtagacatttgcacgggggttatcccagctgcggaacacggccttgacagcctcgatcagctgatcgcggggatcctgcgggaagggacggccttcgttctcctcgtagatcttcttgaaggtgccgaccagttccttcaggtcgtcagcagtcaggtccacgtcgttcttgacgcccttggcttccttcatcttgtcgatctcgacctcgaacaggctcttcgggaccatcataacgacgtcggcgaacatctgcacgaagcggcggtagcagtcgtatgcaaagcgggcgttgccggtcttctttgccagaccctcaacagcctcgtcgttcaggcccaggttcaggatggtgtccatcatgccgggcatggactgacgtgcgccggaacggacggagaccagcagggggttggtgttgtcaccgaacttcttgccggtgatctcttccagacccttgaggtgctcaaagatgtcagcagtgatttcgtcattgatctgacggccgtctgcgtagtactgggtgcaggcgtcggtggtgatggtgaagccctgcggcaccggcataccggctgcggtcatctcggccagaccggcacccttgccgcccagcgtgttcttcatggtgaccttgtcaccgccgaaagcgtcattgccttcgctgaagtagtacagatactttttgctcatgcgttgtttacctcccattcgtgaccggcggcatggcagccgcggtctcatcgtttgccttgtcttgaacgtacgatgaacattgttttgtgaatgctaaactattataccagaaaatccattcctttccaccatgcaaaatcccgaatttgtctgttattttttatgcaaatcccttgaaatttgccaagttttaaggtagtatagaatgggagaaagttcgagaggttttttgtttatacacgcgatttctcgtcctgttggatacaactttctatccctgtaacttttcaaattctattttgtcggaacaaagctttccgcagcggggtgctggggcggacaggcaacaattttccggtcgccttttctgtctctcttccgccgcgcgctttggtgggaagggagattttttcatgcagaatcctatttctgagcaggcccgcgccgcagctctggcacaactagatgccgccgaggctgcccgcgaggacatccttgtgcagcacattgcaaacggcgtcgtcatcgacagccgcaccgtgcagatcgacccggaggtggtcattgccccgggcgctgtgatccttgcgggcaccatcctgcggggcaagacggtcatcggcgcaggctgcgtcatcggccccaacaccctcatcgaggacagcaccgtggacgagggcaccaccgtgaacgccagccagatctacggcagccacatcggcccgcacaacaacatcggccccttcacccatgtgcgggtgaataccgtcaccgcctacggcgtgcatctgggtgcctatgtggagaccaagaactccaactttgcccgcggcaacactgtgagccatctgacctacatcggcgacagcgatgtgggcaagtactgcaacttcggctgcggcaccgtcacctgcaactacgacggcaaggataagttccgcacccagatcggcgattactgctttatcggctgcaacaccaaccttgtggccccggtcaaggttggcgacggtgcctacaccgccgccggcagcaccatcaccaaggatgtgcccgcacaggcactgggcatcgcccgggagcgccagaccaatctggacggctgggcagagcccaagatggaagcctacatcgccaaaaagcagaagctggaaaacgagcagagcaaataaacctctgccagaagggagctgcgtatgaagtctgaaagctttcgcaagcaggcgctgagccttgtccttttcttcgcggctgttgccgccgtgtttgccctgacccgtctgcgcagcgaccccgccaaaaaacaggcggagttcgtggtgcagcagctgctctcctgctcttctgccgtggagcaggccgtggagcaggctgtggacgccgccgcaccctccggcagcgaaccggggcttgccgcagtggataccgatgggctgtacgcctttcttcaggcgcagctgggcgatgccatgaccgccgactgcctgaacaaggtcatggcaaaccgcctgcccacccgcatcaccgcgctggcagggcagtccggcggcaagctgactcccgctgaccttaccctgaaaaagcgcgccggggcagaaaactgctacgacttttccgccgccctgctgaccgctacggacagcaccgccgccgcgcaggtatccggcaccatcaccatggtgaaggaggacggccgctggaaggcctctgccatcacgctgaacctgtaatataatgcttctctgcccctgtgccctgcggcatgggggcattttttgcttataatgtatatctttttgcgcgcgcgtatgttatacttagatgttgtatcacactattatcaagaaaaggtattatcatatcatgaatgaaaacgatatctggctcattgcagggctgggcaaccccgaggcaaagtacgatggcacccgccacaacgccggttttgccgcgctggacgcactggccgacaagtggaacatctctgtgggcaaaaccaagttccaaggcctgtggggacagggcgaggtggacggccacaaggtagtgctgctgaagcccctgacctacatgaacctctccggcgattccatcgcccctatggcgggctttttcaagatccctgccgaccatgtgctggtgctgtgcgatgacatcacccaagcccccggcaagctgcgcatccgtccctccggctctgcgggcgggcacaacggcctgaagagcatcattgcccggctgggcggggaaaatttcccccgcatccgcatcggcatcggcgcaaagccccacccggactacgaccttgccgcatgggtcctgggcaagttcccgcccgaggacgccaaggccatctctgaccgttacgccgaccttgaagccgccgcaaagctcatcatggacggtaagctcagtctggcacagagcaagtataacgggtaaacgcccccactcgtgaaaatgcgtttggagcgctccgcagagcttgtcggggcaaagcccctccatctgctagcgcagaccgctctgccgcttaaaagccccactggggctttcattgctacgctgcgctccgcaaacgcggtcgctccaaacgcgaaatttaaaataatttttccgctgaaaatatccagagcgcaagcggaggatattcaaaatcgttattttcccgcatcctgacaggaaaggaggtttttccatgtacgaagccttactcaaggctaccccggaatatcagaaggtcgccgcaagctttggctcggcagggccggcggcgctgttcggtctgccgcccgcaggccgggcgctgctgtacgccgccctgcaaaaagaccttggccgggtgctctgcatcgtgacccccggcgaagccgaggccacccattttgcggacgacctcaaggcgctggggcttaccgcagcggtgttccccccgcgcgactttatgctgcgcccggtggagggtgcaggccgcgagtacgagtaccgccgcctttcggtgctgggtgcactggcgggcggacggctgcaggccgtctgcgtgcccgccgaggcacttttgcagtacaccgtgccccgggcagaattcatccagaacaccctcaccctgaagcccggcatggtgtataaccgcgaggcgctggtggcgcggctgtttgccgccgggtatgtgcgccgcagtcaggtggacggcccgggacagttcagcgtgcgcggcgatatcgtggatatctacgcgccggatatgcgtcagcccgcccgcgtggagtactgggacgacgagatcgactccatgtcctcctttgacctgctgacccagcggcgggacagcgcactggaaaaaatatacctctcccctgcccgcgaggtgctgttcggcggcaccgccgagactgccgaggcgctgcgcagcgccatcaaaaaggcgcgcggcaagcaccgcaccgcgctggaaaaggccaccgaagccgatctttcccagctggattccggcctgatgccggaggccatggataaatattacggcatccgctaccccgcccccgccacgctgctggaccatctggacgcgccgctgttcattctggacgaggtgggcggcatccgggatgcccaaaaggccactgagttccgccgcagcgaggagctgaccggactgctggaagagggcgtgctctgccccgggctggatgtgctgtaccagaccatggacgatcttgtcattgccgcccagagcagcagtaccctgctgtgcgagaactttctgcgcgggatgaacgagttcaagctgaaagacctcatcaacgccgaggcctttgccgcccccaactggaacggcgaccttgcctccttgcgggaggacttagacccgctcatcgcccaaggctacgccgtcaccctgtttgccggtacacccaagggcgcagccgctttgacccgcgaccttgccgacaagggctatgccgtgagcatgagccgggatgtgcgccccgccaagggtattttacaggtactgcccgggcatctgactgccgggtgcaccttcccctttgcccacgcagcggtgctttccagccgccgtcacgggctggacgaggaagccgccgccgaagccaaaaagcgcaagaagaacaaaaacgccctgtccagtctttcagacatcaagcccggggactatgtggtgcaccagagccacggcatcgggatgtacgccggtatccagcggctggaggtgcagggcgctaccaaggactacctcaaggtgcagtattccggctcggatgtgctgtatgtgccggtgacccagctggatctgctcagccgctacaccgcccccggcgatgaggaaaaggtaaagctggcaaagctgggcggcaccgagtggcagcgcacccgcgccaaggtgaaaaaggccaccgaggagatggcgcaggagttgattgagctttacgcccgccgccgtcaggccacaggctatgccttcccgccggacggcgactggcagcgggactttgagacccgctttgactacgacgaaacggacgaccagctgcacgccaccgccgagatcaagcaggacatggaaaagggttaccccatggatcgtctgctctgcggcgatgtgggcgtgggcaagaccgaagtggcgctgcgcgccgccttcaagtgcatcatgggcggcaagcaatgcgccctgctggcacccaccaccctgctggcgtggcagcactacaacaccctgctctcccgcatggaggccttcccggtaaagatcgggatgctgtcccgcttccgcaccgccaagcagcagaaggagacgttgcgcggcttacaggccggcagcgtggatatcgtggtgggcacacaccggctgctgtccaaagatgtgaagttccacgacctcggccttgtcatcattgatgaggaacagcgctttggcgtgaagcacaaggaaaagctgaaggaaaacttcatcggggtggatatgctcaccctgtcggccacccccatcccccgcacattgaacatggccatgagcggcatccgggatctttccaccattgagcagccgcccatcgagcggcagccggtggagacctttgtgctggaatacaacgatgttatccttgccgaagccatgaagaaggagcttgcccggggcgggcaggtgtactacctgcacaaccgggtggacaacattgaagcctgcgccgcccatgtcagccagatggtgccgggtgcgcgggtgggcatcgcccacggcaagatgaccgaggaagagctgaaccccgtatggcagcacctgctgaacggcgagatcgacattctggtctgcaccaccctcattgagaccggcatcgatgtgcgcaactgcaacaccctcatcattgaggacgccgaccgcatgggtctggcgcagctgtaccagatccgtgggcgggtggggcgctccggccgcaaggcctacgcctacttcaccttccgccgggacaagaccctgaccgatatcgcccagaagcgactttctgccatccgggagttcaccgcttttggctccggcttccgcatcgccatgcgagatctgcagatccgcggcgcgggcagtctgctggggcacagccagcacggccacatggaagccgtgggctacgacctctacgttaaaatgctgggacaggccattgcccgggcgcggggcgagcccgtccagcgggacaagagcgattgtcttgtggacctgcgggtggacgccttcatcccggaaaagtatatcccggacggcgcgggccgcatcgaggcctacaagcgcattgccgccatccagaccccggaggacgccgccgatgtgctggacgagctcatcgaccgctacggcgacccgccgccctcggtgagcgatctggtcaacgtttcccttgtccgcgtacaggccgctgccgtaggcgtgtacgaggtgacccagaagaaggatacgctcgtgctgaatctggaaacgctggaccttgccatgatccgcggtctgctgcaagctttcaatggccgtgtcaccgccggggcgggcacaaagccctatctctcggtggtattacagccggacgaaaagccgctggaactgctgcaaaacatcctgaaagctatggcagatatcctgaccggcaccgaacgcgaaaaagctccccaaacagggggagctggcacgcgcaaacgtgactgagcgggttttataaaaacaaataaggagcaaaacgcatgaaaaagaaactgcttgcgctggtatgcgcacttgcactgaccgtcagccttgtgggctgtgtattctccaccccggacaccgtgggcaagatcggcgattttgaggtgaccagcggcctgtacctgctggcgcagtacgatgcctaccagcaggctgcgcagctggcggattctgagcaggacaccagcaaggtgaattccttcctcaaggccaccatcaccaccgatgccgacaccggcgagaccgccgtggtaaaggactatgtggcgcaaaagacccttgagaccttgcagacccttgccgctgtggatgcccgctttactgaactgggcggccagctgaccgaggagcagaagtccgccgccgacagctatgcccagcagctgatggataactacggcgatgcctacactgccaacggcatcgggctggaaactttgaagctgttccagcagctgcagtacaagcaggtcctgctgctggatctggtctacggcaaggacggcgagacccctgtggaggacggcgagctgaccgagcatctggacagcaccatgtacgagatcggttttatcaccgtgcccctgtacaacaccagcaccttcgcctttgccagcgatgaccagaaggccgagatgctctcccttgcccagaaggctgcggacagctacaacgccgccgccccggaggacgcctccagccagatggccgcctttaatagcatcgcaagcagcgcactgaccgatatttgcgccgtgctggatgcagaggttccctccaccagtaccctgcagaccgacctgctgagcgaaagcgacctgaccgacgcctttacgcaggagggtgccgccgataccctgcgcggccttgcctacgggcaggcagccgccatccagtacaccggctacgccataatgctggccgtccgtctggatccgctgagtgtttccacgctggatgctctgcgcagccagattttgagcgacatgaagggcgaggagctgaacgatgcccttgccgcctacggtgcccagctggacagcaccctgagcagctctgccatgggcaagctgcccgcttccaagatcgtaaacgccaccagcgccaacagctgataacagtataaaaatcgcaaaatggggtcggggaaaatcccgaccccattttttattatagaactacaaagcagacccagcaggctctttcggagccggtgccgggtctgctttgtatgttagaaagtcagggaatgccgccaaggaaacagagtcttagcgtacatcacttctcgttctcgtagctgaggacagcgtaggggtagaagatgttggcatccaagtagcctgcccagcggccgggcttgcgggtgtagtagccgatgggaatatcgccccggatgacgcccttgaccagaatgagcatatggcggaggtactccacgctgaaggggttcaggttctcccagtggcccgtcagcagctcgtagtccacatcctcgttccgcagcagcacctctgccatgaagtgctccagactcggcagataggtgtcggtggcagcttccatcatgaacaggtcgccagaaccaacggcgtcaccggtaaagatgtagtccttgtagaagaacaccacagagcccttggtgtggcccggcacgtccaccacttccagctcctcagagccgatgcggaccgtgtcaccatctacgatgttcaccagcttcaggtcctcggcggtgagaccgaagaatttctgcatgctggagatcaggtcctcccggtcatcggggtggatataggtgcggcggaccttgccggacttcagcagggaggggatgcccagaatgtggtcgccgtgcttgtgggtcagcaggatatccagctctgcgtcagggttggtcagcacgttttcccgcaggtaggcataaaggtctgctgcgccggagccgcccatggcggtgtcaatgaccagggcttccttgcccagatccagcacccacagggtgtccatgccaaagtccataacacgggtgatgttgtactttaccgggtagtgactgaacatcatgttggggtttagcttgccgtgctgggtccgggtgagggactgggtgaacatccagttatagggggtgccgatgctgtacacccgctcccagaccttgtggggctccggcatggaaccggcggtaaagccctcgtacttcacgcaggagcagccggcatccttcagggcctgcacagccttggcggtctcagcctcgggcatctcggggtcatccttgcagtggtaggcccagacaggggtgttcttgatggcctcaaatgcgccggggacgttgtaccactgggcaggcaccatgccgcacatggggatggcagcggcaaagtagtaggggtaggccaggatcatgttccagacaccggtaccgcccatggacataccctcgatgtagatacggtccgggtcgatgcggtgggcagccacatagctgtcgatagcagacttcaaggccgtaacggtgtccgggtcggtccagttcttgccggggcactggggtgcaaacaggtaggtggggttcttctggatcatttcgtcagaaatgtagaaggtggcaccgtcgttggcggtaagctgggtgccgttggggcccacaccgtcctcaccgtggaggaaaacgatcaggggcagcttccccttcagggcaggggcgtaacggcgagggttgtaggcatagtactccactccggcagcactgccggccttgaaacgcttggccagcgcattgcggtcggggctgtccaccttgaccagacagttctggtcggcgtcctgggcaaaggcgatgccactggtgcccagcacactggcaacagctgtaaaggcggcggtgctacgcataaagtcacgtctgctcagttccatggtcttttctccttttcttagtcgaaaaaatgaatacagtttgtgaatgccgtacggaaatccctcaccatatcagatgagagttgtcgttaatatattaatatatcagaaaagtactgtcaagaatgcgccgaaaactttggagaaggctctaagccgggctgtcggggtttgtcaaaaatgacgaagtccatcctgccaaaaaggggccgttgcaaaatagctctctgaaaaaatatgcacaaaacccggaaccttttcagggccaaaatggctcaaaaagggttccgggtctctgtttttgcactatttctttgtgctagttgctatcgcatttttattttgcaacagccccaaacataagaatatattttccgctgaagattgccagagtgcaacgacaacgaccgccgccagtggcggaaacagggaggagttgttggggcagcggccagcaagacgcaagtgccacccaaggcacgatgcggatgctgggtgccgcaacccgatagctgaggccatttccaatcgtcccgcgccaaaggcgttctattttactacccttgcaaactctgcggcaagggcagcgttcaccgaacggacggcgttggcgtccggcttgatggcggtgcggtcgtaggtgaacaggccgttcacctcatcctccacgtcggtcagctgggtgtacaccagcgccgaaagccccttttgcagctgcggcagcaccgtgcccagctgcaattttttgtagcgggcagtcagctcctcccggcttttggccgtgccgtagccgtaggtcttgcggggcggctcgtgccccggcatgggccatgcaataccgccatactcgctcagcgctacggcgcgcgtctgcgggcgcacccgcagggggtagaagtagttgtgcagggagtatacatccccgccgccctgatcgtaccagccgctggcctcgtccacaaggcgggtatcgtccagcgcgcggatggcttgcaccgccccggcggcatcgtactgtccccagccctcgttaaagggcacccagcagcccacgcaggggtggcagcgcagcgcctgcactgtatcttccagctcccggcggtattcggtgcggctgctctcgctgccccggctcagcagcccccacagcgccgccttgtccggcaggcggcgcataagcggctgcaaaacattggtcaggtaggtgacgaaccacaggttatacttgctgccgccgttgaccatatcctgccagaccacaagacccagcttgtcgcagtggtagtaccaacgctgcggctcgatctttgcgtgcttgcgcagaagattgtaacccagcgcctttacctcgctcagctcccgctccaccgccgcatccgagggcggggtgtacagtccctccggccagtagccctgatccagcagaccgttgagcaggatgggcttgtcgttcaggcaaaagcgcagcacaccccttgcgtccggtgtgcagctccacttgcgcagggcaaagtagctgtgcacggtgtcgaactgttcttcttctccctgcgtggtgcccacggtcaggtcgtacaaaaagggcgtgtccgggctccacgggaagaaatactccttcgcaatatgcagcgtcacctcaccgtcctggtcggcctcatcgctgccccagtcctcggcaatggtcacgcccccggcgcgcaccaccgcccacaggttcgccgcgccgccgggtgcagaggtatgggctttcacggtcacggtgcgggcatcatagtccggcgtaacggtgagagactggatgtaattttccggcacgcgctccagccagaccgtctgccagatgccgctctgggcgggatagaacatccccccgggctgcaaggtctgcttgccccgcgcctgtgtgccgtggccggtggggtcctgcaccgccacccacaggctgttgcggccggtgccgttaagctgcgcggtgatatccagcgtaaagggccagtagccgccccggtgaccgcccaccagatggccgttcacctgcacggcacaggcgtagtccactgcgccgaaatgcagcagcaccctgccgcccgtcccggcgggcggcgcaaaatatcggtggtagtgcagccactgcccgggctgcaatgtgcgccccaccccggaggcgtggcactccggcgcgtagggcactaagatctcgccatcccagcccgccgggcgctgtgccgaggcggtgatggcgtactgccacaggccgttcaggttctcgtagctgtcccggcgcatggccgggcggggatattccgtcagagggtgcatacactcaccagccttttttctcgtttgctccattctagcacagcccggggcatttgtataccattttcacgggagtaaaaaagagccgccgcacggcggcatggctgtgcggcggctttgtgagaaggtgggaaattgtttagttctcggccagattaccggtataaagctggtaatacttgccctttttggcgatcagctcgtcgtggctgccgcgctcgatgatgcggccctgctccagcaccacgatgcagtctgcattgcggacggtggacaggcggtgggcgatgacaaagctggtgcggccgtacatcaggccgtccatgccgcgctgcaccagcgcctcggtgcgggtatcgatggaggaggtcgcctcgtccagaatcagcaccggcgggtctgccacggctgcgcgggcaatggccagcagctggcgctgtccctgcgagaggttggcgccatcgccggtcagcatggtgttgtagccctccggcaggcgcttaataaagccatcggcgttggccagacgggcggcggcgatgcactcttcatcggtggcctccagccggccgtagcggatgttctccatcaccgtgccggtaaacaggtgggtgtcctgcagcacgatgcccagcgagcggcgcaggtcggcctttttgatcttgtggatgttgatgccgtcatagcggatcttgccgtcctgaatatcgtagaagcggttgatcaggttggtgatggtggtcttgcctgcaccagtggagccaacaaaagcgatcttctgccccggacggccgtacaggttgatgtcgtgcagcaccgttttttccggcacatagccaaagtctacgtccgtaaaggtgatgtcgcccgccagcttgtggtaggtggtagtgccatcgtggtgggggtgcttccacgcccacagaccggtgcgctcgttcgtttctaccagctggtcgttccggtcatacttggcgtttaccagcgtcacatagccctcgtcggtctcgctgggctcgtccatcatcttgaagatgcgctcggcaccggccagtgccatgatgacgctgttggcctgcatagacacctgactgatgggcatattgaagcccttgttcaggctgaggaaggccaccacggtgccaagggtcatgccgccaacgccgccaacggccatggctgcaccagtcagtgcgcagatggcgtagctgatgttgcccagctgggcgttgaccggcatcatgatgttggagaaggcgttggcctgcttggcgctttccttcagctggtcgttcaactcacggaagccggcaagggtctgctgttcgtgagtgaacaccttgaccaccttctggccctccatcatctcctcgatgtagccgttcaccttgcccagatcccgctgctgctggatgaaatacttggaggagctttttgcgatctgcttggagcagaacagcatcagcgccaccatgagcatggtaacgatggtcagctgccagctgagcatgcacatactgaagaacaccgacacaatcgtgatgacgctggacaccagctgcgggatgctctggctgagcatctggcgcagggtatccacatcgttggtgtacacggacatgatatcgccgtggggatgggtgtcaaaataccggatgggcaggctttccatgtgggtgaacagcttggtgcgcagattgcgcagcgtgccctgcgttacgttgaccatgatgcgggcgttggcccatgcggccagaatgcccacaaggtagatgcagcacatccgcaccagtgcaccggccagcggtgcaaagctggggttctgctggcgggtcatggggacgatgtaatcgtccatcaaagtctgcaagaacaggctggcctgcacattggccagcgcgctgaccacgatgcacacaagcacaaggatgcagtggggcagatagttgcggaacacctcatccatgatgcgcttcagcagcttgcccgggttttccaccttggggcgcggcccccgtgcgccccgcgggccggggccatgtacttcttttactgccattactgcgcacctccctgcttgtcaaaatcgccgccgccctgcgtctggctgttgtagacctcctgatagatggcattggtcgccagcagctctgcgtgggtgcccagaccgttgatctggccgttctccagcaccagaatgcggtctgcatcctgcaccgaggaaatgcgctgtgcaatgatgatcttggtcgtgccggggatctcctcccggaaggccttgcggatcttggcatcggtcgcggtatccacggcgctggtggagtcgtccaaaatcagcaccttgggcttgcgcagcagggcgcgggcgatggtcaggcgctgcttctggccgccggacacgttggagccgccctgctcgatccatgtattgtacttatccgggaagcgctggatgaactcatccgcgcaggccagctttgccatgcggatgcactcttcctcggtggcgttggcatcgccccagcgcaggttatccagaatggtgccgctgaacagcacgttcttctgcagcaccatggagacctcgcggcgcagaacatcaaggttataatcccgcacgtccacgccgcctacccgcacggtgccgctctcggcatcgtacaggcgggggatcagctgcaccagactggactttgcactgccggtgccgccgatgatgcccagcgtctcgccgggctgaatggtgaagctgatatcgttcagcaccggctggccgctgccgtgcttatacttgaaggtaacgtggtcaaactggatgctgccgtctgccacctgctgcaccggctgctttgccgggggcaggtcggtgtgctcgtccagcacctccacgatacgcttggcagaggcggcggacatagcgatcatgacaaaggccatgctcagcatcatcagtgccatgaggatgttcatgacatagccgaacagggcgttcagctggccggtggtaatggcaccgtgcagcacatattttgcgccgaaccagctcagcgcgatgttgcagccgtacaccgccaccagcatggcggggttattgaagctcaggcggctttccgcgttgacgaactgcttatacaggctctcgcaggcggcggtgtatttttcgttctcgaagccctcgcgcacaaagctcttgaccacgcggatggcagagacattctcctgcaccgaggcgttgaggttatcatagttcttgaacacccggtcaaagatgcggaaggtggggatcatgatggcagccagcaccaccaccagaaagaccaccgccaccacgaataccagcgacagcgggccgccgatgaccacagccatgaacatggcaaacaccagatgcaccggagcgcgcacgcacatgcgcaggatcatctggaaggcgttctgcacgttggtcacgtcggtggtcatgcgggtaacaagacccgctgtagagaatttgtcgatgttggaaaaagagtaatgctggatgttttcatacatggcatcgcgcagatttccggcaaagccggtggatgcctcggcggcatacttgcccgccagtacgcccagcaccagcgcaatggctgccaccagaaaggtaagcaggccgtagcggatgatggcgttcatatcgcccttttcaatgccctggtcgatgataaaggccatgatggtgggcagcagcacatccataatggcttccagcgcagcaaagagcggtgtcttgatcgaggcggctttatactcgcccagatgcgacacaagctttttgatcatctgagttccctcctgttgaatttatttgtttggtacaaaacaattttatacataacaatttaaatgtcaagacgtttcgtaaaatgttcataattgccaatttagcaagtcctttttcagcgctttgacggaaaaggtggttatttcaacgcctcccgcagcttgttcagcagccgcagcagttctgcgttctcctcctcggtcagcagtccggccacataatcgtcggtctggtggaaggaaagcagggtcttttcgtgccgttggatgccctccttggtcaaaaccagctgcttaagccgggcatcctgcggcacgctcagccgctggatgtagcccttgcgctccatcagctgcaaaatgttcgtcaccgtggagcgggtgatggaaaactcccgctcgatgtcccgctggaacaccggctcgtcccggtggcggtagagatactcgatgatccacccgtgcatgggggtggtctgctctaccccgttggcgcgggaaaactggttcagcctgcggaagatcaggttgtccacccggcgcagctgagcggggatgacctgcggcccatcccacggcgggtccagcttgcagtgctcttcaatagtgtgctgtgtacacataatggtttcctctattcaagttgttcgatgtgaaactgtttgatacgatacatatattactcatatccccgctcaatgtcaaggggcggagagcaaaaaaggccgctgcggaaaattttccgcagcagccttgatttttatggatacgggatacgcttacagctttttgccggtcagcagctcgtaggcctccagatacttggcaatggtcttgtcaatgacatcctgcggcaggtcgtagttgctgtcggggttggccttcagccagtcgcggacgaactgcttgtcgaaggagggctggctgtgacccggctcatagccctccagcggccagaagcgggaggagtccggggtcagcatctcgtcgcccagcaccacgttgccgtcctcgtccagaccaaactcgaacttggtgtcggcaatgatgatgccgcgggacagtgcatactcggcgcacttcttgtacagggcaatggtgtagtcgcgcagcttagtggcgtactccagaccgtggccggggaactgcttctccagcacgtcgatgctctgctcgtaggagatgttctcgtcgtggtcgccgatctctgccttggtggagggggtgtagatgggctcgggcagcttatcggactcctgcaggccctcgggcagctggatgccgcacaccttgccagtcttctggtagcttgcccagccgctgccggtaatgtagccgcgcacaatgcactcgatgggcagcatggtcagcttgcggcacatcatgctgttgccggtgaactggggctggcggaagaactccggcatatcctgcacatccacgctcagcatgtggttgggcagcagatcgcgggtgtaatcgaaccagaacttgctcatctgggtgagcacggtgccctttttggtgaccttgtttttcaggatgacgtcaaacgcagaaatgcggtcggtggcaaccatgatcaggctgtcgccattgtcgtagatctcgcggactttgccttctttgatgggtttgaactcagtcataatcaaacactccatttttccatgttctcagcagcgcagcagcgcagcgcagttcttaccctactattctaccatactgccgcgcggtttaaaaggaacagaataaaagaaaaacaggcaagttttgtgtttttatcgtgaaaagtgcgcaaaaagcagcaggaaatttcggcgttttgacgataaaagtcgtactttatccccaaatgcacgcacctttgcaaaatgcagtcatggacaagcgccgccagttgcggtatcatagtagtatgcgtatatctgcgctccgcaggggcgcaaaagtaaacaaggaggtaaagagtatgggcaaatttcccaagggctttttgtggggcggcgctaccgctgccaaccagtgcgagggtgcatggcaggcagacggcaagggtctggctacggtggatgtaacccccttcggcccggaccgttttccggtggcaacgggctatatggaaatgctgggctgcgatgacgcacatttctaccccagtcacgaggccattgacctgtatcaccattataaagaggacatcgccctgtttgcagagatgggcttcaagtgcttccggctgtccattgcatggacccgcatcctgcccaacggcgatgacgctcagcccaacgaggcaggactggccttctacgacagcatttttgacgagtgccataagtacggcattgagccgctggtcaccatctgccactttgacactcccattgccctcatcaaaaaatacggcggctggaaagaccgccgcatggtggacgcctatgtccactactgcgaggtgctgttcgaccgcttcaaaggcaaggtgaagtactggctcaccttcaacgagatcaatatgctgctgcacctgtcctttaccggcgcagggctggtattccaccccggcgagaatgtggagcaggtcaagtatcaggccgcccatcacgagctggtggccagcgcaaaggcggtaaagctggcgcacgaaaaaatgccggacgccatggtgggctgtatgctggcggcggggcagttctacccccgcacctgcgccccggaggatgtgcgggcggcgcaggaggccgaccgggacaactacttctttaccgacgtacaggtgcgcggcgcttaccccgtgtgggctaaaaagcggatggagcgcgccggggtgcagctgcacacacagccggaggacgaccgcacgctgcgggagggcacggtggattttgtgtccttcagctactattccagccgctgcatcacggtggataaggagctgatggcggcagagaatgcggaaggcaacgccgtgtctgcatcggtgaagaacccctacctgaaagtcagcgagtggggctgggccatcgacccggtgggtctacgggtgaccctgaacaccatctacgaccggtacgaaaagcccatgttcatcgtggagaacggtctgggtgcggtggataccgtagagccggacggctccatccacgacagctaccgcatcgactacctgcgggcgcacatcgaagagatggaaaaggccatcaacgaggacggtctgccgctgatgggctacaccacatggggtcccatcgaccttgtgagcgcctccaccggcgagatgaaaaagcggtacggctttatctatgtggacaaggacaacgacggcaacggcacccttgcccgcagccggaaggacagtttttactggtataaaaaggtcatcgcttcagacggcgaggacctgacctgagcaagcgccccggcactgtttgcggtatggcagcgccggggcgtaaaagtgtgaggaagaaccgataacggagaaaatttatgacaccacaaatcattgcacaccgcggtgcttcctatcttgcaccggaaaacaccctgactgcctttaaaaaagccatggagattggcgcggacggcgtagagatggacgtacagcagaccattgacgccgggcttgtgatccaccacgactatatgatcgatctgcacacggatatttccggcaagatctatgatatgaccatgggcgatttaaaggaactggattttggcagctggaaggacgccatctttcaggacgagaagatcgccaccctgcaggaggccatggaactgtgcaggcagatgccgggatgcaccgtgcatctggaactgaaatccaccatggacaacgacccggactttgtgccccgggtgctggaagtgctgcagcagaccgagatggtagaacaggtgatccttgtttccttcaaccacgcgctgctgcggcaggcaaagcagttgatgcccgaattgcgggtgggtgcactggtatacggcgagctggaaagcatgctgctgccgccgcccatcatctggaaggatcttggactgaccaacggcatagaggacatagaagccatggatgccgccctgccggagagcgcagcagacgaggaaaattgcagctggatgacccgatggatgaccgataaggtaagtatgctgcgggcaagctttcccggcgagagcctgaacgagatctacaaaaacctgttgtcgcagcgggatctgcccgcctacatccgcagtctggactttgcgccggagtgggtcagctgtgagtaccacaccgcctacaaaaacgccggtttcattgacaaactgcacgagatgggcatcaaggtgtctttgtggacagtggacacggaagattccgtccgcagcctgctgcgcaccagcgccgatgcctacatcaccaaccgccccgaccgcgtgcgggagtggatggaaaaggaacaggcggcgaccgccccgacagagtctgcccccactgctgaagcagacaccgggacagctgccgcagagtaaaccgaccggaacagacacaaaaaaagagataggctttcccgaaagggatcgcctatctctttttcattcattttattctgctgcgtcggtcagcacaaaggtcagctctgcggtgacggcgcacttgccgtccacccatgccgaggccttgcctacgcccacagcgccgtgctgctgtaccagctcgcagtggagggtgagcacgtccccgggggtgacctgcttgcggaagcgggcactcttgatgccgccgaacagcgcaagcttgcccttgttttccggcaggctcagcgctgccacagcgccggtctgtgccagtgcttccagcagcagtacgccgggcatgaccggctgtgccgggaagtggccgttgaagaattcctcgttgcgggtgacgcacttgcggccgatggcccactgccccggctcgtagtccagaacacggtccacgagggcaaaggggtagcggtggggcaggatctccgcgatctgtacactgctcagggtgttggcgttttcacgcacggtacggggctctgccatgggtcagccctcccatctgcgcagggcgatgcaggcgttgtggccgccaaagcccaggctgttgctcagcgcgtactgcatctcctgctgccgcccggtgttgggcacatagtccagatcgcactccgggtcaggctgggcgtagtggatggtgggcggggcgaactggtcccgcagcgccagcgcggtgaacacggcctcgatgccgcccgcgccgcccagcagatggccggtcatgctcttggtgctgaccacggtcatctcctttgcgtgtgcgccgaacacggcgtggatggcggcagtctcgcaggcatcgttcatgtgggtgccggtgccgtgggcgttgatgtgatccacctgctccggtgcgatgtcggcatccaccaaggtcagcttcatgcagtcgatggcacctgcgccgccgggagccggagcggtaaagtgataggcatcgcagttggcaccgtagcccaccacctcggcatagatgtgtgcgccgcgcgctcttgcgtgctccagttcttccagcaccagcacaccgctgccctcacccatgacaaagccgccgcggcgggcgtcaaagggcaggctggcagcgtccgggtcggtggcggtggaaagtgccttcatgctggtaaagccgccgatgcccaaggggctgatgcagctttccgcgccgccgcagaccatcaccggctcgtagccgtcccggatgcggtggaaggcgtcgcctacggcgttggtgccgccggcgcaggccgtgaccgggcaggtgcacatgcccttcagaccgaagcggatggccacctgcgccgctgccatgttggcaatggccatgggcacaaagtaggggcttaccttctccatgcccttttcctcgccgcgggcgtgctgctcctcgatcgtgggcagaccgccgatgccgctggacaggatgacaccgatgtccttgccctcggcctcggtatcaaggccgctgtctgcaatggcttcggcggcagcgcccagtgccagcagggtgaagcgcgccattttgcggacttcctttttgtccaccacggtctctgggtcaaaatcctttacctcaccggccagcttgcacttgaagtcggtggtgtcgaactgggtgatggggccgatgccgcatttaccggcacgggctgctgcccagctgtccgccacattgttgcccagcgggttcaccgtgccaaggccggtgatcacaactctgcgtttttccataagggttctcctttacatagccatgccgccgtccacacagagcacctgcccagtgagatagctgctttgttctgcggcaaaaaacgccactgcctgcgccacatcctccggctggcctgcgcggcctgcggggatgccctgcgtcatgccggtgcgcactgcctccggcagcacggcagtcatgtcggtgtcgataaatccgggtgctaccgcgttcacggtcacgttccgcgcggccagctcccgggcaaggctcttggtcaggccgatgagccccgccttgctggcggcgtagttggtctgcccggcgttgccccgcagcgccaccacgctggaaaggttcacgatgcggccatagcgctggcgcaccatgcggcgggcggcctccttgcagcagagaaaggcgcttttcaggttggtgtccagcaccgcgtcaaaatcctgctcggtcaggcgcaaaatcaggttgtcccgggtgatgcccgcgttgttcaccagcacatccacccggccaaaggcctcggcagcggcatcgaacagcgccttgcagccctcggcggtggatacatccgcctgcacggtcaccgcctgcacgccctcggcgcggcagagcgctgccgtctgctccgcaggctctgcgccgtggcagtaattcaccaccacattgcagccctgctttgccagtgccacgcacactgcgcggccaatgccccggctgccgccggtaacaatggcggcgcgggtcaacttttcttcgctcattctgcttccttccatgcggtcagcaccgcatccagctgttccggggtctccactgcggtgcagaccaccccgggcagggtctttttcacaaaaccgctcagggcattgccggggccgacttccagaatgtggtccacgcccagctcgcccagacggcgcagggtatcttccatgtagacgctgctctgcacctgctttaccagcagctgcgggatgctgtcggtctcggccttttcatgccccagacagttgaacagcaccggcgtctccatggtgccgaagttttcgcccgcaaagcgctgtgccagtgcatcccctgcgggagccatcagctttgtgtggaaggggccgctgaccttcagcgggatacagcggcgggcaccggcttcctttgccagcgcggcggcctgctccacagcggccttttcgccgccgatgaccagctgccccgggcagttgtagttgcagatctgcacacagcctgcctcagctgcctgttcgcagcaggcggacagtttttctctgtccagccccagcacggcggtcataccgcagtcaaggccctttgcagcctcggccatggccttgccccggaaggcggtcagctcgatggcctgctttgcggtgaacaccccggctgcctgcagcgcggagtattcgcccagcgaaagccctgccagataggcgggcttcacgcccttttcggccagcacggcggtcacgccgcaggcaaaggccaccatgcagggctgggtgtattcggtctggttcaaaacgccgtccgggtcctcaaagcagacgcggtgcaggtcaaaatccagcgctgcgctgtcaaaggccgcccggaaggcgggagatgcttcgtaaaattccttgcccatgccggggtgctgtgcaccctgaccggcgtaaagtacggcaagcttcataaattctgcctccattcggtcacaagttcgtccatcagctcgcgcacggtgcgcatccggtcaagccgacccacgttttcgccgcagaagaagagaccttcctccacgttgcccttcaccgcctcgatgagggcgtgggtgatgcagtagggcacagcggcggggtcgcaggtcttgagacaccgggcgcagtgcttgggcgggaagcgcttgccctcggccagcgcctgcaccagcggggtgttcagcgcgcggccgggcattcccaccgggctgtggatgatgcgcacatcctccggctttgccgccagcagcacgtccttgtaggtctgggaagcgtcgcactcgtaggtggggataaagcgggtagcaagctgcacacccgcagcgccaagctttgtaaagtgtgccatgtcggcaccggtgtacacgccgcccgccacaaataccgggatggcgtggccgtattgttcctcgtaaggctttacctcggccagcaccccgggcagaatctcgtccaaagtctggcagcggtcggccagcaggtcctcctcggcaaagccgagatgcccgcccgccttgcagccctcgatgaccacaaaatcggcggtacggtcaaagccctttgcccagcggcgcaggatgagctttgccgcccgggcgctggatacgatgggcgcaatggctacctctttggtgcccacaatgcccggcagctccagcggcagacccgcaccggagaccacggcatccacccccgccgccacggcggtgcggatagcctcgacatagtcccgggtggctaccatggcgttgatggccaccagacccatgcccccggcaatggccttggctttttgaatttctgcggtcagggcacggtggtttgctgccgccgggtcacgggcaaaatccggctcgcggtagcctgcatcggcggtggagatgcaccccatgccgccgcaggctgctaccgcaccggccagcccgcccagcgagacgcctacgcccatgccgccctgcaaaatgggtacttgcaggggcttgccgccaagggtcagcattcggtgttcagcgcggcgatgcgctgcctcccgccctgccacaggtcggcaaggatgtccgccacggggcgcacctcgtgcagcattccggctacctgaccggccatcaggctgccgcttaccgtgtcgccctcaaagacggcacggcgcaggctgcccagcgtgtatttttccagttccatcttatccgcgcccgccttttcctgacggacatactcccggctcatgcggtttttcagcacacgcaccggtgcacccacggtgcgtccggtgacgatggtgtcactgtccccggctttgagcagcgcggccttgtagttggggtgaatggggcactcctcgcttgccagcaggcaggtgcccacctgcacaccgcaggcgcccagtgccagcgcagccgccagctgacggccatcggcaatgccgcctgcggcgatgaccggcacgctgaccgcgtccaccacctgcggcaccagtgccatggtggtcatctcgcccacatggccgccgctctcggtgccctcggcaatgacggcgtcaatgcccagcggctccaaatgccgtgccagcacggcagcagccaccaccgggatcaccttgataccggcagctttccacatggaaacgtattttcccgggttgcctgcgccggtggtgaccacggcgactttttcctccaccacgatctgggcaaactcatctgcctgcgggtgcatgagcatgatgtttacaccaaagggcttgtcggtcagctcccggcagcggcggatgttctggcgcagggtatcggcattcatgccgcccgcaccgatgatgcccagtgcaccggcgttggagcaggcggcggcaaactcgccggtggcaatgttggccatgccgccctgaatgatggggtatttcgtccccaggatctcgtttaaaagtttcatggtctttatcctttatattccacgatcatgccgccccatgtcaggccgccgccgaagccgatgcaggcaagggtctgaccggggagcagctggccgctttcagccagctcgttcagcgccaccgggatgctggcagcactggtgttgccgtggcggtccatgtttttgtagaactttgcaccatcggcgtgcagcgccttgacgcagtggtcgatgatgcggctgttggcctgatgacagaccacccagtccagattgtccagcgtaaggccggtctcgtccagcacggtgtgcaggcatttgggcagggcatccactgcaaaacggaacactgccctgccgtccatgctgatgggtgccgagcctgcgcggctggggccgccggcatggatggcggcatcgccccgggcacccagcgtgatggcaaagggcgcggaggtgtcggtcagttcaaacactgccgcaccggcaccatcgccaaacagcacacaggtggagcggtcggcggggtccatcagacgggaaagtgcttccgtgccgatgaccagcgcgtaccgcccgcccagcgtagccagcaggccgcgcgccaccgccgttccatacaaaaagccggagcaggcggcgtttacatccagtgcggggcggttttccggcagtgccagcgccgcctgcacctgacaggccacgcttggggtggcgtccggtgcggaaagggtggcgcagacgcagcaggcaatgtctgccggagcaagaccgctgcgctgcagcgcctgctttgcggcagcaatggccagtgtagcggcgttttcgccctcggtgcagtagtgccgggtgcggatgccggtgcgggtggtgatccactcgtcgctggtatccacggtgcggctcagctcttcgttggtgaccgtgcggccgggcaaagccccgccggtggcgatcagacgcaaacccttcatgctttcctcatttctccgatctgacggaatttctggtagcgctgctcggccagctgacggccgttcatgcgggcaaggctgcgcagctgccgctgcagtgcctcgtccagattgccgaacagtaccccgtgggcgcgctgtgcgccgcccaccggctccgggatgatctcctccacgatgccgtccttgtacagatcctgtgcggtcagcttcatgatctcgcaggcttcgccgctgcgggaggaatccttccacaggatgctggcaaagccttcggggctcagcaccgagtagacggcgttttccagcatgaggatgcggtttgccacacccagcgccagcgcgccgccggaagagccttcgccggtgaccactgcgatcaccggcacagtcaggccgctcatctccatcaggttgcgggcgatggcctcgccctgtccgcgctcctcggcgtccttgccggggtatgcgcccggcgtgtcgatgaaggtgatgatgggacggtcaaatttttccgcctgcttcatcaggcgcagggccttgcggtagccctccggcccgggcataccgaagttgcagcgcaggttttcctccagcgtgctgcccttgcggtggccgatgaccgtgaccggttggccgtggaacagcgccacaccgcccagaatggcggcatcttccttgcactgacggtcgccgcactgctcaaagaagtcggtgaacagtgcatccacgatctcgtcgatgtgggggcgctccgggtggcgtgccagaaagaccctgtcctctgcggtcagtgccccgcagccggacagcaaagcgtcctcctgcgcggaaagctctgccagctcggcagcgtggttggtgatatcggtcatgttctcgtccgccgggtcgccgcgcagggcggcgatcttttcatccagcggtgcgagctgttgtaagatgtccttgatcataaggcgcttcctcctcaggcgtgcagacgcagcagctgcgccagtgtttcgcgcatttcggtacggggcactaccttgtccacaaagccgtgctcgtattggaactcgctgcgctggaagcctgcgggcagcttttcgccgatggtctgttcaatgacccggggccccgcaaagccgatcagcgccccgggctctgccagcataatatcgccaaggctggcaaagctggcagtcacgccgccggtggtggggtgggtcagcacgctgatgtatagcccgccccgggcggagaaccgctcgatggcggcagaggtctttgccatctgcatcaggctgaaaatgccctcctgcatccgggcgccgccgctggccgagaagatgatcagcggcaggtgctttgcggtggcgtgctccacggcgcgggtgatcttttcgcccacagtggtgctcatgctgcccataaagaaccggctgtccagcactgccactaccaccggggtgccctcgatgcgccccgtggcggtgatgacagcttccttcaagccggtcttgcctgtctgtgcttccagcttttccgggtagccgggaaactgcagcacatcctgcggggcaaggtcggcatccagttcccggaagctgcccttatcaaggatgaggctcaggcggtagtacccgccgatgggcaggtgcaccccgcagttggggcagacgtactgcgccttgttccagatctggcgggtggcgcggcgtccgcactttttgcattccacgaactgcgggtcgttccacacggcacccgcatcccgccgggccttcagctggaaggtgcgctcccgcatgctgcccggcagcaggtctttgatactgttcatctcgtttcgcctcggtcagcctcagacatgggcattgatgtagttgaagatatcgcccacggtcttgaggtttgccagctcctcatcggggatggacacgccgcaggcctcttccagtgccatgttcagctccacagcgtctaggctgtcggcctccagatcctcggtcaggctggcctccatggtcaccttgtcctcatcgcagctcagggtatcgacaacgatcttcttcatttcctcgaaagtcatggtagtattctcctttatgtttactgtttgtgtttaattatttacctaaaatttatgaggtatcgaacacgaccattataatcaaaccgttggataagtcaatggttttagttaaatatttttatcttttacatttctgtcacagtttgcttcctctttatataggggctcccacagacgcaaaaaagccgctgcacagtactttgtgcagcggcctttcccgcaataataatatttcttattccagtccgatctgctgggcgtattcttccagcagttcccgctcaaggaagggggtcttgacgccctcgcggtcgcggtaggtctcgtgtcccttgccgatgacggcgatcaggtcgccctcctgtgcgtgatccactgcgtagtgcagcgcgtccagacggtcggggatttccacgaactttgcgtccgggttgcccttgttcatgccctcgcggatatccgcaataatgtcctctaccttttcaaagcggttgttgtcctcggtgaggatggagaaatcggccatcttggcgcagatctcgcccatgccgtagcggcgcagcttggagcggttgccgccgcagccaaacaccaccaccagacggtggggcttgtaggcgcgcagggtggtaagcaggctctcggtggatacctcgttgtgggcatagtccagcaggatggtgaactttttgctgatgggcaccagctccacacggcccttcaccacgcacttgcccagaccatcgtggatggcggcatccggcagacccagcaccttgcccacggccagcgctgccagcgcgttgtacacgctgaactcgccgggcatattcaccttgacgtccatctcgtccttgccggtaacgtggaaggcaacgcccagaaaatcgtgggtgcgcagcagctcgtagccggtctcgcggtagtcggccttttcatcgcggccataggtgaccagcttgcaggtatggccttccagcagggcggcggtgttctcgtcgtcaatgttcaccacacccacgtcgcagcgcttgaacagctgtcccttccagctgcggtactcctcaaaggtcttgtgctcgccggggccgatgtgatccggcgaaaggttggtgaacacacccacatcgtagtgcacgcccgccacgcggtccatcatcaggccctgactggatacctccatcagcgcggtatcgcagccggcatccagaaactcccggaaggtcttttgcagctcgtagctttccggggtggtgttggcggtgtccttgtggcgtcccatatagtagatgccgttggtgccgatcatgcccaccttgcggcctgcggcctccagcacgcttttgatcatgtgggtggtagtggtcttgcccttggtgccggtgacgccgatcatggtcatctggcgggcagggttgccgaagaggttggcgctcatcaacgccatggcatagcggctgctctccaccttgaccacggtcaccccgggcagggtagaaaggtcgatatcgtgctggatgaccagcgcgctgattcccttggcggcgcagtcagcggcaaacgcgtggctgtcccgttgggtgcccacgatacacacgaacaaaagccccggggcagccttgcggctgtcgtagatgatatctgcgatctcagtatccagactgccctgcacaagggtaaagggcacgccttccatcagttgttccagcttcatacagtctcctccaaagagcttctttacatggggttttcttcttcgttggccgtcatgcggtcagggtgggtcaggggcagctgctcggtgtccgtttcagccgccggttcggtggtgtcggcagtatccgtgctttctgcactgtcggtgctgtcggcggtgtcctctgccggggcgggttcctcagccttgggcggcaccacatagccggagggcagggtgggctcgccctgtgcaaaatagatcttgcgtgtgctgctggcgctggtatggctgaaatccagccgcccggtgtcggtggggccgcagcccttgccgtcggcgttggtcagtacatagcgggcgcgatccagcttataatccagatcgttcagcgtgcccagcagcacgctgatgcgatcctgatacaaaaatgcgagctgctcggtgtctgccacttccagccgtgtcacgtcctgcgacaggccgtattcctccagcttgctgcgcagtgtgcgcagcgcttccatacggtcgttctctgtgctcaccgtgctttcactctcggcggtttccgacccggaggcgcttgccgcgtccgcatcgtccacgaaccagaagccctgtcccggggtggtatcctgcagcttgccgccgtacagggtgcaaagtccctcaggctgggtgctttcctcggacaaaatcttccatttgtccgagatcacaagccacttgctgccgttttgcaccgcgtaggcgggcacggcctcggtcacctgcaccaccacggtgttggggtagtcccggatcaccttgatggagcccagcagcgggaagttctgctccagcaccgcggccttttcgccgggctcaaagctgaagatgttttcctccagctgcacgcccatccgctgcaaaatgctgtctgcggagtagcccgcgatctcggtcacctgcttgccgtccggggtctgcacctgaatggagttgatgcggaacagcatggtcatggtcaggtagatgcccgcgccaatgacgcacagcagcatggcaaaggcggtcagacggcgtagtatccgtcgacggcgcagcgtggcgcgggtcaccttgcgctttttgcgcatttcccgccgggcagggctttgctgcggggcgctttggctgcctgccgggtgctgccggttcgggcggttttgcgcgttctggtttttccggctgctctgcccgctgcgggcattgtttgccgggcggcgctgcttgccgccggactttgcgttttttggtctgctgcccgccgggcggttaccggcggggtactgggtggtattgctcccctgcccctgcgccgggcggcggggctgggattgggtggggaactggatgctgttatctgcccgggaggagcgcacactgccgttggcgctgcgggagggcgggcggctgagcggctcgccgttgtagccgtagcggctgttgccggtgctccggggtgtattatgattctgcgaaggcgcagaggtgcgcgccacatcccggttcaggtcatagggtctcgggttccggggtctgccgttgcggtcacggttctgctgcatcgttcgcaccttctttcctgtttattccggggctgcatcacggggtctttaccagcttgagcagcgccgcagtgatgcggtccagactgtcgtccacagacaggctgcgggcgtttttgcccatctcggccagcttgccgggctgtgccagcatggcagaaacagtctgcaccagcttttcaccggtcaggtctttttcttcaatgaccacagccgccccggccttctgcagttccatggcgttgtagtactggtggttctccgctacgttggggctggggatcagcacagcggcgcgtcccacagcctccagttcggccagcgtcagcgcaccggcgcggctgataacgaggtctgccgcagccagcagctccggcatattgttgatgtattcctttaccacaaggctgtcgccgggggcaaaatccttctgcttttgcagctgctcaaacagctgcacgccgtactggccggtggcgtgcaggtgcagcaccggcttgtgctcgtgctgctcccaagcgcacaggtctgccaccacctcgttgacccggcgtgcgcccaagctgccgccgaaggacaggatgaccgtgcggtcgcccgcacccagctgtgcgcggatggcctcgcggttggcggcctgtgcaaacacctccggccgcacggggttgcccaccacaagggtcttgtccggtgcgcccagcttttccacggcggcgggcacggcggcaaacacgatatccacatccggagccagcagcttattggtcacaccggggaaggcattctgctcgtgcagggcggtgtggatgcccattttggcggcgcagcgcaccaccgggccggacacatagccgccgcagccgatgacgagatctggctttacttccttcatcatggccttggccttggggccggaaagcgccagattccacagggtaatgatgttgcgcttgatgttgtgcaggctgagcttgcgttgaaaaccggtgatctcgatgtggtggaaggggtagcccgcctgtgtgaccagacggtactccatgccctccttacggcctgcaaagtggatctcggcggtagggtcggcctttttcagagcaccggcaatggccagtgcaggattgatatgtccggcagtgccgccggctgcgatgagaacacgcatggtgattcctccttataaacgcccggcctgcggccgggcgggcttgcggtttgttttactgttctgtacgggctgcgcgggcagaggccagatcaatggtcttgcgtgcaagttctgcttcccgctcggcgcgggcggcctcccgctgggcacgcatctgctcccgctgctgcgccgcccgctcgccgttgcggccaatgttcaccattacgcccatctctgccagcagcaggatcaggctggtaccgccggaggagaagaagggcaggctgatgccggtgttgggcagggtattggtgaccacggcgatgttgcagaacacctgccacgcgatctgcgccatgatgccgatgcctaccatggtgcagtacagattttccgctttataggcgatgagcagcccctgcacgatgaacagcacgaacagcacgatgatgagcaccgcaccaatgaagcccagttcctcgcacaccacgctgaaaatgaagtcgttggtgctttccggcagccagagctgcttttccacactgttgcccagccccagtcccttcagcccgccggagccgatggcgtaaaggctctgcacggtctggtcggtcatcttgctcagatcctgcgtccagccgtccagacgcttttgcaggtaggggatagaatccacatgggagagcagggtctccagcagggtgcccgccgtgatggcacccgcccatgtcagcacaccgccgctgccggacagcagcaggatggtgcccaccaccgccaccgtcagcacgatgccggacatgtgcggctccagcgccagcaggataaccaccggtataaggggcagcaccggcaccaccagctgcttccatacccgcacccgcagccactcccggggggtaagcaggatgcggcgctccgggtccagccgctccacctgcggcgctttggccgcaagatgggaactgaacaggatcatctcaaactttgctacctccgaggattgcagcgtaagcccgccgaagcggatccagcggcggcagccgttcaggggtgccatggtcagggtgacggccagcatggccagcacgatgatgtagcccggcaccaccatcttgcgcaaaaagcggtggtccacatagctcataaggaacatacagcccagcccgagcatcatacacagcgcctgctgtttgatgtagtggaagctgtcgcccatacgcaggtaaccggtggtgtagctggcgctgaacagcatcaccagcccaaagattataataacagccagcgtagccagccagtcgatcagcagccgggaccacgggcccgggtctcgctggaacaccgacaccggcgctctgtgttttttgcggatagtcgccatctgcgctcccttccctctctgtgcccggtcagcaccagcgcagcagcgccagcgccagcacatagccgacagcgctcagcgcaaagctgcacagaaacaccgtttccgggctcattttatgcttttttacccagcagcgcaagggcttgccggtgcgctttgcacacagcagctgcgctgccaaaagaccgcccgccgcccagaagggcagcgccagtggcacagtcaggctggtcatgtccagactgagcgggatgcagccgatggcacccgctgccagcaggctgccgcagcagcccgcacccagccttgccgggggaaatgcccatagccccagtgccaccagtgccccggcaagcgcggcgggcagcaccgccagcccggaaacgcccagaccggcttctaccatcatcaacgccagcatggccacaaaggccgcaccgcacaccgcgccctcgtcccgctcggcaatgcgggcgcactcggccagtgccaccatgagcaccgcccacaaaaagggcacggcgctgcccagcagcacataccccgccccgggcacgcccagcccccggggcagacagcccgctgcccgcagcagcaaaaggacgaaggccgcagccagtgcttccagcaaaagccgcacgtcccgccgcagccccagcgccgccgggctgcgcatccgggcaacatcttctgcaagacccactgccccaaaggcaaggcttccggccagcgccgtgagcagccgtgtcatcaaccggccctcgctgcccaacagctccggctgacccacgcaggcggcaagccagcccacacccaccgcagccaccgtgcccgccgccgcacacagcccgccccacagcggggcgcgcagaggtgcaggccggggctgctcagactgtaccggctgctgttgttgttcgcggcgttccaacacccgccgcagcggcacaaacaggctgcacaaagctgccgtaagggcaaagcccagcaccaccgccgctgccaaggcgaaacgctccatagatcagacactccatttcgccaaatagttatacttccgcttctttatgctctgcgtagaagatatccagcactttttccagtgccatgccgtggctggcctttaccagaatggcatcgccgggctgcacccggtccagcagggcatcggcggcctcgcggtaattttctgcgtgcagggtctctacccccttggcggcagccaccacggcggtgcgcttggcctgctcgccgtaggtgatcaggcaatacagcccgctctcggcggcaagacgtcccagctcctcatgtgcttcgcggctcagatcgcccagctccagcatatcgcccagcagggcaaaacggcgcttgcaggggaaatccttgaacatcgccagcgcggccttcatgctgtccgggtttgcgttgtagcagtcctcgatgacggtcacgccctcgctgtccaccaccttctggcggcggccggtctgctcaaagttggaaagaccccggatgaccctcttggcgtcgcagcccagacgggtggcggcgcagtaggcagccaaggcgtttgccacattgtggcgtcccatggcggggatgttcaccacaaaggtgccgtgctcctgatcctccagcacaaaactcatgccgtcagtctcctgccggatggacagggcgcagacgtctgcgttttcatcgctcaggctgaaccacaccgggcgcacatgggcggggagcactgccttgcgcaggaaggggtcgtcgtagttcagcaccagcggtgcgccctccggcagaccgttgcagatctccagctttgccttgcagatgttctcctgactgcccagattgccgatatgagacacgccgatgcaggtgatgatgcccacatccggccgtgctgcccgcgccagacggtcgatctcgccggcgtggctcatgcccatctcgatgaccgcgtactcggtgctgctttccagccgcatcagggtgcggggcatgcccagctcattgttctggttgccctcggtcttgatggtctcgccaaagccgctcagggcggcgtaggtcatctgcttggtggtggttttgcccacgctgccggtcacgcccaccatcttggggtggtactggctgcggtagtttgcgcccatcaccatcatggcgtggtagctgtccgggcaaaggatggccttttcttccggcacaccgggcacgggatggttgaccaccacatactccgcgccctgctccagcgcacgggcggcgaaatcatggccgtcgaaccgctcgccggggaaggccacaaaaatgcagccgggttttacctcgcggctgtcggtggtgaccagtgccacctccgggtcactggtcagttttccggcaggcaccagccctgccagaagcttgcttgcatggatcttttccattgttctatcccctctcgttctattgaatgctgcatcctcatccgtcaccgccttgcggcagtgctttatgctgaaagctctggtcgaagatgccggaaaagctgttttacccacaggtcagggtgatgatggtgccgcgctgcacgctggagccgggctcggcgctttgcgcctgcaccgtgccgctgccctccaccacacagttcagcccggcggcgctcagcatctggcgggcaaagtccgggctcttgccggtcacatccggcacctcggtgcggctgccctcgtaggtatcggtatacaggtagatggtggtgccgtagggcacctttgcgcccgcgtgggggtactggtaggtgaccggggcagcagactggctgctctggctctcctgcagctgatgcttcaggccctgaatgttcaggctcacctgtgcgttgctccactcggtgcccacaaggttcggcaccgtaacgatggtaccgctgcggtcctcgccgtcggtggcgatacccagatagggagccacctcactgatgatattgcccgccacaggggctgcaaggatggaggaatagtccgtccgggcgttgttggggtcgtccagcatgacgtagacgaggatctccgggtcgttggcgggcagcactgccacgaaggaagccacctttttatagtcgccgtcggcgcggcggtgcatattcagctgctcggaagtaccggacttgccgccgatgcggtagccggacacataggcgtttttgccgccgccggtgccgttgcctacctcgttctccatcatctcccggatgacctcgctggcgctctgactgatgacctgacggcgtacgtttgcgccgatctcctgaatgacgttgccgttagaatcggtgatcttatccaccacatggggggtgaccagatacccgccgttgacggtggccgcaatggcggtgcacatctgcagcggggtgatggccatggcctgaccgaaggaggaggaagccagctgcacctcgcccagctggtcggcgcggtagtactgcataaagttggtctcgctgggcaggtccaccccggtgcgggcggtaaaaccgaaggcatcgaagtagttatagaactgctgcgagccgacacgctgccccagctggatgtagtagatgttgcagctcttgcgcagcgcctcggccatattaagcaggccgtgcgccttgcgtccggcgcagtggtaggtctccttggcaacaccgtaagcgccggagcaggtaaaggtggtgttcatggtcgccacgccggagtcgatgcccatggcagaggtgatgaccttgaacacagagccggggtagtacagctcggtgatggtcttgtttttccacagaatatcccggtagtagccggaatagtccgcttcctcgtccaagatcttgttgccctgttcatcggtgatgtagttgccgtcggcgtcctttttatagacgccgtaaagctccggctctgcgtgcaccagctcgttgaggtaggcctcgttggcggtgtagttcagcgggtcgttggggtcaaagtccggcttggaagccatggcaaggatagcaccggtcttgacgttcatcacaatggcgcagccgcggttttccaccgtattggctgcaatggcttcgttcaggtaccgctccgcgatctcctgcacattcacatccagcgacagcaccagattggagccgtccttggcggcaaaggtggtagcgttggcgtctgcaatggcgttgcccaccgcgttgcgctgggtgatggtgcgaccgtccacaccagccaaggtggactggtaggatttttccagtccgtaggtgccgacgccgtccgcatccgtaaagcccagcaccgctgcggcaaaggcaccgtaggggtagttgcgctggaagctcttttccgaggacaccgaaatgcgccccttgcgggaggtgtctgtagcctttttgtgcgccttgttgaagctggtgacgtatttttcaatggaaagcttcaccgcgttgttcaccttggtggcaagggtgacgtaggcagaatccagccgggaaagtgcatcgtagacggtctggtactgctgctggtactctgccgaggaagtgtccacgctgtccaagctttcgccgtccccggagagcagacgcaacgtcagctctcggctcacctcggcgcacatggcggggtccagcgttttggtcacggtgtcgtcatcgttggtcttgctggtataaaggatgctgctgtaactggggtctgcccagatggtccacaccacgctggtggaagcaagggtgatgccggaagcatcgtagatctcgccgcgggtggccttgatggtggtatccagcagctgctgctgggcagcgtactggcggtactctgccccgtggacgatctggatattatacaggctgcggatgacgatggcggctgccaccaccaccgcaaggatgcccagacggctgcaaatccgtcgcacccggctgtccagccgatcccgtccagaagccggacgcaggcggtagcccctgctttttttgttacggaaaggttcttgcattggttctctcctgcggggcgtgcactgcattccgcacgccctgcgctgttatttgttcagactgcggtgtccataaaccgaaaaaagcgtgcgccgccgcacgcttttttcgtttatctcacggtgcccagaatgttcaccgcaccggtgtacaaaaagtcggtccattgccgcacggtggactctcggcgcaccagtgcgccgctctcgcccaggcggatgtaggtgatctggctggggtctaccttcatcagacccagccgccctgcggtctcctccacgctggcaatgttggtcttgctgttcagggtgctgttgtagtaggtatactggctctgctcgctgaccagctgcgcttttgtggcctggatctggtcgttcagctccaccagctgtgcctcgctccacagcaggctgatggcaaagcccaccagcagtgctgccgccaccagattcatggcgttatgtacggcggcctgcagcgggttcaaccgccgcttgccgccctttgctacccgcaggtttgctttgcgctgcggctgcggtgccctgcggcggcgcgccgcgttacgatcgtatgctggctgacccatgattcctctcctcctcacgatgccggtgcttccggcatctcagcatttttccagtacacgcaggtgggcagaacggctgcgccggttctcctccagttcctgcgtgtcagcttcaatgggtttacgggtgataagctttgcctttgccttgccgccgcatacacacaccggaaactccggcgggcaggtgcaggccgtggaccagcggcggaacttattcttgaccagccggtcctccagagagtggaaggtgatcacgcacaaccggccgcccggtgcaaggtgatcgaaaatggtatccaagccctcttccagcgcatccagttcatggttcactgcaatgcgcagtgcctgaaaggtgcggcgggaggggttcttgtttttgcggcgctctgccgggggcatcgcgcttgctacggtatctgccagctgcagggtggtcaggatgggagcagtttcccgcgtctccacgatctttcctgcgatctgccatgcgtagggttcctcgccgtagtctcgcaggatacgggcaagctcctcgcggctttcggtgttcacaaggtctgcggcggtctcaccctgctggctcatgcgcatatccagcggtgcgtctgcccggtaggaaaagccccgggcggcatcgtccagctggtggctggaaacgccaagatccagcagtgcaccgttgatcttttcaatgcccagctgctccagcgcctgccccgcatagcggaaattgatctgcaccacggtggcaggcagcccggcaagacgcgcccgcgcggtctgcaccgcgtccggatcctgatccagcgagatgagtctgccgcccttggcggcatccagccgcaaagcgatctggcgggaatgtcccgcgccgccggcggtgccgtccagataggtgcccgccgggtcgatggcaagccctgtcaggcactcgttcagcaaaacggggatatgctcaaacgaggccgggtcaaagggctgctgttcttcaaaggccattggcacggtctcctttctcggtttaattttttgcatcagaggtgcagcttgcgcagctgctcggcgcgctggtcgttggtcacggcggcgcggcgggcgttccagacctcggtggcccagatctcggcgtggttgcggttgccgatgatggtcacgtccttttccagcccggcgtaggcgcgcagctctgcgggcagcaggatgcgtccctgcttgtccggcaccacctcgcaggcggtgctgaacagatcgccggagatggcccagctgtccatcagctcatcgctttccagcttgtccgccagccgctggacttcctccatgggcagtgcgaacaggcagttgtccacccattccagcaccacaaagctctcgcccatggcgtcgcggaattttgcggggaagttcagccgccccttggcatcgatggtgtaatcataacggccaaaaaacacgcgctgctccccctttcaggggcgttttcagggtgtatgccctacttttacccactttgccccactgatacatctttattgtagcaaatcaagcctgtgaatgcaagggttttcgggcggctttttgccgcaaaaatccacaaaaaaagtccctgtgagccgtcatttttgctcgcagggactttgttttccgcaatgtgtggaatttgtgtggaaagttggccgttatcagccgtttttcttggcgttctggcgcaggctgttgcggatgtttttgacctgtgcagcgttttccaccatggtgtcctcggtggtgcgcagcatattctcgcagtagtcggtcacggtctggcgcagggtgcgtgcctcggtctgggcagcaacggtgatctcagccgcgcgctgctgggcggccttgacgatctcggcatcgctgaccagaatgcgggcgcgctcctcggctttttttacaatggcctgtgcctgtgcattggcgctgtccacgatctgcgcccggtcgttcacgatctgctgcgcctgccgcagttcgccgggcagcgcagcccgcacctcgtccagataatcccggatctgctccacatccacgatgcgcttgccgccggaaaggggcacatttgcgctctcttccagtgcatcctcaatggtatccaaaagctcgttcacgttcataaggcttctccctcctgctcagcggcgggctgcatgggctttgtgtacttccacagcagcaccttgccgtatttatactgtttttgcagggtcagactgcccgcctgcgcgggcagcacgatgcctgtttcgctctcgcacagcacgatgccgcccggagcgacgcacttttccacggcgggcaggatcttttccagcgtgccgccgcggaagggcgggtccagcagcaccagatcgaactgctcccggcaggccgataagaaccgcgcagcctcgccgatattcacccggctgcggtcaaacacgccgcaggccttgcagttgcgcatcacgatgcttacggcctcccggctctcgtccagaaagacgcaccgggccgcaccccggctcagcgcctcaatgcccagctggccgctgccggcatacagatccagcacccgtgccccgggcaggtcgaactgtacgatgctgaacatcgcctccttcacctgcgagagggtggggcgggtcacatcggtgccgggcagtgcttccagcctgcggccccgggcttctcctgcgatcacgcgcatgatgttacctccttgccgtagctgccgcccccgcggcagccagtttgaactctttcgtatcctttattatctcccaactgcatagcattgtcaagagcccgcattgcactgcgggcggctttgtgctacaatcatagcagcaatattgcgcattttacggcgcatttcagcaaaggagagtatacagcatgaaagttctgctcatcaacggcagcccccacgagaagggctgcacctacaccgccctttccctcattgccggggagctgaaggcacagggcattgaaaccgagatcctgcacgtcggcggtcagcccgtgggcggctgcatcggctgcggcggctgccgcagcggcaacgggtgcgtgttcggcggcgtagtcaatgaagccattgagaaggccaagaccgccgacgccttcgtgttcggcagcccggtgcactacgcctccgctgcgggcaacatggccagctttatggaccgtctggcctacgcgggcggcaagtatctggcctacaagcccgccgccatctgctgctctgcccgccgcgccggtaccacctccactcttgaccagctggtcaaatacccccagttcttccagatgccgctggtcaacggctcctactgggcgatggtacatggctccaaccccgagcaggtgctgcaggacgccgaaggctgcgccgtgatgcaggaactgggccgcaacatggcatggctgctgcgctgcatcgaagccggtaaggctgcaggtatcgaccacccgcagaacccgccccgccccatgaccaactttatccgctgagcggaagaattattttaaatttatggattgg

SEQ ID NO: 13765 - DNA, 18535 bp, Unknown
  gut microbiota DNA sequence
gcgggtggattcgaaccaccgaagctgaaagcagcagatttacagtctgtccccattggccactcgggaacacgcccatattcagttgttgtgcatccgtgcgccggacgacttgtttattttagcatgagaaaagggttttgtcaaccaccttttttcactttttttcagcaggcttactgtcccccgcccgccgcgcttcatccggttgaattgcgtcctgttttatgttaaaataatgtaaagattctacacattttacaggcaggagtgggtcattgcatggagtcaacaatcagcgccgccccgcaaatttctatcgaccgggaaaagacgctgcgcagccaccggcgttactgggtgctgcggcgtgcacaggacatcgtgttctccctgctggcgctgatcctgcttgcgccgctggcactgctgatcagccttgccatcgtgctggacagccccggagacggagctattttccggcagcggcgggtaggacgggacggcaagctgttctggctgtataagtttcgcaccatgtgcccggacgccgaggagcagctgaatgagctgctgagccagaaccagatggacggcccggtgttcaagatcaagggcgacccccgcattacccgggtgggacgttttctgcgcaagaccagtctggacgagctgccccagctgctcaacgtgctgcggggcgatatgagcatcgtggggccgcgccccgcactgccccgggaggtagagctatacagcgactaccagcgccagcggctatacgtcacccccggactgagctgctactggcagatcgcaccccaccgtaacgagatgagctttgacgagtgggtggcgctggatctgaaatacatccaggagcgcagcttctgggtggactggaagatcatcttcctcaccgtccgcgccatgctcatgaaatatggagagtgacaaaagcgcctgttgtgcatccgcacaacaggcgctttcgttacgtttatttcagcaccgcacccagatttgcactggtgaccatgcgggcgtaacggctcaaccagccggtcttgatgttgggctcgggcgcaacgtactttgccttgcgctcggccagcactgcatcgctgacctccagcgtgatggaggcgttggggatatcaatggaaatggtatccccttcctcgatcaggccgatggggccgccggaggctgcctccgggctgacgtgaccgatggcagcaccgcgggatgcgccggagaagcggccgtcggtgatgagggccaccgtcttatccagcttcatgcctgccagcgcagaggtggggttgagcatctcccgcatgcccgggccgcccttggggccttcgtagcggatgaccaccacatcgcccgggacgatcttgcccgcgtagatggcggcaatggcctcctcctcgctgttgaacacccgcgccgggccggaatgctgctgcatctccggggcgacagcgctgcgcttgacaacgcagccgtccggggcaatgttgccccacaggatctgcagaccgccggtctcagagtaggggttctcgatgggacggatggccttttcgttcaggatatgggcacccttgatgttctcgccaagggtcttgccggtgacggtgggcacgtccaagtccagcaggcccttcttggccagctccgcctgcactgccgggatgccgcccgctgcgtacagatccggcatatgggtggggcctgccggtgccagatggcacaggttgggggtcttggcgctgatctcgttgaacagcttcaggtcgatgggcacaccggcctcgtaggcgatagccagcaggtgcagcaccgtgttggtggagcagcccagcgccatatcacaggtcagcgcgttgcggatggagcgctcgttgatgatctggcgcgcggtgatgcccttgcgcaccatctccatcacagccataccggcgtgctttgccagctgcaggcgcttggagtacacagccgggatggtgccgttgccgggcagtgcgatgccgatggcctcgcacaggcagttcatgctgttggcggtgtacataccggagcagctgccgcagctgggacagcagttgcaggtgcagtcctccagctgctcgtcggtgatcataccggccttataggcacccacggcctcgaacatcttggaaaggctcacttcctcgccgccgtaagtaccggccagcatggggccgccggagcagaccacggcgggcacatccatgcgcaccgctgccatcaccatgccgggcacgatcttatcgcagttgggcaccagcacaaggccgtccagctggtgtgccatcagcatggtctccacgctgtcgcagatcagttcacgggaggccaaagagtacttcatgcccacatgacccatagcgatgccatcgcatacaccgatggcggggatcaggatgggggtaccaccggccatctgcacaccggccttgacagcctcggcgatcttatccagattcatgtgtccgggcacgatctcgctgtaggcgcttaccacgccgatgagggggcgctccagttcctccggggtgtagcccagcgcataaaacaggctgcggttgggcgcgcgctccgagcccttggtcacgttgtcacttctcattgcaaatcctcttttctgataaagccctctccgtcacggttgcgccgtgccacctctcccgagagggagaggtttcgcggaggagctataaggttcccttttcaacaaaaactccccctttcgggggagctgaccgccgaaaagcggtctgagagggttctcctcttacttcttcagccagctcatcatgctgcgcagctcagcacccaccttctcgatgggcagctcagcctccatgcggcgcttggcaaggaagtgcaccttgcggccgcccttggggctcatctcggtcaggaactcagaagcaaaggtgccgtcctggatctcggtcagaaccttcttcatctccttgcgggtctcctcggtaatcaggcgcttgccggtgcggtagtcgccgtactcggcagtgttggagatggagtagcgcatcttggagaagccgccctcgttgatcaggtcaacgatcagcttcatctcgtggcaggtctcaaagtaggccatctcgggctcgtagccggcctccaccagcgtatcgaagccggcgtggatcagctcggaaacaccgccgcacagcacggcctgctcgccgaacagatcggtctcggtctcctccttgaaggtggtctgcagaatgcctgcacggcctgcgccgatgccggaagcataagccagtgcgatatccttggccttaccggtgtagtcctgctccacgcagatcagagaggggcagccctcgccctcggtgtacaggcggcgcacgatgtggccggggcccttgggagcgatcatgatgacgtccacgttcttgggcgcggtgatggtcttgaagtggatgttgaagccgtgtgcaaaggccagtgccttgccctcggtcatgtagggagcaacctgggtgttgtagatatcggcgcacagctcatcgggcaccagcatcatgacaacatcgccggccttggcagcctcttccacctccatgaccttgaagttgtcatgggtggcagcgaactcagaagcctttgcccagtgagcagaacccttgcgcaggccgaccacaacgttgacgccgctctcagccagattctcagagtgtgcatgaccctggctgccgaagccgatgacagcgacggtcttgccgtccagcacgccgaggttgcagtcggaatcgtagtatttcttgatagccataatcgttagtctccttttacattaactggttggtttatcttccggtcttgtatgctctgttctatctttcgctcaccctgagcggaaaagcaatgtaattatgcccgtcttgcgcccggcgggggcagctggacggagcgcacctcctgcggcggcttctggatatgctggtgcatcccgccgcgctccagtgcagtaacgccggtgcggcactgctcaaggatgttgtagccctcgaacattttcaaaaatgcgtccagcttgtccggccggccgatcaactcaaacaccatgctgtccggggaaagatcgatgatctttgccttgtagatgcaggcgatctcccgcagctctgtgcggttgtgcacgtccgattccaccttgagcagcagcagctcccgctccagcgctttttcgctgtccagcacgaacacctgccgggtgacttccagccgctcggtctgcaataccagctgctgcaaggccttttcatcgctggtaatggtcactgtgatgcggctgactgccgggtcgttggtggcggacaccgtaaggctgtcgatattgaagccgcggcggcagaacaggctggacacccgggccagaacgccgctctggttgtccaccagcaggctgatgaccctgcgctgatcagatttcatgatgctgtgtcctccttattccatgatgatgtcgttgatatcgccgccgccggggatcatgggcagcaccttttcgtccttgtcaatgatgcactcgatccaagtggggcctttctgctgcaaggcatctgcaaaggcttcctgaaactccggcagattggtgcagcggtagcccttcaggccaaagccgtctgccagcttgacaaaatcggtcttgcggtgggggtcggtctggctgtaacgcttgccgtaaaagctggtctgccactggcgcaccatgcccagcaccgagttattgaagatgaccgtgatgatgggcagctcgtagctgacagcggtgcaggcttcgttcaggttcatgtggaaggaggcgtcaccagtaaacatcaccacacgctgctggcgtcccagtgccatctgggcaccaatggcagcgccgtagccaaagcccatggtgccaaggccgccgctggtgataaagccacggctcttggtgtggcgcaggtactgcgccgcccacatctggtgctgacccacgtcggtaacatacacggcgtcggggccgcactggttgcacacctcgccgatgacctgatggggcatcagccgggtggggtcagacacggggtggtaatcctgtgcctgccagctctggatcatcttcatccattccgggtgcttggcgggcttgatctggggcagcatggcgttcagtacataggctgcatcgcccacgatggaaagatccacatccacgttcttgcccagctcgctggcgtcaatatcgatctggatgatggtggcgtttttggcaaaggtcttggggttcagcgccacgcggtcggaaaagcgggtacccaccgcgatgagcacatcgcactctgccaccgcccggttggaggtgtagcagccgtgcatccccagcatccccagattcatcgggtcgccgtagggcacaacgcctgcggccatcagggtgtaggttgcgggaatctccgccttgtgcagcagatcccgcaacggctggcagctggctgcgctgcgcacgccgccgccaaagtacaccagcggacgctgtgcggcgttgatgaggtctgccgcccagtgcacctgctcctcattataggtagtcacggtgcggataggctccggctgcttgggggtgaactcgcacactgctgcagtcacgtccttggggatatccaccagcaccgggcccttgcggccgctctgcgcaatgcggaaggctgcccgcatggtgtcagccaagtcctctacccggcgcaccgtgaagttatgctttgtgatgggcaccgtaatgccctcgatgtaagcttcctgaaagccgtccttgccgatgctgctggtgggcacgttgccggtaaaggccaccatgggcaccgagtccatataggcggtggcaatgccggtgaccagattggtggcacccgggccgctggtagccagcaccacgccggtgcggccggtggcgcgggcgtagccgtccgcagcatgggctgcgccctgctcgtgggcggtaagcacatgggtgatgcggtcggcattcttatacagctcgtcgtaaaggttcagcacagcgccgccggggtagccaaaaagagtgtccactccctgctcgcacaggacctctacaaagatctgagaaccattcaactgcatggtgttgctcctattcctgttccacttcttatccattcccccggggagagcttttgaaaaagaaaaagcccttgtcccctgctttcttcaagagacaaagaccttgtaacatcaagctctctgcggtaccactctcgttggcgtgctgtgcacaccctctcacgggcttccaacaaagccctgcacggtaacggctgcaaccggcgctgcttacaggggtttgcacccgttgggcaggctgctccgggatgattttccgcacgaaacgctgactgccttgcaccagacggcagctctctgaacagtggggatcgtgtggtactttttcccatctgcgcatttgttgatgtaaattatactataaaccgggcttttgtcaatcgacaatttgtaacctgaatcaccccaaagatgaagcatttttaacaccccttgcatccccgcccgaaccgctgtatacttttgatatccgcgtacctgcgttttgtagggtatgtgccaatggagaggaaaagggatcgacctatgaaactgagagaatggaatgcccatctgcatgggcttgttgtgttccgcgccctgctgaacgaccctgttgtggcaaagcttttagacctgaccgaccgcatggaagccggcagcacctcctacggcccggtgtgcgatgccgtagccgcctttgaggccgctttgttcgagtacaccaccaactggggcagctacctgagcaatgctgtgctggaggccgagaccatctgcgtgcggcaggccgccgccgggcagctggacgcgctgctgcaaagcgccttggacagcgagctgcagtttttgcagcagctgtgcgggctgacgctggacgagctgtttcagaccgcctactcggagcaggcgcagcggccggagttggcgttcctgccccggtggcagacctgtgagcttgaccttgccgccgcctacgcccagcgcatgagcgaggtgggcaaaaagggctacggtatgtttgcaaagcaccatgtattcacggtggagaacggccagcttgtgccggtaaaataccccgacccgcagcgcctttccgagctgccaggctacgagaaggagcgggaaaaggtgatcgccaacacaaaggcactgctagccgggatgcccgccaacaatgtgctgctgtacggtgacgccggtaccggcaaatccagcgcggtaaaggccattgccaacgagtttgcgcccgagggactgcggctggtagaggtaaaaaagaaccagctgtaccagatccccgacctgatggataagctggcggcaaacccgctcaagttcattttgttcatcgacgacctgagctttaccgccaacgacgacaactttgccgccctgaaggccattttggagggcagcgtaggcggccgtgcccagaacattgcggtgtacgccacctccaaccgccgccacctcatcaaggagactctctcagaccgcaccggcgacgacatccacgaagccgacacccggcaggagctgatgagcctttccgcccggttcggcctgacggtcaccttccagcggccggaaaaggcacggttcgagaccattctggaggagctggcaaagcagcacaacatccagatgcccaccgagcagctgctgctcaaggccgaggcctttgccctgcgtgccggcggccgcagcccccgggtggccaagcagttcatcgagcaatgcgaggccggggtgcagaagtaaatgcaccagttttaagcgttatcaaaaaacgggacaccaaagcatccgcagatgcttcggcgtcccgtttttcctatctttattcgctcagtcccgcacggcgatgcactcaatctccagctttgcgcccttggggatggctgccacctgcacgcagctgcgggcggggaacggctcggcaaaggccttggcgtactctgcgttcactgcggcaaaatcgttgatgtcggccagaaagatcaccgtcttgaccacgttgttcatggaaagccccgcctcggccagaatcgctttcaggttggcaaggctctgtgcggcctgctgctccacggtatcggccatggtgccggtggcggggtctaccgggagctgcccggaaacaaacaccatattgcccagatccagtgcctgactgtaagggccgatggcggcaggtgcgttggcggtagatacgactttcatggtatattttctcctttatattacatcaggtttagaacaaattcgcttttttcttcggatagagccagatgagggggtaatttcccgtaagccgctgcttgcctgtgccctcatccgtctgctcactccgttcgcatccaccttcccccgtccgggggaaggttttcactcttgcaaacgatgaagtttacacccgctcgctgaccagctggaaaccggccttcgtcagctctgtgcggatctgctcgatctgggcggcatcgcgggtctccagcgtcagcttgaggaagcagctggaaatgggcatattggggtcggagccatcgtgctgcaccgacaccacgttgctgccgcagcgggacaccacctcggccacctttttcagctggccgggtttgtcctccagtgcgatggtcagatttgccttgcggccgctcatcacaaggccgcgggtgataacgcggttcaggatattcacatcaatgttgccgccggagatgacgcaggccacctttttgccctctaccggcagcttgtggaacagcaccgccgccaccggcacagcgcctgcaccctcggccaccagcttctggttctccatcagggagaggatggccgccgccgtctcgtcctcggtcacggtgacgatatcgtccacatactgctcgcacagctggtaggtcagctcgcccggggtcttgacctgaatgccgtccgcaaaggtggaagcagatttcagggtctggtacttgtgctcgtgcaggctgcggtacatactgggggcaccctcggcctgtacgccgtacaccttgacctccgggcgcagggtcttgatggcaaaggcaatgccggagatcagtccgccgccgcccaccggcaccaccacagcgtccacatccggcagctggtcaaggatctccaagccgatggtaccctgcccggcgatgacctgctcgtcatcgtaggggtggataaaggtcatgtcgtactccttttgcagctgcacggccttgtcgtgggcttcgtcgtaggtgccgggcacaaggcagacctccgcgcccagatttttggtgttttccaccttcatcaggggtgcgccgtccggcatacagacgatgctgcggatgccgcgccgggtagccgccagcgccacaccctgcgcatggttgcccgcagagcaggcaatgacgcccttggcgctctcctcctcggaaagctggctgattttatagtaagcgccccgcaccttaaagctgccggtggcctgcaggttctcggtcttaaggtacagctggcagtccttggacagcttgggggcttcgatgaggtcggtcttgcgcgccacgtccttcagcacaaaggcggcgtggtagatcttatccagagtcagcatgacagatacttcctttattttttcgtgatgtcatccagtataagttacaaaaattgttttgtcaaatgaatttcattcacgataaaaggcgtaaaaaagagaaaggcagtggtaaagccactgcctttctctttttattctcattaccgcccacggccaccgccgccgccgtggctggagccgccgcccatgccaccgaagccgccgccaaagctgccgccgccgaaaccgccgcgcccggcaccgcctccgaaggagccgccgcccatgccgccaaagccgccgtagaagccgcccggcgggggcggcggcgggccgcgacgtctgcggggaggccgcgggccgccaaagcaccacagccaaccgcaggggctggcaaaaacataggccatcgaccggatgatgacgataagcagcacaacgctgaccacaagggtcaggatgtcggtcagggtgctgccgccactgctctgcccgccctgatagccgggctgcacggtgctgccgttaccggtgccgccggaaaggctgaccccgtaaatatccgcgatggtgtttgccacgttgcgggcacaggtggtcaccgcgccgtcataatcctttgcggcgaactggttctccatggtctgggcgatggcgctggactgctttgccagcgtggtgttgcggaagccatcgccataggtcaggtagtagtcgccgtccgcgtactgcgccgactccatcaccagcagaatcagcacgccattattgttggaggacgaaccgatgccccacgcgttgaaagcctgtgtggcgtaatcctccgtggaatcattgcccgtgtattctactgtcagtacaccgatctgcgcgccgctgcagctggattccaactgggcgttcagttcggtgatggtctgcacggtgctgctgctcagcacaccggcaccatccaccacgcactgatccttgggcaggttgggcagctgggcggcaaaggccgccgggcacagcactgccgcactgaccaccacggccagcaccagtgcgctgatgcgttttgcaaagtttttcatgcgaagggctcaacctccttcacgccggacaaagcgcccagcacactggccgggaagccgccgacttcattctgatattcatacaccgccgtattgtactgcaaggtaccaatgatggtggctgcgctgttgaactggccgtactgtccctgcaccgcacccatcttcatggggtcagcggcctgctcctgcaactttgcatacagctggtcgatggcggcgtccagtgcctggtcggcctgatacagcgcgtgcatcgcgctgccctgataatagggcagcgcggtcagcgactggcttttgccgccgttctgcaccgcctgcagacaagcggagaaatcgttcagagccgtctgtgcagccagcacctcggcgctgtctgcaccaagggtgttggaggcagtggtcagaatattcgccgccgtattctcccgggtggtcagctcctcgctcaggttataaccgttgtcggcggcgacccctgcggtgaaccactgacgggcagtgttgtacttgccgcgcagcttggcgctgccaaagccgaaaaaagcggccagcatcaccaccacgctcaaggccagcgccgccgcccgggtggaaaacgctgcgggcagctttgcttccagtgcggccagcttctgctggcggggcgtcagccttacggcctgctccggctttgccttttcgcggtagctgcccgcgtcaaagccgccgggagcggtttgtttgttctgagaaaaatcagcgtttgccatttcagctccggatctccatcattttggttttcagttcgtcctcgatgcgggtcagctcctgctcggcggcggcgcgctttgcgcggccctcgctctggatcttgttcagctcgtccagcgtctcgatcaggctcttgttggtctgctgcaaagtctcgatatccacgatgccgcgctggctctccttggcggtctcgatggtgcccagcttcagcgcctcggcgttcttcttcagcagatcgttggtcatgttggtcacagcgcgctctgcctgcatggcctgctggctgtgtgccagacccagtgccagcaccatctggttcttccacagagggatggtgttcacgatagtggactggatcttttctgccatcatggtattgttgttctgcagcagacggatctgggggcccatctgcaagctgatgttgcgggtcagttccagatcatacagctttttctcaaagcgctcgcactggtcggcaaggtcacgggcggcctgtgcatcctccggcagaccggagaccttggccttatccatagcctgctgcagttcgttggcacgcacatcggccagctttttcttgccggcaaggatatacatgctcagctccttgaagtaggccatgttcagctcatacatcttgtccagcatggcgatatccttgagcagctgcacctgatgggcttccagcatggactggatcttttccacgttggtctcggtcttgtcgtacttggtcttgagggcatccagctggctggtctttttcttgaagaagcccataatgcccttctgctgctcctcgttggcgtcaaaactcttcagctcgccaatgaggtcggtgatcatatcgcccacctcacccagatccttggtggacaccttggagagggctgcttcggagaaatcgccgatcttcttctggcaggcagagccgtactgcagcacctgctggctgttggtgatatcgatcttctgggcaaactgatccaccatggcctgctcctcgggggtcaggttcacctgtgcctccggggcaggggcagcggcgggcttttcctcctgcggcacagcagcgggggtggggtccagcgtcagggtgggcactgcgggggcatccagatcaaagttcagagtattgtcagccataagtgattccttcctttcaaaatcccgaggggatattctggttttacttgctcagaccctgccctttcagcatattctgcaaaacggtcaggtctgcggacaggtccatgctctctgccgcgtacagggcatccagctggttttcaaaagccgtggcaatggaggcggcgttgtgctccacctcggcgcggatggcggcggcgttctcgccccgcacaccctgctttgcaagctttgcgtactgctgcaaaacatttacggcgtccggcagatagtagttggcaaaccggcgcacctgctttgccttggtggggtttgcttccaccgcttccacgatggagcggcccgccttttccatgcgggtcatggcggcggacagctgcgggtcgggcaaagcctcgttcagtgcgtgcagggtgtccagcttctgctggatatcggtcagcatctggtccacatcctccacaccggtgtggaagggtacctcgtgctccaccacccggggcgggcaggtcttttttgccacgccaaaggccacggcggcaccgcccagcgccaccagcagcgcccataatttatacaccggcaacaccgcgcacagcaccacgaacaccagcgccatggcgtaaaaaggcagcacgctgggcttttgggtgcggatgatcttgctcatggtcatttctccttgtccggggcagtgcgccccttatgatatccataatacaacgtccgcaaaaaaacgcaagtatcccgcaaaagaatttacagccttgtcatcattttacgatccagtccgccagcgcagcgccccaaagttcctccagccgggcggggctgcaggcggcgttggcggggcttgtacttggcagacggacagccgggatgccggtaagcggctgctgatattttgtgtagatacggtacgctgtggcaccgttgcagaacaccgcccggatgggtgctttgcgcagcagcccggcgatatcgttgggcaccacatcccggatggaggcatccgatgcgccggtgatcgtgcagctttccagcgtgtcccacagtgccagcccgtggcacaaaagcagctgctttttggcggcgatatcctcccgcgcaggcagcggctccccggtcagtgccgccagcagcggccagaaccgattttgcggatggccgtagtaaaaggccatctcccggcttttggggctgggccatgtgcccaagatcagcgcccggctgcggtcatcgtacaccggtgcaaagctcataagctgccgcctgcgctttcaatattgccccatgcggagccaaaatctttgccggagggctccgcgcgggggccgtcgaaccacagttcctcgatcagcgccgccacgccatcctcccgcacgtccccgatgatccggtcggcagcggccttggcgtccggggtgccgtttgccatgcaggcactcaggcccgcgactttcagcattcccacatcgttggcagaatcgcccacagccacggcatccgccagcgtaagccccatctgtgcacacaggtcggcaagccctacgcccttatccatgccgccgcgcacgatatcgtagtagcagtagccgtccgcgttctgcgcgcccgtctgcatccagtgcaggccaaggtagccgtatttttcgtggaagcgctccacttcctgcggcggcatggcggcaaaggcggcgtggggcatatccaccagatgcctgtcctgatcttctccgtccacgcagtccagcccggggctgttcatcatctgatagccggtgtgcagatactcgtactcgcagtaggcgtaataggcatcccggaagttgaattgcagcgggtagttataatcctcacaaaaatccaccagcacatacatctcctcgctggtaagcggatgctcggctattacgttgccctgcctgtccaccacgcaggcgccgttgcaggtaatggcgtagtcgtaccggatgccgcccagctggtttttatcccggatgcccgggtaggagcggccggtgctgagcacaaacttacccccggcggcttgcagcttttttaccgcctttaccaccgccgggcggggctttgcttcgccaaagggcatcagcgtgttgtcgtaatcgcttgccagaatcttatattgcatggtcatctctcctgtgtgcatcgttttctcccagtataacacatttcaaagtccagcgggagagggggaaaagaaaaatgggacagcagaatgtccgcaggcattccactgtcccgaaatccaaaatattttccttatcaggcaaacaccgccacgaccacctgcatggccacgcccacaaaggcaccggcggcccatgtcaggccggtgatgaagaggttctgcttccacgaggggttggcgcgccacagcacagccaagcccacacccgcaccggtgcacagccccgccacaaggctggaaaagcgcagcgcaccttccacatacagctgtgtcagcagcacgctggcggcgcagttggggatcagccccaccagagccgccaccaccggctggaagaagcccatgccgcccagcatctcggcaaacacgtcctcgcccacgccttccacgatcatgccgaacaccagactgaaagcgaagatgaacacaaagatctccagcgtgtggcgcagcgccgcctgccagatgggcttttcgttgccctcggcatcgctgtgctcctcgtggcagtccacctcgtccgcatggccggtgtagccgccccgcagccccttgggcagcacgccccgcagcacaaaatccagcacaaagcccaccacgatggcgtacaccaccttgatgaccatcaggacggccagcttatcccagtaggtcggcatggagaccagcagcgggatcgcttcgtcgctggtggcaaggtacaccgccatcagcgtgcccagcgtgatgacccgggaggcgtagaagttggacgcaatggcggagaagccgcactgcggcacacagcccagtaccgcgcccggcacagcgccccagcgcccgctgcccgccagcagcgcctcgatgcgctcaccgtggcggtgctcgatatactcgatcagcaggtaggccagaaacagaaagggcagcatcttggcggtatccaccaaggtttcgcccagaacacccaaaaacaattccataaataatcgctccaaagacccgcagggggtcgtctctcaacaatttgcaatcagtttgcattttcgtgcagggaagattatacacgatatcctttccaattgcaataccaaattgcaaattggttgcaattttatgttatggaacattgcagcgcgtaaaaagcgtgaaaaagaggttctgaaaagcccgcgggcttttcagaacctcaaaatttcaaatcattcttccgctgatgatgcgcagagcaacgcggagcgcattccaaatcgtcccacgcggcaaggaagctgcggtctgttttaccccttcagcggtacaaagcccacaaggtctttgaccacctcgccgccgatgatcagaccggccaccgagggcacaaaggcgttggagcccggcacggtgcgccgcgcggtgcacttgcgctgggtgcccgggggacagatgcagtggttcttgcagctgatggagtcatcctcgatgggagtcatgacaggctccttggagtagaccaccttcaggtgcttgatcttgcgcttgcggcactcggtacgcatcaccttggcaagcgggcagaccgaggtcttgtagatatcggtcacctcaaagcgggtggggtccatcttgttgcctgcgcccatggagcagatgatgggcgtgcctgcctccttgcacttcatcaccagcgccagcttgccggtaacggtgtcgatggcgtccaccacatagtcgtactgggtaaaatcgaaatcgtcctgcgtctccgggccaaagaagcaccggtgggtggtcaccttgatgttggggtcgatatcgtggatgcgctgttccgccacatccaccttatactgtcctaccgtgctgcgggtggcgatgatctgacggttgaggttggtcaggcagaccttatcgtcatcgatcagatccagtgcgcccacgccgctgcgtgccagcgcctccaccgtgtagccgcccacaccgccaatgccaaacactgccacccgggcgtggtgcagcttttccatagcctctgcacccagcagcagctgggtacgggaatattgatcctgcattttgttctccttacttttctacgcgggtgatggtgccgccgcccagcaccacatcgccctgatacagcacggcagcctgccccggggtgggggcacgctgaggctggtcgaattccagccggaagccgttttctgcggggtaaacggtggcctgctgctcggcctgatgataccgggtgcgggcagtgacccgcagcggcccggtcagcgccggaatggcgatccagttcacatcctctgcgtaaacgatgcggtcgaacagctcgctctccggcccgaccgtgacggtattggcctgcatatccttgccgcagacgtacaccggcgcacccagcgcaaggccaagtcccttgcgctgtcccagtgtgtagcgcaccgcgccgctgtgggtacccaccaccttaccgctccgatccagaaaatccccggcagggtagtgcttgccggtaaactgctccataaagcgggcatagtcgccgtccggcacaaagcagatatcctgactgtcgtgcttttgggcgttgataaagctgtgctcctgcgctatctctcgcacctcggtcttgtgcagcgcccccagcggcaggcggatatgtgccagctgctcctgcgtgaggttatacagcacatagctctgatccttgccctcgtccaagccctttttcagcagccagcggccggtggctgcatcctgctccacccgggcgtagtggccggtgaccacatactccatgccgtgttcttccgcccagtccagcaggtggcggaacttcatatatttattgcagtcgatgcaggggttgggggtaccgcccgcctcgtagacgcggataaatttttcaatgatctgcgcccggaaatcggcggtgaaatccagcacctgatatggcatatccagtgcaaaggccacctcggcggcgtcctcgatatccttttccgagcagcaggtctggtagccggactgtcccagcgtttcgttgtgggtaagccgcatggtgatgccggtgcagtcgtagcctgcctgctgcatcaggcaggccgccaccgagctgtccacgccgccgctcatggcaatgagggcgcggggacggtttgcagggttctgagtggtcataggttctccttttatgggttcaacacactaaagcagtagtataatactaccgcagcataaaccgcttgtcaagacgctataattttctgcgccgcagccagcagcgccggtttttcgttggggtattctgcgcggatgacgccgtccagcagcgcttccagcacccggcgcagcgcagggcctgccgggatgcccgccgccatcaggtcgcggccgttcaccgccagctggctcacccggcagcatacgccgtccgcttccagctgccgcgcccgctgcgccgcaagggcgcaagccggggcagcttgcgggtgcagcgccgcacacagcgcacacagccgctccacggtgcacagcccgtaccgccctaaaagctgccgaaggtggatatcaccggggtgtgcagaagctttctcctcg

SEQ ID NO: 13766 - DNA, 8086 bp, Unknown
  gut microbiota DNA sequence
gctactcccgatccggatcccactcctgatcctaagccgaaccccgaccccacccccgcacccggcggtgacagtgacggcggcggtgcagccattgtggcagtagccgctgtgggcggcgcagccattggcgtgggtgcctatatcgcaggcaccacggcctacctgaagagcgtcctgcccgagggtatggccatccccgctaaccgccagcagctggcagttgcactgtggaccgccgcaggcaagcccgctacccagagcactgcactgttcaacgatgtggcagcagatgccgcagagctgcaggctatccgctgggtcgtggataccggcctgatgtccgcacaggacggcagcttcaagcccggcagccgcgtaggccgcatggaagtgatccgcacttggaagacttaccagcagcgcggctaaaaccgctgccccttaaccccttataaccccgcagggactgctgcacagcgctgtgcggcagtcccttttttgcgtcccaaaagggtgcgcaagggcttttttggggtttttcagggcgattcgatgcatttcaggggccattcacgcagaattgctccatttttgccgccgttcgtggtatactacaggcacagagcagtgctctgttcaatatgccattcccgtaattcctatagagcagaaaaccgtccggtaaccgcaaaccgggcggttttctgttttttgcgggtgcgtgtggtgcaccgggtcgtttcagcgcatttgcggggcgattcgtgcccaaaaccgtccaaagcgggcaaaacgtggtacactgggtacaacaaaagcgcccggcttggagggcgcttgagaaggagagaatcttatgcaaaaacggctcatcagcatggttctggcgctgagcatggcactgaccgcaatgccgctgcccgcccttgcccagagcgccccgcccgacaccgccaaggcagcccgctgggctgtggaggccgggctgctgcccgacatgggcgagggcgcctttatgcccggcaagcgtgtgaccaaggtacaggtcatccgcgcatggaaccggctgaaaaagctgggtctggcgaaataacaattgccatctcccgatcgatcctttccaataagtgcagcaaggccgtccggcgaatgccggacggccttgctgcttttgggggaacgaaccctctcagtcgtcgctgcgcgggagcgcctgagagggtttcaaaccggtggtgcccacttcatcggggtcaaaagagaacatcccccggcaggcagaaactttccccgcagagggcattttcaatcgttctccaccccgggacacccggcggcctgccatgcggcgcacagtacctctttttccgccttggaaagctttttcagggcgacttcccggcgcagggcggtgcgtttgtccgcgcagcgctctatataggcaaagcctaccgcgccgtgggcgcgggtgtagcgcgcgcccttgccgctctggtgcgctttcagccgggcggcggggtggttcgtccaaccggtgtacagctgcccgccggtgcagcgcaccatgtagacgtaggcgacgtcaggcaaggcgtccattgtttttcagcacctgacggcaggcggcaagggcggtctccttgtccttggcggtgatgaggaagcggctggcgtggcagaagctgatgcccgggatgccgcttttctgctcgatgacctcctgcggctgccccgcccaagactgcgggaagggcagcttggactttttggtcttgtggtcggtgacgcactgggcgctccacccgccgcgctggctggggtacaccacaaacagggcatcggtcttgtacagaccgtttttccacggcagatagcagggcagcaccacgatgccgtcgcgggagttgcggtaggcctgctgcaccttttcgtccgcgcggttcacggcgttggcgctgtcgatctggttctccaggatctgctttgccacggccaccgccttgaaaaagcagctgtcctgatcctccttggagtcccacaccgggttgaaaaagccgatggcatcgcacaggctgttctgctcgccggtgttgtcgttcaggtccagcggctggatgaagttttcgtcaatgagccgcgcctgccgctcgcccacaagaccggggccaagcacccgccacagcaggccaaaggccgcgtagggcacgccattggcacggtactcccggggctcctgatggtggtcgaacatcccaaagccgatatcgtacacgatgccgtcaaaatcgtcaggcacggtaaagccgcgggtgatcttgatatccgggcgcagaatttgcaatagcgccgtagcaaacacgtcatcggcatggaacttgccggcgtgggtaaaaccgtttgcgggaattttcatggatttgatacctcgttctcctagtttcgtctggtatcagtatagcacaatcccgcccgtgggacaacaaaaaggagctgccgtacgggtgcggcagctccagattggttctatttacagcgccgaatagccgaagctgttcaccagcgcgtcgatgtgctgcccggccttgcacagggggcagtcgcgggagtcgaagctggcgtaatccggcagactagtggggtcaaagatggaggtgaccgggtagccaaggcactcgtgggtggtggcaaaaatagccgaaagcccggccacgatgccgccgtagtagttcacggcctccacggctgcctgaatggtgtagccggtggtgatggatgcggccagaatgaggacgtgcttgcccttgaccatgggagcaagattatcccgcagaatgatctggctgccggaggtgtattccggcgtgaccacatagatggtcttgtgggcgttcatattggtaaagccgtccttggtcagctcgttggcaaggcaggtgccaatgacctgtgtgccgtccaagcagagcacggtatccacgatggtgctgtgctggtaagcgctgaccagctcctttgccacggcttttgcctcggaaaggcgggtcttttgggtggtcacgtcgatgtaatagttgatgtggctgtggctggtggcaaaatgtcccttggccacccgcaggaacagttcgcttttgctggtgggaagcttgaccatgttgatcattgtacagcactccttttttcaccgggcgcagctgcgccgcaaaatacaaaacagcgcggcaacccgttccggtcgcagcgcttatttttcttctctgcctctttattgtactgaaaaatgccgctgtgcacaagacacaaacctgacgaaaaaccttgcttttttacagacatatcgccgaaaacttggatgcaaaggccgctgccgcccggaatgctgcaccgcaaagggtgcacagcggtaagaccggtacggcggtaggggaggaacacgcttttttgcgcaacacggaaaattttgcaaaaagggactggtatttttgcgggttttgagtataatataatggatagttcaaatttgaagtaaaaggagaatcacttccatggcacaggcaaaacaggatatgggcagcggcagcgtaaaaaagctgatgctgcagctcatgatcccggcggtcgttgcacaggtggtcaacctgctgtataacatcgtggaccgcatttacatcggacatattgccggcatcggcgcggcagcgctgaccggcgtgggattgttcacccccatccttatgctgctgaacgcgttcgccatgctggtgggtgcgggcggcgcaccccgcaccgccattgcgctgggacagggcgacaagaagcaggcagagaagatcatctccaacagttttaccatgctgctgctcttctcggtggtgctgaccgtagtgttctacgccggagcacccaccctgctgcggctcttcggtgccagtgacgccaccctgccctatgcgctgagttacagccgcatctacattctgggctcggtgttcgtgctgctggtgctgggcatgaaccccttcatcaccacgcagggctttgccaagaccagtatgcttaccaccgtcatcggtgcggtcatcaacattattctcgaccccatcctgatctttggtctgggtctgggcgtgcggggcgctgccattgccaccgtgctcagtcaggctgtgggcgcggtgtggatcctgcacttcctcaccggcaaaaagaccatcctgcgcctgcgcaaggactatatgcgcccggaaaagaaggtcatcctgccggtgatggcgctgggcatctccacctttgtgatgatgtccactgagagtctgctgtccatcagcttcagctccagtctggcacggtacggcggcgacgtggctgtgggtgccatgaccgtcatcaccagcgcctcccagctgtgcaccctgcccattcagggcatctgtcagggcggtcagccggtgatgagcttcaatttcggcgcgggcaaaaagctccgcgtcaaggaggcgttccgcttccagctgctgctgtgcagctgctacacctgtctgttctggctgctcatgatgctggcgccgggggctgtggcgggcatcttcacctcggatacggcgctgatcgactacaccacatggtccatgcgcatctacatggcaggtatctttgccatgggcttccagatcgcctgccagcagagctttatggcgctgggacaggccaaggtcagcctgctgctggcctgtctgcgcaagatcattttgctgatcccgctcatcttcattctgccgcacctgctgccgaacccggtattcggcgtctttctggcagagccggtcagcgatattctggccgccaccatcaccaccatcaccttcttctcccgcttcaacggtattctggagcggggcgccgtgaaggtataataataacaacaaaggctgctgcgcattctgcgcagcagcctttgtgctgtgtaattgattttagacggcctccggctcacccagagccagcaccttcgtcaactcagcctgcaccttggcgttggtggcatcggtgacggccagcacatcggaatagaacttttccatctcgtcacgggtggagaaggtggccacatacatctggttgcccatggcaccggacagtgcctcggggatgcggtctaccatgcgcatgttgtcctgatacttctgcatcagctgctcgtggctgtaaacgaagctcttgccgtcccggcggccggcaaaggcgcagtagtagtgctcacccaccggcatatcggtgccgccgaaagcgatcatgtccgcccagatcttgtacacgttggtggagcgggcaaagtcgatcatgtccggggtaaagccgccgcagggacgcatgttgacttccagcgccacgatctgaccctttttgcccatgctggactgatcctcggtcatgcggaagaactcgaagtggacaaagcggctcttcaccccaaagctcttgacggcggcacggcccgcggcgcgggtatcctccggcagatccttgatgatgtagtagatggagttgtcatcgttgttcacgatgtccatgatggacacggggcttacgttgcccgcctcaaagatggggttgccgtgggcgtcgatgatggcatcgtagctgttcacctcggcgcggacgaactcctccatgatgtaagccacatccgggtgctctttttccttgtaggccagaaatgcctccagctccttgtcggtggaaagacggtgggtatccgaagcgcccacgccgttgtccggcttgaccaccaccgggtagcccacctgtgccacaaaggccttgcagcctgcaaggtcatccaccatgtggtagcgggcggtggcgataccggccttctgatagtactccttcatcttgctcttgtacttgatgcggggcatatcagaggtctggaagccgctggtaatgtggaaatcggtgcgcagggcggcatcccgttccagccagtattcattgttggactccagccagtcgatgcgaccatacttgaaggcgaaaaaggccacggcgcggtatacctcgtcgtagttttccagactgttcaccttgtagtactcgttcaggcttgccttcagctccggcttcagctcctcgtagggctggtcgccgatgcccagcacgttcaggccgttgtttttcagctcccggcagaactgccagtagttcgtggggaagttgggggagataaaaataaagttctgcatagtatttgttgattcctctttccgttacctctatgattgcaatgcccctgcggggcgggacagactttaatattgggaaacaacggcgcgtccatggacgcgccgttgtttcgttttcacgggatgggtcactgctgacccagaatgtagggcatatagtatgccacctgcttataccaccagttccagtcgtggttgacatcgtgaccccacaggtctacccagatggggatatgctttgcttcaaagatgcgcttgagcagccatgtggtgtccggctgttcccagtcgccctgaccgcagcagatgacagctttctggctgcggaacagctgcatataggggtgatcctccgggaagttcttcatgtagtccacaggggagttcatgtacaccagctcgtccatatagtcgccaaagccgtagtgagcagtgtagatgccgctgagtgccagacagccgcagaagatatccgggcggcgcagatacaggtttaccgcgtgggtggcgcccagactgcacccgaaggcgatgatgccgggcaggtcgctccagccgttgcgctgctgcgccagatgctgaagcatcggagcgacctcgcgggtgatgtagcgcagccactgctcatagcggcggatgcgccagtaggggttgccctgtgcgtccgaccaggtttcctgatccatggtgtcgatggaaagcaccatgatctgcccggactcgatccacggggcaagggtgtcggtcatgtggaagttttcaaaatcgaagaatcggccgtcctgacagggaatatacagcatcgggcggcctgcgtggccgtaaagcttgcactccatatcccgtcccagctccgggctgtactccttgaaatactgcatctccatggtgtttcctcctttgatgttgtcgtgctatggtgtcacccttctcttattcctccacctcatacagcagggtgtggaacacgaagggcagctgcttttcccagctggcctcgcagtgggtgccgccgggcacgatgcggctggtcaggtggatgccccgggtcatcagcttgccgctcaaggcagaaaactgtcggcggatgccatcgtggttgcccatctcccgggagccgtagtccatgtacagcaccgtgccgggggcaagctttgcgcgccccacaaggccggaaagcttatccggtgccacccagatagagggcgacagcgctgcggcgcggctgtaagtatcgttatattgcagcagagcgtacaggctcatcagcccgcccatgctgctgccgccgataaaggtatgcgccctgtccggcagggtgcggaaattctggtcgatcaggggcttgaaccggtggatgaaccagctcatggtggcctgtcccttgccgtcaaagtggccgtaggtggggtcatcgaagcggtagggagaatactccaccagacgctcgttattcgccccggcgttgcactcgatggccgccacgatcagcggggtgtcagtatagtccagataatctgccacgccccagcttttgccgtaggtagcatcctcgttgaaaaacacgttctgcccatcgaacatatacagcacgggaaaccggcgctccggctgtgcctcgtacatggtgggcagatagacatacgcccggcgctgttcggtgccgttgaccgccgggtaactcatgctccattttttgatcatggtgcttctttcctctcaaatcttcctgcaaagggcacagggcggcaagcccacgccctttataggtagtgtagcaccatgcggcgggaattgcaatctttatgcgcaaaggggcggcgggacgatttagaatg

SEQ ID NO: 13767 - DNA, 1567 bp, Unknown
  gut microbiota DNA sequence
aggcaagagaaacgctttttgccatgagagccgccggatacgacggcattgaactgtgtggatttatgatccaccccattggttttgtggtaaagctgctgaccaaggccgccggtatgccggtgggcaagggcggcaacttggactggcacaagctggtgcaggaggcaggccttcaggtggtcagcctgcacaccgaccttggctctctggagcgggatgcccacgcagtggccgaggaagccaagagcttcggcacacagtatgtggtcatcaccgggatgtaccggtttgattacggcgatgaagccgttatacaccagcttgcgcagcggctgaacaaagccggggaaaccttggcagccgagggcatccatctgctctaccacaaccacaactgcgagctgcggcatgtgaacgcagaaaagcgggcctacgatattttaatcgaggaaacgaatcccgaatttgtcaactttgagtttgacagctactggttcaccgagggcggtgcaaacgccttggcatggatgcaaaggctcggctcccgcatgaagctgtggcacatcaacgaccggggcacccgcatcaccggcagcgccatcacacccatcctgaaaaccgacagcatggagctgggcaccggcaacatggacctggacagcctgatggcgcaggcccttgccatggatgtggatgccgttattctggaaagccaccgcaactgggtggacaactctcctgtcaagagcttccagctcagtgcaaaataccttgcacaaaaattctgacctgccattctctcattattttcttcttcattatccccataaaagcaacgccccacaccggttactccttccggtacggggcgttgtgtcttgcgggggatctttttgcgttacagaatgtgggtgcccggctgcaaggtcaggcttctgccatccgggagggtgacttctgcggtcagattgcagggcacggtgatggtgtaggtcacggcatcgcctgcatactgccagccgctttcaatgcgccccaccggggaatcgtacactgcttttgcccatcccagagccgggttcggggtgggggcgatggtcagggtctcccctgccagacggattccgcacacaccgccaaacagccagccgcagatggcaccgtaggagtaatggttcagggattcgctggggtggccgtttgcgtcaatgcccgtccatgtctcccagacggtagtagcgccctgcttgacctcatagagccagctgggagcggtgtcctgtaacagcagcttataggcggtgtcggcatggccatactttgccagcacctcacagaggaagggcgtggaaaggaagccggtgttcagatggtagccgttttccgccaccatccggttcagggtatccgcagcggcttggctctcctcctcgcccagcagcgcaaaggcaatggcgcggacatattcgcactgccggtccgaagtaatttttccgttatccgtaaaggcagcgcggtatgcctttaccgccttttctgccgtgtcgcggtactgcgctgcgtc

SEQ ID NO: 13768 - DNA, 11710 bp, Unknown
  gut microbiota DNA sequence
agcgcctgcgcaatttccgccagaagtcgcccggaataagccagatacgccgtacccacgcttttgcgcgggttcatcatcgcctgcatgggagtaatgcccggctcacaccactcgccgtagtccagaccgttcagcaccgtgtacttggcgtatgccccggtctgctgttcttcggtggtctgctgggcacggcccagcaggaaaccataccacttttgcatcatctcgtagttgtccgcaaggatcttgcggtcgccggtgcgcttataaagggcgtagggcaccagaatggcggcatcgccccagcctgccgacatgcagagcatgggggtcatgtagccggggcggctggtgggcggcgcaatgtttgccatgcgtccatccgggtactggttcaggcggcactcggccagccatttttccaccaccgggtagcagtccatcagggtcaggccggtctcgatgaacacccccatatcgccagtccagccagcgcgctcgcgggtggggcagtcggtggggatatcgcagaagttgcccttctggctccacacactgtttttcaccagctgatccacatcggcattgccgcacgcaaagctgccggtgaccggcatctccgaatagacggcgtgggcagtaaactctgcgccggtcaggtcgatgtccgtttccacctttgcgtaccggaagcccatgatggtaaagctgggcttgtagtggttctcgccctctttgcaaacgagttccagcagctgcgccgtgccgccctccttgtggcggttccggtcctgaaagttctcctgcgtaaagttgccgttctcgtccagtgcttcgccgcacagcagcttgattttctgcccggcgtgggcggtcagcttcatctccacatagccagccatgttctggccaaagtccagcacggtctcgccgttgggggtgcgcagcagcctgcccgcaaaggcttcctgctcccggatgggcacggtgttcataccggtgatgggcagggagttcggctcggtctttacgccatgccagccggaaagctcctcttccagccgggcatcgtgcacttcgccctgctgcagatcattttggcgaatcgggccgcactgggtggcctccatgtcgtcatccgaaacgcagaccgccttgccgttcacttccagctggaacaggacagccagttcgctgccgaacaggtcacggtcaccatccacgccggaggtgctgcggtaccagccgtcgcccaatgtgatgagtagctcattttcaccgtcacggacaagtgcggtcacatcgtaggtctgtgcgcccaattgcttgtctgcggtaaagctgccgggggcaagcaccatatcgccgacccgcttgccgttcagccatgccgcatacagtcccttagcggtaatgtacagtcgcttgctttctccctccggggcggtgaacgttttgcgcagatagcttgccgggcggtggggctgataaggctgcgcctgccctttgccggaggcttccagcgccgcctgcttctgctcccagttgggctttgcaaaggcgttgatggcatcagcgcagtcgatgtccggctcttctatctccgggcagacccacacgccctgccagtctgcctgtgcaagcccggtctcgaaggaagcggtgctccatgcaccgggctggtcattttcatcccacaggcggatgcgccaccgtccctgcgtcttgggcggtacagcgctgggcgtttcggtgtgcatcacactgcccaaagcctttccgctcgcccacagcgtttcggctccggcagttacttcaatttcgtaggcggtctggcgcacgccttcggcgcactgccacgataaaaacagcgtcccggcatctatgccgagaggctgggtcagatgattcgttttcaggtttgttgcttgcatcatccgcatctcctttttccgtttgatttctgttcttattataaagagaatcccacggaataagggtgcaaaattttgtgttatcagtcaaaaagtcgtgctatttatgacaatttaaaaaattcatcttgcttcacgacttttcatccgtactgtctgcggttctcctgttatactttgggtaagaaaaaaagtttaccgcccacgcagcgctgcgtgggcggtattttttatgctcgcttaaaacttgagggcattggtttgcgtggccgtatctgtccgttaatcgcaccgttccagctttttagcttttgcaaagaacaaccagagcagtgccgtgcatcccaccatgcaggcaggcatgatgaggaaggaggtccggtagccgatggcatccaccaagctgccaaatacggcattgaagaggatatccgccagcgaagccacactcagcaccagacccgatgcagaggaagctgcgtgactaggccagtatcgcgggatcagcatgacaagggtcggatacaggatggagaacagcagaccgctgactgccaggagccacagacccggtgcacccagcagaacacctgcggtgtacagaaccgcagcgcttgtggcgaagagccgcaggcagcggtagatgcccagcttatccaccagactgctcagcaccagacgccccaccatcacacagccgaagaaaacagcggtaaagtttgccgcctgtcccatgggcacttccagtgcattggtagcatagctcaccagccagttcataatgccatgttctgcaatgaaatacaggccgatgatcagcaccaacgacagaaatgccggacagctcatgatctccttgggcgataccttcccctccgttttgtgctcctgcacttccggcatggggaacagcacgaacagcaccatggccactgcgccaatggccagcagtccccatgccacggtgtgccagctggaaatatccgtagcccagttgccaatgatgctctggctgccgctggtgccgatgccctgaatgaagaacaggaagttcacaaaaaagccaggcgcaacggcaaacataccggtcgtgatcaggttcatgttggtgttcagcagtgtggatgtgcccatggcaaaaaacattcccacaagcagcagcagataggagtccgtggtggcaaacagcagcatggctgcgctccacaaaaaggtatacagcagcatggccttgcggcggcccagaatatccaccccgaagccgccgacggccagaaacacgaggttgccgatgtagcttacggtgacgatctgggacaactgggcggtactcagctggaagtgggcagagaagatcgtggaaaaaatgccccgcatggcatcgttcgcgcccagacccaccatcaggatcaggaacgcggcaaacgtgatgatgttctttttcttgttcattggtttatccctcaaaagaagccgccgcacggcccgacccggcaaaaggggccagcgccgatgcggcggcttgctcattattgataggcggctcagcccagttcgatgctctggtactccggggcggcagcctcagcagtcagacccatggtctgcacgttggtgcagttctgagtaagaagcgcctgtgcgaagtccgaacggtcctcgcccgcaaagcccagcgtggagttccggacggtgacgccatctacccagcgcaggaacatggctgcactcttctgatgcagcatgccttccttttcaggcggaatgggacgcagatcgtacattccccgctcccacttgctggtagcttccagacagacgttgacattttcaaacagaacgttcttgatgtgattctcctcgttgccagagaggaacacaccgttctcacccttgcaggtgacgttgaagaagcggacattctcgatgctgccgctgtgggtgttggcgttccggtcgtgggtcgtcatcacgataggctccgcgcagccccaccagcactcggcaaagcggcgggtctcgatcatgatgttggagaagctcacgttccgcacacagccgccgtcgcgaatctggatggacagaccccggttgcttccagtgatgatgcagttatccaccagaatattctcgaaatctgccacgccctctgtgccgatcttgatcgcggcactggtagaggtcagcgtgcagttggagatgatgacgttcttggtggggccgtactcgttgttgcccgctgtggtcttgaggcagatgcagtcatctgcacactggacatggcagccgatgatccgaacattggtggagtgatccggatcgataccgtcggagttggtgcagtccagcgggttcagcacccggatgttggagatcagcacatcgttgcatccggcagggtgcagcgtccagaacggagagttctgcagtgtcacgtcatggaacgagatgtggttgcagtgctccacatacaccatggtgggacgggggtagaaatcaccgttgaagtagtaacggcttgcccgcttcataaaggcataaacattgccgtccactgcgccctgacccgtgatggagaagttgtctgcatccttggcgtgaataaaggtgtaagccggttttgccaccggacgatccacggcctttgcgccggaaactgctgccacggaagcatcatcgccgttggggttgaaataggtggagatatcggagtgcgctttcagaagggcgccctgttccagatgcagctctacgttgcttttcagctcgatagaactggaatagtaggtatgaccgccctccagtacaacgcggccgccgcctgctgcgttgcaggcatcaatggcagactggattgcagcggcatcattggttgcgccatcgccgacagcgccatacttggtgactgaataaaccatgaaaacttgctccttttcacattatcagactgcgccgaacagggtaggcagcgccatggagaaccaaggcacataggctaccagcatcagcgccacgaagatcgcggcatagaacggcaggatcggtttgatcatgtcctccatatccatatctgccaccgagcagccgctgaacagtgcgctgccaacgggcggggtgatgttgccgatacccaggttcatgaccatcatgataccgaagtggatggggtccataccgaaggactggacaacgggcaggaagatcggggtgaagatcaggacagccggggtgatgtccatgaagcagccaaccaccagcaggacaaggttgatgatgagcaggatgacgtacttgttgctggaaacgctgatcagtgcgttgccgatggcgctgggcaggccggtgaagctcataacaaagctcatgacgttggagccggcgatcaggaacatgatgacagcggtggtctcgcaggcgtccagcaggatcttgggcagatccttgatcttgatgctgcggtaaacaacgatggacaggaacagggtgtaggcaacagccacagcagcggactccgttgcagtgaagataccggacataacgccgccgacgatgatgacgatcagcagcaggctggggatggcgtccacgaagtacttgaagaaaacggaagccggaaccttaccagcagtgggatagtggttcttctttgcgatgacatacgccaccaccatgcaggccagtgcccacatcaggccggggatgtagccggacatgatcatgcccaccacagagcagccagccagcaccggatagatgatcaggatgccggagggaggaatgatcagaccggtaggtgcggaagcgatgttgacggcagcagcaaactttttatcgtagccttccttctcctccatggggatcagaacgccaccgatagcaacggaagctgcaacggaggaaccggacagagagccgaacagcgtgttgcccagaatgttggtgtgtgccagaccaccggggatgcggccgaccagaatttttgcgaaatcgatcagtttctgtgcaatgccgccggtgttcatcagaacaccgcagaggatgtagaacgggacagccagcagcgagaagctgtcaacgccgcccaccatgcgctggctggcaacgaaagtgcccagatccagagacagggtggaggccatggtcacgaccgacgaaatgatgatactgaccgagaccgggacgctcagcgccagcagcagcgcaaacgtgccgatcaggagcagaccgacttgaaaagtacccattttaggttcgtcctccttttttatgcttctttggcagactctgccttggggccctgcttcatatcgcgcaggtcctcaccgatgaagatgagcgcgtagaagatgaacaggatggcacccacagggacgctggcgtagatcaggggcatgggcagctgcagcgcagcgctcagctgatccgcagcggtgttgacaaggcgcgtgccgccgccgatcatgacaacaacgcagaacaggatgaccatagcctgcacaaagatatccaggatcttctggcccttgaaggacagacgcttgctcagcgcggtgattgccagatgcttgcggcggccgtatgcgtaagcaccgcccaccatggtcacccagatcagcagataacgcagcgcttcttcggtcacggtgctggggttgttcagaatgtagcgggtgatgacctgccagcagacagcaatgaccatgacacccatgataatggtgctgaggacctgaatgatcttatcgatcaggccgcggaatttaacgatcaacatggtatgcttccctcctcatcaagcctgtacataggacaggaagtcctcgtaataacgagcattgtcggcgctcttggcacagaactcgtcgcgcagggactgggtagcctcgataaaggccgtcttgtcgatggtgtagaactggacgcccatctccttggcaccgtcaatgttctcctgcaccagatcctgccatacggcctcgtgtgcttcgttgccctgcgtcatgccgtttacgatggcactctgctcggcctcgtccagactttcccaagtctcggtggagatgatcacgatatcgggcaccatctggtgctgggtgtaggtgtagctcttgcagacttcaccgtggccgtcctgcaccagaactgtctcgttgttctctgcgccgtcaataatgccctgctgcagaccggtgtaggtctcgccgctggacatgggcgttgcactgccgcccatggcacggatcatggcaatggacgtggggctgtcctgggtgcggatcttcagacccttcaggtctgcggggccttcacaggggccgtctttggtggtgtagatgctgcgggagccggaatcgaaccagccgatggcaaagaagccctgatcgtaggtgctcttgaagatctcctgcaccgcttcgctctggttcataacggcaaaatactgctcggtgctctcaaatacatacggcatcgagaagatggcgtatgcgctgttgaactgctccatgctggaagcagagacctttgcaatatccagaacgccggccttgaccagctggatcattgctgcgttgtcgcccagctgaccattggggtaaacgctgaaggtcaggtcagattcagcagaagcaacttccgtcatcttctgcagtccaacgttgaccgggtgcgcttcgctgtggctgtgtgccaccagcagatgcttggagctcaggccgtctgaaaccgagccgctgcatccggtgagcgacaggcttgcgcctacggcagcaagacctgcagcagccagaaagctgcggcgagtaatacgtcttgttcctatcatgattgacatctccagttttctttgtttgattgactgcatacaaaaccggttttgatctcctgtcggtcagagtgaaatttatcccttccgcaaagggcttcgggctgcgcattccctaccatttctgttctgccatgtgcaacaggctttccgtcaataaaaatagcgcaaacgcgttgtaatgtacaggccttttttggcaaaaaccttgcatttcttggtataatccagccttttttgcaaaattgttggcatttattggtcaaaacattgcatatattggtacatcgtgttatgatgaactagcccaaaagaattttttgaccggaggtatttttctgtgaaagtcgtcaaaactgataaacattacatggccgagccggattttgagatcgaccattacaaggatgccagctatcctccggtcgcttctcattaccatgagttctatgaaatttttctctttgtcagcggaaatgcggattatgttgtccacgacaaaatgttccggctcaaaccgggagacctgctgatcatcccacctgccattatgcaccatcccatcttccgggactttgagattccctatgagcggtatgtgttgtggctcagccctccggcttttgataccatgaaaaagatcgacccggacatcgattactttctccgtccgggtcatgcaaaaacatttttgattcgggatagcgtggacagctcccgcgcccggttcgggcagtttgaagccctgacccacgcttaccgggaggaaagcctgtgttaccacagtgagggcatggccgatattctccgcatcctgatcggcatcaaccgctccttatataatcgggagcacgtttttgccaaggcgcagaaaccaagcgtcctgagcaacgccctgcattatatcgatttgaacctcagcggcgatctttcgctggacacggtggcaaaggcgcttttcattgataaatacaatttttcccacatgttcaagcagaatatgcagatcagcttttaccagtatgtcatccagcagcggctgctggaagccaaacgactgctgatgaaaaaagaactaatctcttccatcccggccaaatgcggtttttctgattataacgccttttaccgctcctttaaaaagaattacggtgtcaatccgcgcgaatatgtcgcttaccacatgaaggccatccacggtgaagttggcggcttgtctcttgatatcgaccaccagagcacagaatcctgataggttcctctgatttccgtcctttttatagaattacagcctttttcttcttggcggcagcaggcggccttgccgttttatctccaccgacttggcagcattgatttgcgtggccgcacaccaaaaccaagtccaggtccaggaggacactactatgatggaactgctttcctgccgctacaacatggataccgcaattcaactttttaatgtagcagctacaacgttggattgcatatcgccaatatactatttatatgttgcactgatttttatctcgttacggtttcgcaataagaccaaagtggtgggtatcacgatgaccccaccactttagctaagtaaatttttatttttgaatcgaaaaatggaacgaggtttccttctccaccgcaaagcaggtgtccgcgtggggctttgcgccccagctattatcgccgcccacgcctcgctggaacaaagcacaccggacgaccgtcttattgtcatcccggggcagctcatagagatggcgggcattttccagctcatggggcgtatagggcagtgccgagaaggtcatgctgtcccctgcaaagccgatgcctatgttcaatccgctgccggtgaccgctgcgctgtacacgtcggtgcggctgccgcactcctgcggatagaccggggtgttctgagcaaaatcctgccggacattgtagctccaagcgcccattttgccgcctgcggtgcggtcggcggtggtttcccgggggccaagacccagataagagacctccgtcagctcccggcgcagcgggaagagcagaccgaactccggcagttcagtgcgcgcgccctgccatgtcatggtgatgtcacagcggcctgcgccgtcgatggcaaaatcaatgggaagcgtctgcccatctggcagggtgtagtttgcgcggacgatgacgaactcatcctttgcttcggcagtcagattatcgcaccgggcgtagagaccggcggttttccagaaggcaaatgtaaaaggttctgcgcagccctcgtcgttgttggtgggcgcacgccaaaagttggggcgcacggtatcgtccaacagctgcacaccgttgtagcggatggatacaaggcccttgccgcggccaaagatgtactcgaagcccttgcccttcacgccgatgttgcagtccatctccaccagctgcggggcgggcagggtcagccgggcggcgtagttgtgccatacctgcccaaaggcagcttcatagcccgccgggatgccgggctttgcagcccgctggatagcggtaacggtcatgcaggcaagccctgtctccggcaaggcaaaggggaacagcagatgcaccgtttcgccgggtgcacagtctgcccgcagcaccgcccggcgctccggcttgccgttgaccgaggacgcaaacacaaggtcgtaggcgttcaggtcggtaaagagattccggttttcaatcacggcttcggtgtcggtcagggtgatcttcagcggtgcgtaggccgccttgacggcgtccattttgggggtgttacggcggtcgggcagtacaaggccgtccacgcagaattcccggtcggtggggcggtcgccgaagtcgccgccgtaggcaaagcagggcttgccgtccgggtcagtgaccgcgatgccgtggtccatgtactcccagatgaacccgccctgatacagcggttcttcgtaggcatactcggtgtagtcggtgatgccgccgcagctgttgcccatggcgtggctgtactcgcacatgataaagggcttttccgggtgctctgccagaaactttttgatgtctgccaccggggtatacatctggctttccatatcggaggtggcggggtattcccggttccagaaaataccctcgtagtgcacaaggcggctggggtcggtgcggcggaagtattcgctcatctcccacagggtcttgccgccgtggctctcgttgccgcaagaccagatgaggatggccgggtggtttttgtcccgttccagcatcgcttcggcgcgagcaagcacattttcccgccactccgggcgcgcaccgggcagcgtccactcgtccgagccgtccgcgcccagcttctgccatgtgccgtgggtctccagattcgtctccccgatgacgtacaggccgtattcatcgcagagctgcagaaaatacgggtcatccgggtagtggctggtgcgcacggcattgacgttgtgggccttgaggttctttacatcccacagcatctcttcccggctgacggtgcggccggtgcggcagctccactcgtggcggttgacgcccttgaacacgatacgctggccgttcaaaagcatctggcggtctttcagctcaaacttacgcaaaccgactttcagcccggtgcgctccaccagagcaccctcgcgcagcagggcaatttctgcttcgtacaggttcggctgctcggcactccacagggcggggtcagtcaccgcaaaggtgaaggagacatcctgcacgtcctcctccacatccggggcaacctcgcccttgccgaacaccacgccgctgtcgtattccgcaggctcgcccacctcagcagactgctgctgcccattgaacaccaccgacaccgttcccgcgccgctgaccttgcaatcaaaggtgacggcagcactggaaaaatcatctg

SEQ ID NO: 13769 - DNA, 19418 bp, Unknown
  gut microbiota DNA sequence
gcatttgcctttttcttcgcgtcagacagcatattcaacctcttttccggtgggggtgttgctcaaagcgtatacttccccataatcattatagcactttttacacttgttgaacagtgtaaaagtgcacaaagttcacggtttaaccttgtatgtcctgtcaatggatacacacgacattttatggtatactgatactgggagaacagaagcacgattaaaattcactcgttggaactgaccgcgtccgctgcggtatgattccgccgggtgtttttcttttttcgggacgctcaaggtgccccgaaaaggcatttttcgagttataaggcataaataaggcacattccaactgaattttaagaagcaaacaacaaataaagccacgacagaaccgcatttatagacggttcatcgtggcttttcttgtggtcggagtggcgagactcgaactcgcggcctcctgctcccaaagcaggcgcgctaccaactgcgcaacaccccgacatctggcggcacagctgcaccgccagaatatagtatatcgttttttgcgcggttcgtcaatacagaatccgcagttaggggcattggtgcttttcgactttttcagccaataaaagcagcagtgaggaagcgggcgatgacaggcatcttttgcaaaaaggtgaggttttggtgcaactgccgaaaagcggatgcaaaaactggacagaacacaaaatttgttgcgctctagttgcaagcaagccggaaaggtgctatcataacactatatcgccgggaagtgcggcggtgggaaattagacagaggctgaaaagaaaggcacggcgtaagcgatgacgatacaggaatgctataaaaagatgggcgcagactatcaggaggtgctggggcggctgcacaacgaagccatgatcggcaaatttgtgcggatgtttttgcaggacgacagctttcagatcttggaggaagcgctgcgcaggggagacgtgaaggaggcgttccgcggagcacataccctcaagggcgtctgccagaatctgggcttttccaacctgtatgcgcccacctataccctgaccgagaccctgcgcgccgggcagctggagggcacacaggagcagtttgcaaaggtggaagagcagtatcaatgcacgatggacgccatccgtgcactggactaaaatagaatgcggtgttgggcggctttcgggctgcccgacattgttcttttacgggatgcgtctgaaagcacagaaccgcccccttgtgccgccgcacagtttgcggtatgatagacaaaaaagagggaaggagactccattatgtccaaacatatccttgtctgtctgcccatcagcgcagagcagaggacccgcattgaggcggtgcagggctttgcatatcgctttaccaccccggatactgccacggtggaggatgccctgtgggcagatgccgtgctgggcaatctgccggtgccgctgatccggcagaacggccatctggagtggtttcagtccaacgcagcgggccctaataactatctggagccgggggtgctgccggagaagtgcatcgtgaccaacgccaccggcgcttacggtctggccatcagtgagtgtatgctggcaatgtggctcagcctgctcaaggagctgcccacctaccgggacaaccagcgggagcaccgctgggcacccaccggccactttgtgggcagcattgcgggcagccgggtgctgtgcgtgggcatgggcgatatcggctcgaactttgcccggcgggcgcatgcgctgggtgctgaggtggtgggcgtgcgccgcaccgtgcacccggatactccctgcccggactactgcacccgggtggtggcgcagagcgcattggacgcagaactgccgcaggccgaccttgtggcgctgagcctgcccggcacgccggagacgctgcacttgttcaatgccgagcggctggcgctctgcaagcccggtgccatcctgctcaatgtggggcgcggcactgccgtggacggcgaggcgctggcagcggctgtgcacagcgggcggctttccggcgcagggctggacgtgaccgaccccgagccgctgccgccggagcatcctctgtgggcagagcctaacgtgatcatcacgccccatgtcaccggcggcttcagcctgcccaagacgctggacaacattgtggatatctttgcacataacctcaaacgctatgccgccggccagccgctggataaccagatggaccgccgcacccagtacgccagcggcgcacggctgcaaagcacgctgtaaaaagcaaaaactgccgcacaactgtgcggcagtttttgtttttgtagtttacagcatcactgcgcctgtgcaaggcaggcgtccatggcggtaaagatggcctcgctggtcatggtggaaccggtgatggcgtccacaccggcggtggagccggtctgtgtcagctgggcagccagcgtctcggcagctttgccgcccagctccggggtctcggcagaggcgtccacttgtacggcggtcaccttgccgccggtcacggtgaccgtgacggtcacttcactcaggcaaccctgcgcagaggaggtgtagctgccatcggtcagaggtgcggcgttgtcggcggcgggtacggtgccggtgttgtggatatacaggttcagcacaatgcccatcagcacggtggccaccagcatgagcaggatattacgggtcatttttgcggtcatggtatggtatcttctccttgaggatgattattttgcgggcttgaagctgtcgcgcagggtgactacccggttgtacacgccggggttcttgctgtccggggtaaagaagccggtgcgcacgaactggaacttttcgccgggctttgcgtccttcaggctctcttccagcttgcagccggtgcgcacggtgacgctttccgggttcaggtagtccttgtagtcactgccctcgggaatgccgttcatgttggcttcggtgaacagcttgtcgtacagacgcacctcggcgtccacgcagtgtgcggcacttacccagtggatggtgcctttgaccttgcggccgtcggcggggttgccgttgccggtctcgaggtcggcagtgcagtggatggcggcgatgctgccgtcggcgttcttgtccacgccggtgcacttgacgatataagcacccatcaggcgcacctcgccgtccacggtcaggcgcttgaacttgggaggcggaacctcggcaaagtcctcagcgtcgatccacagctcgcgggtaaaggccaccttgcgggtggtggtatcgttggcctcgcggttggggttgttggctacgtcaaagtattcggtcttgtcggcagggtagttgtccaccaccagcttgaccggctccagcacggcaatgcggcgctgtgcggtcaggtccagctcgctgcggatgcaggcttccagctgacgcatatcaatcaggttgtcagacttggagatgccggcttcccgcacaaaggtgaagatggaggtgggggtgtagccgcggcggcgcagaccgcacagagtaggcatacggggatcgtcccagccgtccacgatgcccatctccaccagctcgcgcaggtagcgcttgctcatgaccgtgttggtcatgttcaggcgggcaaactcgcgctgcttggggaactcggcaccaaagatgttctcgatgacccagttgtacagcgggcgatggttctcgaactccagactgcacatactgtgggtgatgccctcgatggcgtcctgaatggggtgggcgaagtcgtacatggggtagatgcaccacttgttgccctgacggtgatgctcggcgtacttgatgcggtagatggccgggtcacgcatattcatgttggggcttgccagatcgatcttggcacgcagggtcttttcgccctccttgaactcaccggcacgcatccggcggaacaggtcgaggttttcttccgggctgcggtcgcgccacggagaggggcgggagggcttgccggcatcggagccgcggtactcgcgcatctcctcgcgggtcaggtcatccacataagccttgccctcggtgatgagcttctcggcgtactcgtagcacttgtcaaagtaatcgctgccgtagaagatgccgccgttggggtcggcacccagccagtgcagatcctcgatgatgctgttgacatactcctcgccttcgcgggcggggttggtgtcgtccagacgcaggttgaatttgccgccgtactggttggcaatggaccagttgatataaatggccttggcgctgccgatgtgcagatagccattgggctccggcgggaagcgggtgtggatctgctgcaccttgccctcggcaaggtcggcatcgatgatatctgtcagaaagtttttatcagccatataggttccccctgtcagggcacagcgtgcccccttttactcataatactatataatacactattttgcgtttttcttcaagtacggagttgcacggaacacgggggtaatcctctgaataaaggcttcccccggtcgggggaagcctttagcggaaaatggatgaaaaaggatacgaagcagtcttagttgaaggagcggaagcccttgccgatgatctcgctggagttaacgatggtgataaagctgtgggggtcgttctcccgcagaaagttgcgcagctgcaaagcctgacggcgggtcagcacggtcaccagcacgctgagctcgtggtgggtgtaggcaccgtaggccttttccaccgtggcggagcggttcatgtcgtggatgatgaagtccagaatgggctgtggatttgcagtcatgatggtgcacaccttgcgcagacggatgttttcaatggcaccgtccactacgaaggacttgccgatgagaccaaggatacagtacaggccggtgcccatgccgaaccgcacggcggccgccagcacaatgaggatatcgctgaccatcagcgccttgccgatctccatggaggtgtacttggcaaggatcagcgccacgatgtcggtgccgccggtggaagcaccgatatcaaacacgatggcagcgcccagtgcgggcaggaacaccgcgaacaccagatccagcatggcatcgccgctcagggacacgccggaggggtacagccactcgcagcaggacacgaaaaaggagagtgcaaaggaggagtagatcgtccagcccatgcacttgatgcccaaaaagataaagcccagtaccaccagcaccaagttgatgatccacataaagccgcccacgttgatgcgggggaacaggtctgccagcagaatagatagacccgaggtgccgccgaaagcaaagtggttgggatttttaaaatatacgatgcccactgccgtaagcacaagaccgaggttcaacagggcaaagaaatttagatccttcagcagattctcgcggctgaaggcttcttttaaaccattcatgggtttcctccatcaaaaaatacagtaatttggcctgaatgccatgcaaaaatatactctccttatacggggaagtcaagggataacggagaagttatagaaaaagacggaaaacaaccgataaaaggtgaaaaaacaggaatatccggtgcattttggacgtaaaagggcaaaacaaagcgccgcccgcagacggcattgtctgcgggcggcgcggagattcagttcaggaaaaggggaaagcgcttacaggttgaagtaacgctttgcgttgtcgaagcagatgcccttgacgatcttctccagagccttctcatcgttgggatactcgccatcctcgacccactggccgatgatgttgcacaggatgcggcggaagtaatcgtgacgggtgtagctcaggaagctgcggctgtcggtcagcatacccacaaagttgcccagcaggccaaggcttgccagacggatcatctgatcctccatgccgatcttgtggtcgttgaaccaccatgcagaaccgtgctggatcttgcccggcacctcgctgttctggaagcagcccagaatggtgccgatctgtgcatcgtcggcggggttcaggctgtaaatgatggtcttggggcactcgtcggtgtcgttcagggcgctgagcagctgtgcgatctcgccgccgcaggtggcggtgttgatcatgtcaaagccggtgtcggggcccagcaggctgttcatcttgcggttcacgccgcgcaggcagttgtagtggatctgcatggcaatgcccagacgatggtactgcttgcccagatggatcaggatgtaggtctggtacttctcagcctcttccacggtgcagctctcgcccttcatcaccttctggtagatggcgttcacctcgtccttggtggcctcacggtagggcacataatccagaccgtggtcggaagcgcggcagcccatctcggcaaagaactcgatgcgcttggtcagggcatcggtcacgcagtcgatgcaggccagcttttccttgcccacaacggcagccagcttagccatgtactcagcaaagccgggcttgttgatgttgatggccttatccgggcggaaggagggagccacggtgaacttgatggtgggatcttccttgatcttcttgtgccagtacaggtcgtcgatggggtcatcggtggtgccgatgaaggccacgttgctctgctcgatcaggccgcggacggtcagtttgggatcgtgctgcagcttgtcgttgcacaggttccacacttcctcagcggtgtcgccgttcagcacgccgtcgtagccgaagaaaacgtgcagttccagattggtccagtggtacatggggttgccgatggccatgggcagagcctcggcaaacttctggaagcgctcgcggtcgggcttgtcaccggtgatgtactcctcgggcacgccgttggaacgcatcacgcgccacttataatgatcgccgaagtagctgccgtccgggttgcggccgcccagccacacctgagtgatgttctcaaagcggcggttctcgtagatctcgcggggaggaatatggcagtgatagtcgcagatgggcatagcagctgcatagtcgtgatacagatgctgtgcggtagcagactggagcatgaagtccttatccataaatgctttcatgggattttaactccttttctctgatgaatttgttaaaatttagacaaaaacgggcatgaaattgcacctgcttggaacgggcaggctgccttatccttagtataccggaaaatgccgatgtatacaactgaaaaactgccaaaatttcacccttggaattgtacaaaccgctggaaatgcgctgaatagccatttttggactaaaaacattgcacaaaacacttgacttctttgtatacaacagcataaaataggagcagaagatggcagggaaaacgagagcctgccatgcaaagcaagtttataaaggagatcaataagatggaaactttgaactacaaggttctggaaggcactggctacaacggctacatcctgaaggatgctcccgttaaggtaatgcagtttggcgagggcaacttcctgcgcgctttcgtggattatttctacgatattgcaaacgagaaggccggctataacggcaaggtcaagctggtgcagcccatcggcaacttcccccagatggcagactggatcaacgagcaggagggtctgtacaccctgtacctgcgcggcagcgagaagggccagaaggtggacgcaaagcgggtgatctcctgcgtgtctgactgtgtgtgcccctacattgatggcaagtgggacgaggttctggctctggctcgctctgaggatctggaaactgttgtatccaacaccaccgaggccggcattgcctacaccaagggcgacagccagttcgatcaggttccccccaacagcttccccgcaaagctgacccgcgtgctgttcgagcgttacaaggccttcaacggcgctgccgataagggtctggtcatcctgagctgcgagctgatcgacaacaacggcaaggagctgcagaagtgctgcaacaactacgctaaggattgggatctggagcccgctttcatcgactggatgaacaccgccaacaccttctgctccactctggtggatcgcatcgttccgggccgcatccgtgatccgcaggagttggccgctctggaagaggccaacggctaccacgataccgctctggacgtgggcgaagtgttcggcgtctgggtcatcgagggccccgcaggtctggaggacaagctgccgttcaagaaggccggcgtcaacgtcatggtcgtgcccgatgttaccccctacaagaagcgcaaggtccgcatcctgaacggtgcacacaccggctttgtgctgggcgcttatctggcaggctttgatatcgtccgtgactgcatgcacaacgataccgtgcgcggctttatgaacaagatgctgcacgaggagatcatccccaccctgccgctggacaagaaggatctggaggactttgcctctgctgttgaggatcgcttcaacaaccccttcgtcaaccacgagctgatgagcatctccctgaactccacctccaagtggaaggcccgcaacatgccctccttcctcgcttacatcgaggagcagaagcagctgcccaagtgcctgaccatgtctctggctgcctacatcgccttctactccaacgatattcaggagcgcactgctgacggcctgatctgcaagcgccccgcaggcaacacctacaagatccaggacgacgcatgggctctggacttctactacgcacacaaggacgacaccgctgcgcagctggtgcacgctgtgctgaccaacacccagatgtgggatcaggatctgaccaagatcgagggtctggaggccgctgtgctgacagatctggaaatgatccgcacccagggtgccgaggctgcttacaagagctgcctgtaagctgaaaaatcaacctacccgcacaacaaagggctgctgctttgggcagcagcccttttgtgcgatacgataaggagaacaactatgccgcaggcaattcatatcagccccatcgacaatgtggtcgttgccctgcaccccattgccaagggcacgctggtggaggtggacggccttgccgtcaccgcactggaggatatcccgcagggtcacaagatggcagtcaagcccattaagaacggcgagaacgtcatcaagtacggcttccccatcggtcatgctaccgcagacgccgcccccggcacttggatgcacacccataatgtgcacaccaacctgtccggcgaggtggagtacagctataaccccgccccggatctggctccgctgcctaaggtcgagccggagacctttatgggcttccgccgtaaggacggccgcgccgccatccgcaacgagatctggatcatccccaccgtgggctgcgtgaacgatatcgccaagaagatcgttgccgacaatcaggatctggtcaccggctccatcgagggtctgtacaccttcacccatcccttcggctgcagccagaccggccacgaccacgcacagacccgcaagctgctggctgcgctggtgcgccaccccaatgccgccgccgttctggtgctgcatctgggctgcgagaacctgcagcacgatcagttcgtggaggagctgggcgagtacgaccacgaccgcgtcaagttcctgacctgtcaggatgtggaggacgagtttgccgccgcccgcgatatcctgaaggaactggctgcctatgccgggcagtttgagcgccagcccatccccgtgtctgagctggtggtgggcatgaagtgcggcggctcggatggcctgtccggcatcaccgccaaccccaccatcggccgcttctccgacatgatgggtcagcgcggcggctctaccgtgctgaccgaggtgcccgagatgttcggtgcagaaggcttcctgatggaccgctgcatcaacaaggaagtgttcggcaaggccgagcacatgatcaacggcttcaaagaatacttcatcagccacaacgaggtggtgtacgataatccctctccgggcaacaaggccggcggcatcaccacgctggaagataagagctgcggctgcgtgcagaagggcggcactgcccccatcatggacgtcatcggctacggcgaccccgtggtgaccaagggcctgaatatgctctacggccccggcaacgatctggtctccgctaccgccatgacggcagcaggcgcacacctgatcctgttctccaccggccgcggcaccccgttctccgctccggctcccaccctgaagatctccaccaacaccccgctggcagagaaaaagggcggctggatcgatttcaacaccggtgtcatcgcagacggtgaaaagaccatcgacgaggctgcaaaggatctgctggatctggtcatccgcgtggccagcggcgagcagaccaaggcggaaaagcacggcttccgcgagatctccatcttcaaggacggcgtggttctgtaactgaaaaaagggctgctgtacggcaaaaagcggtacggcggcctttttgtgcataaaaagaaaggaagtgtatgaaatgttgggcacaaatggagtgctgctgttgacactgctgctttatgcggctatcatttatggtgtagtacgattgatcaaatattttatccgctacggcatcgattactacttcaaaaagctggatgcacggcagaccgagcaagaaaaatgacccgccggggcgacccggcggcaataataggaggcttttacttatgaatcagatcaccacccggtacatcaccgagaacggcgcctgctacgagcagtacgtcatcaccgaccccgaggcaaagaccgccctcaccatcaccccggagcgcggcggtatgatcaccagctttacgctggacggcgaggagttcgtctggacccgccgccccaatttctcggagtgcaaccgtccccgctttggcgtgccggtgctgttccccagctgcggcaacccggacaacggcgtgcacatctttgacggcaaggcttaccccatggagacccacggctttgccgacctgtgcgcatgggaagtggaaagcgttggcccggacggcgtgacgctggcactggagtccaccccgctgaccaagttcctctacccgttcgatttcaccctgctgctcaactataatctggagggcaacaaggctctggtcagcctgaccgtcatcaacgagggcaacaccgatatgcccttcagctttggctaccacccctactttaccgcctccaagctggagaacgtggagttcgacatcaagtgcgctacctgctccgagaacgccaaaggcgagcagcctgccgccccggaaaagatcaccctcacccgcaaggagggtgcagacaacaccatccgtctgctgaccggtgtgcagttccccatgacctttaccgacaagggcaacggccacaaggtgaccgtggacgcggacgagacctttgaaaacggcgtgctgtggcagcaggatgccgagagctttgtctgcatggagccttggaacggctgggcaaacagcgtgaacgaggacggcaagcacgaggtgctggagccggacgaggccatgaccagcgagtggagcatcaccatcgagaaggcctgaaaaaccatttgaaatgcgcgccgcgctgctttgcgcatagtcagcggaaaaattattcttaatttggggctcaggaaagtctgcggagcttgtcggggcaaagcccctccatctgcttgcgcagaccgctctgccgcttaaaagcctcactggggcttttattgctgcgcaaacgcggactttcctgaaccccttttttcacgggaaaggagcactcttctcaggatggtgcaaagcttttgatttcagtaaagaaaatttagcacgctgacccgcagcgccgcgctttcgcagaaagcggcgctgcgaatgccgttttcagccacgacccacctgtgaaaatggaataccggagcgtccgcagacgctccggtattccgaaattataaatattttttccttagcttatgcccagagcgcaagcggagggcattcaaaatcgtcccgcccggaaaggggagcggcctttagtggcagctaccggtgcagccgcccttgtcggcgtggcaggcatgagagccgcagctgtgaccctcctcgtggtcgtggtgggtgcagcgggcgttggggtcaaagaccagcgtgccggcaagataagccgccgcagcgctgtcggcgtcgccggtaatgccgccgcacagccggatgccggcctgtgccagcgccatctgtgccccgccgccaatgccgccgcacagcagcacatttacgccgttgcgcaccagaaagcccaccagtgcaccgtgcccctgcccgtcggtggagaccacctcggcaccggtgatgcggccctcctcggcggtgtacagcttgaactgcgcagagtggccgaagtgctggaacacctgaccgttttcgtagggaattgcgatcttcataataagagctccttcctgtatgcaatattctctttccctattctaacagattgcggtgaaatagggaaggacacccgcgctttttgtgccttttggagcggaaaacatagccggtatgtaaaaatgatatcagaaactgctgcaaaatgtattataatagagcccgaaaagagggtacaagtatgaaaacaaagcatcacgggcaaatgtccgagtcctttcttacggcggtgttcctttcgctgtccggcggcttgcaggatgcctacacctatctgttccggggcaaggtgtttgccaatgcccagaccggcaatatcgtgctgctgagcaccaatatcatggatggccggtgggataaggtgctgcactatctggtgccattgtgcgcctttgcgctgggggttctggctgcggaaaaaatgcgggagcactttcaggtaatgcagcggctgcactggcggcagctggtggtgctgggcgaggtgctgctgttgttcgcggtgggctttctgccgcaatcgcagaacctgctggccaacgccattgtttccttctcctgcgccatgcaggtacaggctttccgcaaggtgaacggctacgcctttgccagtaccatgtgcatcggcgacctgcgcagcggcgtggaggccttttgcatctggcgcaagtcccatgaaccccacgcaaaggataggatggtgcgctacttcggcatcatattcctgttcgcgttgggggcagggctgggcagcaagagcgcggcgcagctgggcggcagagccatctggctctcctgttgctttttgctggtcagctttacgctgatgttcatccgggaggaactggaagagaacccggtcatcgaaaaagacctgaccgccatccggcaggagacccgggagatcgaccgcaccctgaagcaggaactgcaggaggagcagcgggagctgacgcagagcgcccggaaataacaaaaaaggggctgttgcacatcattggtgcagcagccctttttggctgaaagctgtcggaacaaaaggcttcccccgaccgggggaagccttttgtagaaaccgttaggattgcagtcgtgtaataacgcccggagtattggttttatttacgctctgcgctccgtgtcccggccttggtcagcagctgctggaatttccgggcggcggtgttcagcgggcggtgatggtcgtagacaaggcagatggagcgggaggggatgatctcctgcaagtgcagctgtaccagctctccgctggccagcaggggtgctgccatgggctccggcataaaggccagtcccaactcgcttttgaccagcgtgagcatctggtcggtggtggcggcctcggtgtcaggtttcagcactgcgtcatgttccagaaagaattgccggtaaaagctgcgggtcatgctctcctcgttcaggcagatcaggggataaccggccagttccttcaggctcagggtctggctggccagcgccgtaaaggtctttccgcccacaaggacttcataaaagggcatcagctctaccattttcagcccgttttccacctctgcgggggtggtcacgatggcaaaatctacctcgccgttgcgtaccgcctgcaccgcctgcggagtggagtggttggagatgcgcagccggatgcccgggtactctgtatggaaagcgcgcagcttttcggacaggtagatgttcaaagcggtctcggtggtgctgatgctgatggcaccgtgctccagcgtggcggtggcgctcagttcctcctcggcatcctgtatctgcaccgctgctgaggcaatgcgggaatacagcagctctccctccggcgttaaggtgacgccccggttggagcggatgaacagcacgcagttcagctggctttccagccggttcatggcgtgggtgatgttgggctgattattgcccagcacccgcgccgcgcgggtaaagttctgatactttgccacatagtaaaagattttgtagtattcccagtccacatacataggtgcggccctctttcctgtcgggcttccggcgcggccagcggcagaagcggctttatgctcttcttgtatcatagcacggcgcgccggaattgcaagcgctttttacggcttggctgtgccggatgcgggcagcagcctctgcaatgtaaaaaacatattgctgctatacacaggatactttttacatattctctgcacgctcgtataatagacaccgcgaacaggaaacaagaatgaaaagaaggtaaatgaagtttatgctgaccgctgttactggaatcaactggggcgatgagggcaagggccgcgtcatcgacctgctggccgaaaatgccgatatcgttgcgcgctatcagggcggcaacaatgccggtcataccgttgtgaccgagaagggcaagttcatcctgaacctgctgccctccggcatcctgcacccggaggtgacctgcgtgctgggcaccggtatggtgatcgacctcgagcatctggccggagagatggaggccattgaagcgcgcggcgtaaaggtggagccggagaacctgaagctctccgataaagctaccatctccatgccgtggcacaaggtacaggatgggctggaagaggaccgccttgccaaaaagggcggcgcgttcggctctacccggcgcggcattgcctacgcttacagcgacaagtaccgcaaaaagaccctgcggctgggtgaccttttgcatctggacgaggagcgcacccagaaccgcctgcacatgatcctggacgccaagaacatggagctggcaggctgctatcatcaggagcccatgagctacgatgccctgctgaactggtgcaggcagcaggcagcgtactttgcgcccttcatctgtgatgtaggcgctttcttgcagcaggcgcacgatagcggcaagcgcatcgtgctggaagcgcagctgggcgcaatgcgggatatcgactacggcatcttcccgttcacttccagctctaacacgctggcggcctacgcgccgctgggtgcgggcatccccaactgcaagctggaccatgtggtgggcgtgctgaaagcctactccacctgcgtgggcgcaggcccctttgcagcagagaatgcaatgggcgaagcgtggaacgaaaagctgcgcaaggccggcggcgagtacggcgcggccaccggacgtccccgccgggtaggcccctttgactgcgttgccagccgctacggcctgcaatgtcagggcgcggataagatcgcactgaccaagctggacgtgctgagcagcatgaagcagatcccggtcatcaccggttacaagctggacggcgtggaagtcccccgcttcgacaccctgtccgaccttgaccgtgtgcagccggtggtcacgctgctgcccggctggaacaaggatatctccggctgccgcagctgggcagagctgcccaaggaagccaaggcctatgtggagttccttgaaaagcagctggggcacgagatccagtttgtttccaccggcgccgagcgcgaaaagtttgtgctgaagggagaatggctgtgagacattttattgagcccggcagcttttctctggctgagcagctggcactgctcgaccttgccgaccggatggaggccgaccccgcgccctacgcccacctgtgtgacggccgcattctggccactttgttctacgagcccagcacccgcacccgcctttcctttgagtccgccatgctgcggctgggcggcaagacgctgggctttgccggggcgcagctttccagcgccagcaagggcgaaacggtggccgatactgcccgtgtggtaagcaactatgcagacgtcattgccatgcgccaccccaaggagggcgcaccgctgcgggcgtccatgtatgcgcgtgtgccggtcatcaatgcaggcgatggcggccacgcccacccctcccagaccatgatcgacctgatgaccattcgccagcgcaaggggcggctggatcatttgaccatcggcttctgcggcgacctcaagttcggccggacggtgcactccctcaccgccgcgctgagccagttcgagggcaaccggttcgtgttcatctcgcccgaggaactgcgcatcccgcagtacgtcaaggacgagaccctgaccccgctgcaccagaactataaagagaccgccgaccttgaggccgagttgcccggtctggatgtgctgtacatgacccgcatccagaaggaacgctttttcaacgaggaggactacctgcggttgaagggctgctatgaactggacgaaaagctgctgcagctggcaccgcccaccatgccggtgctgcatccgctcccccgcatcgacgagatcaagccggacgtggacaacgacccccgcgctgcttatttcgatcaggtgcataacggtgtgtatatccgcatggccattatactggcgctgctgggcatccccgacccgctgaccgggaaaaaggtattggaaagtttataaattggaaacagggctgctgcacaaaacttcgtgcagcagccctgtttttgcgtttggtgcttcatgaaatgaaaatttttcccgctacccccgcagcggtgggtccggcacaaagatcatggtgccccgggcagaaaaaagcagctgcggcatcatgcagctgtaccccagccacagcaccgccagaatgcacagcaccaaaagcaccctgcgcaaaagcaccggatgccgggtgggggaatagcgttttctgcggtctcgctgcataggctgcgccctcctttttcaaggctctgcccagcttatgccgcggcagaaagaattgtgcaccggcggggtttgtggtaagataacagggaagaaccacggaggaactgcttatgctgaccattacactgctgggcacggctgccaccatgccgctgccggagcgcgccctgaccgccgctgtggcggagtgcggcgggcacagcctgctgctggactgcggcgagggcacccagaccgccgcccgccgcgccggggtgaacctgatgcgcgcggatgccatctgcctgacccactaccacggggaccatatctttggtctgcccgggcttttgcagacccttggggcgcaggggcgcacccgtccgctgacgctgctggggccggaggggcttttggaggtctggcggtcggtgtatgccctgaccgggccgctgccctacgcagtaaagccgctggtctgccgcgccgggcagcctgtggcgctggatgctctttcggatggatggcccgccggggcaacgctgttgccggtggcaacaaagcaccgggtacgcagtctgggctatcggctggacttgccccgggcgggtaggttcgacccggaaaaggcgcgggcactgggcgtaccggtgacccagtggcggcttttgcagcggggacaggctgtcccgctggcagagcgtatggtgcagcccgccgaggtgctgggcgcgccccgcaaggggctgcggttcgtcttttccggcgacagcgccccttgcccggcgctggaacaggcggcgcagggggcagacctgctgctctgcgatgccacctatgccctgccggagcagcaggagcaggccgcacagtgggggcacagcacctttggtcaaagcgcggcgctggcggcaaaagccggggcaaagcggctgtggctggtgcactattcccccatggtcaccgacccggaggagcatcttgcacaggcgcaaagcatcttcccggcggcagaatgcggctttgacggcaaacgcatcaccctgcattacgaggagaacgaggaatgaagctgacacttgaccccggggcagctgccctgctggacgccctgcacgcggcgggctacgcagcctatgccgtaggcggctgcgtgagggacagccttttgggacgcaccgcccacgactgggacctgtgcaccagtgccctgccgcagcaggtaatggaactgtttggggcagagcggtgcatcccaaccggcttgcagcacggcacggtcaccatcaaatacggcgggcagctgtacgagaccactacctttcgcaccgagggcagctataccgatggacgtcacccggacgaagtgcagttcgtaccggacgtgcgggaggatcttgcccggcgggattttaccatcaacgccatggcgtataatgcagccgaggggctggtagacccctttggtgggcaggcagatttgcaaaacggtctgctgcgggcggtgggggagccgcagcagcggtttactgaggatgcgctgcgtatcctgcggctgtaccgctttgccgcaaggttcggctttgcgttggacgctgccaccgcccgggcggcgcggcagctggcaccgcacttggactgcatctctgcagagcgcattcaggaggaactggcaaagctgctggctgccccgcagccgggggcgtatctggaacccgccgtgctggcggtggtgctgccggagctgaccccggcggcgcttgaagccgcaaagccggtggtggatgcctgcccggcgggggaggagaacctgccggtacgctgggctgcgctgctgggcgctctgggcgagaccgacacccgccgggtgctcaagcggctgcgctgctccaacgcctgcatcgaggagaccgccgtgctggtgcgggaaacggcaggggagggcgtgtgcagaagtttctccgaggaccgtccgctggggt

SEQ ID NO: 13770 - DNA, 1074 bp, Unknown
  gut microbiota DNA sequence
cgggagaaaaccgacattttgataaaagtttgacaagcagggatacattaaaaacaggacgctttgcgcatttttatccccgatttgctgctgcctttgtcttattgtgcaatttttgcgttggtgcaaacgtttttctggcaaaaggactttacttgtgctatacttattttaaacagaaacacttttctgcccgccgcggcggcccacatataaaggaactgccatgaaaaccatctacatcctactcacccgctccggcacgctgctgtccaaactggtctatgccgccaccggtgccagctatactcacgcctccatggcgtttgatgcagagctgagctgcctgtacagctccacccgcaaaaacggctacaccatgttccccgcaggccccagcaaggaatacctgaacaagggcgttttccgtctgcgggacaacgccccctgtgcgctgtatgcgctggaggtgtccgatgaggcctattcccacgccctgcaccgcgccgaggagttcatgcgccacagcgaggagtacagctttaatattctggggctgatcctgtgcgcactgcatatccgctggcaacgccgccggcattatttctgctccctgtttgtcagtgaggtgctggagcaaagcggcgctttggcgctgcccaaggacagcaccctgatgcaccccaacgactaccccctgctgccccagctgaagtgcctgtacaagggacgcttagccgacctgccccagcgcaaggccatggagctgggcgagacgccctcgatggtcagcatctataccggcctgctggtggagctgctgcagcgccgggcgcaaaggttttttgagtaattttgttgtataaaactgaaatttccgcttttttaggtgtcgctcttgctttttgcagccaattgtggtaatattattcggcggtattgttttgccgcagaatatgcgctcgtagctcagccggtagagcatctgacttttaatcagagggccagggattcgagttccctcgagcgcaccaaaatcccacgaagaatcgtaagattcctcgtgggattttc

SEQ ID NO: 13771 - DNA, 24832 bp, Unknown
  gut microbiota DNA sequence
ttttcgacttttcaggtaccccttagggagggctgtcctccccttgctgacactatcctaacgcagtgagaatattttgtcaataatattttcttatcgtaagaataaattgtcgtgcatgacaaaaagtcccgataaatgtcatcaatttgacgaaacaatggatacaacgcaccttcttattgtaaaaaactgtcatttctgctatgatagcaatagaatacgtgtgagaattttttctcacgcgctccagcaatacaaaagaggtgaacgggatggatgcaagacttgagccttatcgcgtagtggtatcttttctaggcgaagcgctgggcccagactacgaggtagttctgcacgaccttaccagtgaggacggcaccattgttgccatcgtcaacaaccacatcagcggacgcaccgagggtgcgcccctttccaacatggcgctgcgcttcattcaggagcggatgtatgaaaaacaggattatctggcgggctatcagggtgcttcacaggccaaggggcgtctgcgctcctccaccatgttcatcaaggataacggccagctcatcggcatgctctgcatcaactttgatgccggcaagtacagccgcatcgcgcaggagctgcttgccctctgcggggcgcacaccgagccctcctccaccggcatcggggtggagaactttgtcagttccctgccggacgccgtgcacaacgccattgccgaggtgaccggcagcgccgggctgccgcccgaccggctgaccatggaagaaaagatccgcatcgtggagtccttgcaccatgcgggcatcttttatatgaagggtgccgtcagcgaggtcgccgcccagctgggctcctcggaggccaccatctaccgctacctgagcaagctgaagtgagctgcgaacgaactgctccctgaaaaaggaatcgcccacttgagcgaagaggggcagtatctttgtgccaacgaggggattccacagtacgaagatactgcttgccacggctatgaacgccttttgaattgcaaaatgatttttcagttgctatactgggattatcaaagttttttcgggaggacgccgcagtgactgcacagacaatgcaaatcgggaacagaccttgccgcatttacggcgagccccatgcagaatacctgctgctccaaatgaccggtgaacatgagctgcaaagcatggaaagtgaggttaccgctattgcacagagtgcgcaccactttctgtttgcggccattccggtggaaagctggaacgatgcactttctccgtggaagtctcctgcagtgtggggaaaacaaggcttcggcggcaatgctgcggaaaccctgtgctttctgacagaacaggtcgttcccacactgaagcagcagtatcctctcccggaaaacgtcaaaatcattctgggcggctattcgctggcgggattgtttgcgctgtgggcctccacccaggctgatctgttctacggtgtcgccgccgcgtctccctctgtgtggtttccggactggatggagtttgaacagcagcacccgatacaggcacagcgcgtttatctaagccttggcgacaaggaagagcgcacgaaaaacgctgtcatggctgcggtaggtgataatatccgcaccctgcacagccagcttacagcgcgtggagtagactgcacccttgaatggaacagcggcgggcatttcaaagacgctgacctgcgcacggcgaaagcctttcggtgggtaatggaggaacacacatgaccattttgattgatgccgatggttgcccggtggtggacctgacattgcagattgcaaagcggttcggcgttcctgtcatcatcctgtgcgacacagcccaccaaatcgagcgggaaggtgcgcaaacgttggtattcgataaaggttctgacagcgtggactttgcgctggtgaaccgggtaaaaccgggggatgtggtcataacacaggactacgggctggcgagtatgtgccttgccaagtgcgcacgagtgctgaaccaaaatggcctggaatacacagccgacaatatggacgccctcatgctgcggcgttatgaaaacaaaaagctcctccgtgccggaaagcaccccaaggggagcccaaagcggacgaaggagccggatgtcaagtttgcggatacgcttgagaagatcttgagcaaaaattattgatacatattttttgaaggatggagaaatccggttggatatgcaaaaaagcaccagcctgagctgatgctttttgttggcggagatggtggatattctcccgcgggctaagcaacagcaacgggttgcgtttgctgatttttccgcagccccttggcagggctttgaaaaatcagaacgctgccccaacaactcctccctgtttctgccacaggcagcggtcgtcgtcgttgcactgggctgattgcttgcggtctgcggaccgtcgccctgttctcatcctcaccatcttagccgcaaaaaaagcaccagcctgagccggtgctttttgttggcggagatggtgggattcgaacccacgtgcccggttaaggacaaaacgatttcgagtcgttctcgttacgaccgcttcgatacatctccataataaaccttatatagtataacaaaaaagcctgctgccgtcaacacttttctccaagtgccttgcaaagcgcggtgcagcgccgggtgctgcggtctgaatcatccgcacacagtacaaaacagcctgcacacaaaaacagaccgctgcacaaagctttgtgcagcggtctgcggtcatagttcagctatgatacgctcagttcttgctggtgctctgatttgcgatgaactcgtcgtacacttccttggtgatttcccaagtcatggaaaactcggagttctcgcggatgggaatgtactggaacagcacggtgtcgccatcctgcaacttggggaagttggcagctgccaagtggatcgtgataggcttcttctgctcgatccggctattctcagcatccagaatctgcacgccgttcctcaagctgaaatagcgctggttatcctcagaatccttcacggcaatcgagaaacagtccgtggtcagccggatggggtttgcacgggcagactcgatatccacctccaaagtgcaggtaccgttttcgatcttcatgcttttcaggccggcaatgacctgcagatcgcttttgatcgcgccaggcagcgttttgcagaccgggtttttggggtcctgatattcacagccgcccagcagactggcaccggccacagccactgcggtggctgccgaatacttcaggaatgcgcggcgggaaaatgtataagacataacttattcctccgttatttaccagtatattcttccgacccggaaggtcaggtcgtagaggggtcggagagatccggttccagaacctctgcggccagttcccagttggcgttgaactcaggatactgcaggtcggggtagaaggtaagagttaccggaccatcggtcagtgcgttcagaccctttgccattacatggtaggtaacggtctcgcccttcttgacctgatagctcagtgcatccgggctggtcacctgcagcttatcgttctggtcggccagatacccctctgccttcacggcaaagtttgccttggtcacttccagcgcattattgcggccattggtcaccaccacccggaacaaggtgatgttgtcatcttccttgtattccacccggtccagcgtggagacgaccttcagcacaacgttgctggtgccgggagcgtgctgcaccggggcatacccggagcagccggtcagcaggctgctgcccgccacagccacagcggtgagggcggtatatttcaggaaagagcggcgggaaaattccccagtcatattcgttcctcctttgggacacatcaatacagattctgccataaggcactacctatacaataggcgaaacagagaaaaatgtcaatgatttttcacaaaacaaatgtgaagattttgtggcagcatcgcgcattttagacgaagtttaagtaatttttctggtgattccgtcagctgcggatcacgtcagaggcattcatgacgaaggtcaggctcttgccctccaggaaggtgggcacataagtgatcttcagctgcttccagtccttgggcaccatgagcatcagcacgatgtaggcgctgccctgcgggggcaggctctccacatcggaaaagctctgggaattggcgttgtacagcgagatattggcgcagcaggctgcgggctggccatcgcagacggcggtaaagtccggggtagcggcggccatggcctgaaagtttgcgtccacgttctccagcgggggcacggggtaggcctcgttgatggcgtcaatgccctgtgcgccgatggcgtagctctcggtcttgctgcggttgacggtggtcacccgcacgcccagatactcgtagcctgccggctgtacagggtcctgcgtcaggtggaacacgctggtcagctgcacgcccaagccgttccagttgcggacggtgtcgccgaccttgacctccaccacagtgtcgttgccgttggacttgcagccgcccagcaggctggctgcgcccagtacggcggcagatgcaccggtgcacttgaggaagctgcggcgggaaatgacagtagacataagatatatcctccttgaagggtcagtttctttttcttctttctctggttataccgtttccggcgcacagatgcaagagtccgggctgattctttacaacaatttcacaagccggtcactcttgcggcgaaagccccttgacatgggtctcgctggtcttgaccagatttaacaggctgggcgtgtacagcggaaattcccgcgtcaggctttcggtggtcatggcaaggcaggcggggtccttgacgccctcgccgccgttcacatcctgcccgtccagcagcgcctccacgttggcttccgccattcgcatcactgcatcggaatagccgtgccagcggtggggctcaatgctgaacatgctggaggcgttgtgcggctccgcagagtagagcagccggaacatcttggccaccgccatcatcaggtaagcgctcacctcggtggtcagcgccttgctgtggcactggccgatcttggcgtagagcacgttcaggctgttggagatgagttttttgttcatggtgggcagcacgctgccgtggtagacgttgtccttcatcttttcggggttgggcagatcctcggcagaaagcatcatgccgttgcgctcggcgctgcgccccagcagatagtcgcaggaaacattataataatctgccacccgcaccacaaagtccaatccgcactcgcggatgcctttttcgtagtgggacagcagcgcctgagagacccccagatcctctgccgcctgcttttgggtgatgccgcgctccttgcgcagcagcttgatgatgcgattgaactccatgatgtgctctcctcaatatctgcaggatctatttttggtaacatccttgtttttggtttacaacaggttgattatacacattggaaaacgacttgtaaagcaagaaaaatgccgatatttttcgtcttttttcgtcattattgtcaaaactcttgcccgccccccacatctatgctaaactatgggtattaacacatagattttgtgttttcgctgtgaaagaaaaccgacagccgtggtgaatgtccgtcttttctgaaacaaaaatttttcaaataggtggttccatctttctgcagtttgtgctataatctctttttggcgactgttcttgaccggcgcacaaatctgcaaaggacaagccagacgctataaaaggtaatataccaagaataagaaagaggaaacttcatcatgaaactcgagcgcaaagtccgtctgtgcagcgctgccgctgctgtcctgatcgccgccatcgccctgaccggctgcggcggctccaagaccactgcttcttccgcagccgcttcttctgtggctgcttccaccgctgctgctaccaacaacagctgcggcgagggtgtgacttgggcactggctgacggcaccctgaccatcagcggcaccggccgtatgaccaacttcaccaaggacgctccggctccctgggctgatcaggccgaccagatcaccaccgttgaggtggaaggcaccgttaccagcgtaggcgctaccgccttcaaggactgcactgccctgaccaccgtgaacatcgccgacggtgtggagtacatcgaggccggtgccttcaacggctgcaccgccctgaccgaggtcaacatccccctgagcgtgggctacatcaagaccggcgcattcaagggctgcaccgccctgaccagcgtgaccatccgcgacgactgccgtctggacatgaatgtgttccccgataccgtggaggtcaactacgccgagggctaagccccatccgtaattctgaaccaaaagaggtgtgatccatgaaaaccttcaagcttcatctcatccgccacggcatgaccgcgggcaacctgcagggcctgtacatcggcagcggcactgacctgcccctgtgcgacgagggccgtgcgcagcttgccgagctgaaagagcggttcgtctacccgcaggtagatactgttttctcctcccccctgctgcgtgcggtggagaccgccaacatcctgttccccggggctgcccaccagtttacggtgcacgatctgcgggaggccggttttggcaagtttgaggggcgtccggtgaaggatctcgtccacgacgaggacttcaaaaagtggatcaccccgggttccggctatctgccggagggcgcagagcccaccgagcagttccacgcccgctgtgccgacagccttatgaagctgtttgagtacatgatccgcatggacgttaccgaggccgcctgcgtgacccacggcggtgtgatcatgagtatgctcagccagcgcgccgtgcccacccgccatcccgagcagtggatggcagacccgggctgtggctacactgtgcagaccgatgtacagctgtggatgcgggacaagctggtggaggccatcgacatcgtaccctttggctacgccgacaccctgcaggggcaggccgaggccgaggagaacgaggcctacgaataaacaaagggttacagtttcccgctgccccttgacagaacgcgcagaatcctttattgttaaggggtagtattgtatcgtatacaggaggaacgctgtcatgtcccaatccatctcccgccggtcattcctgaaatgtgccggttccggtgcggtcagccttgcggctgccctgcttaccggggtctgtgctgcggcacagcagccgtgtcttgcgggcgagcctgccctgctggacggcaaagccgccgtggagctgctgggctatgccccggcaccggagctgggcggtgtgctggtgtacctctcggtggaaaacctctcggcagccagcctgccggtggataccagctacctgcaaagtcggggtctgcgtacccgggagcagctgtacagcatgggcaccggcgtgaccgctgcctgcaacggccagagcgtgccctgcggcagctttgccgccccgctgtacaacgagaacgcggcggacgcctcggtgttcaccctgaaccttgccgccggacgcggtgcgctgctgcactgcttctgcgccgtgccggaggactggcagacccttgcgctgacatggcacccggactttgccgccggacgcagcgccatctttacggtgcgccgcgatgccgacgaggccgctctgggccccgtgcccaccacccccgccgaggtcggcagcgtggtggatctgtaacagcataccaaaagagccattgcacaaattgcgtgcaatggctctttttttgcttggtaaaaccccttccgtcatcgcctgcggcgtgccagatttctccgaggtcgagacgatttgaaatggcctccgctgtgctctggccataatcagcggaagaatgattttaaatttcgggttacaggaaagtctgcggactttcctgtaacccattttcacgggaggagtcatagagggaaacggcatttgcagcaccgctttctgcgaaagcgcggcgctgcgggcgtgcgcttgctcccccttgggggagctgtcgcgcagcgactgaggggttttgaatcggcggagccggaaaaaaacggttaaaagatcttcacgccgaacaggcgtgaatcttcagttttttccggtgtatcccacccctttggggttaaaaggggcgagtagcccctttttcgtggctccagcgcgtcgaaatcgctggtggttttctggttctcttttgccaccaaaagagaacatccctcggcaagcagaaccttccccgcggagcgcatttaaaatcgtcccgttgccggagatcaaccggctcccaccagcgcttcgccggtgctgctttgcaccagcagctcctgccccgtaaggctggagagcagggcgatgtagctgcgtcccgccgggaggttcagcggcttgccgttggaatcgtagagggcaagggtgctctgggtgccctgcgtccatgtgatctgccacaggtgcccgccattcagccagacgccgccgcccatggaaaggtcgtagtccagcgtgcggccatcgtcccgcagggaggagccgctgtacaggatgagcaggttgtcaaagaccgcctgtgtgccggtgttggcatccagctggggggtgccgtcggcgtgcagcatcccgtaggcggcaagggcatcgtcatagacaaagccggtggcaccgccggactggaaattcacggtcgcctttaccgcatcggcggcgtttgcgtccggcagatggccggtgtcccgctggggcagcagggcgggcagaacacctgccgtttcactctcgctgccggaagcggtgttctggttcacggcggtggagatgctcaaactgtccagcactgcggcgaccgccttgccgctggtgcgccacaaaggggtgttgtcccagctgtaaccggtgctgacaaaggcattgcgtcccacctcctgcgcgtccaccgcgcggagattatagtattccagataccgcttggcataggcgctgctgccacactggatgggcagcacctgctgcccgctgagcagccgccagtataagtcctgcccgcgcgtcaccggccctaccacaggcatggcgctgagggcggggtacaccagacacagctcggtggagctgccgctctcggtcatggcttccagcaccaccgaggcgctgccgatgccccattgcgtggtactgtcggtggtgttctcaatgaccaccgccgccgcccgctgctccgggtacagcagctgctgcccggtaagcgggtccgccggggcggtgctttctgcgggcgcagcggcggtgctcccgcagctgcccagcagcaccgcgcacagcacggctgcaccaaggcgcagactccatttgcgtttcatgggcttctccccttactgatagttgaagttttgccactcgtcgtcgtccacgatggccagataggtcttgccccggttgaagcagatctcgctgccgtcggcggcgtagaccttgagcgggtgctccggggaggccttctgccatgtgccgcgctgcactgcgccccgggtgaagaaataggcttcgccgccggacacatagtccacttgctgcacgccgccggagttgccggggtagtccgcgatgcccgcaaagcagaccagcaggttggtaaagccgagctgcttgccggtcagctcgtccacggtgttttcaaaggcaccggcggcgcggctgtacatggacattttataaaggtgatcccagcggttgtagctgaaggtggtcttgtagctgtccgagtgcacgatgttgatggtcttggcggcggcagcgccggacatcttgttctctgcgccggtgcggtagtccgcaaagcggaagaaggtgctctcataagggtattgcagcccgatccccgcgttggcggcagctttccggatctcggcaccggaggtaaattcggtgtgctcgtaagccacgttgcggccgcggctgtcgcggtgcgccacatggggatgggtgggggtgttgaagtagctcttgccgccgatgttcaacccggagtagttgtacacgttgatgaacttggtgcagggggcgctttcgccatcgtggtagtacagcgcctgccacggcatgagcagctgcaggaactggtcacggccggagcgcagcgggcccacctccgggatggcgttagcgtcataatacaccgcgcagaagcgggagatgccgccctccaccttgctctcgatgagcaggtcggcagaaccgatgccgcgctgcgggcgggcgttctgccgctgggtgttgctgatattgttcaccatcacacccaccatgcggccgttgctgcggcgcggctcgccggtaagggggtcggcgttgtaggcgggcaggctggtgtcggcactttccgcagggggttcagacgccgctccggcgtccggggttcctgcatccggggctgcggcctctgcgctttcagaagaggcggcgctgtccttcccgaaggtctgctgcagccagtcagaaaagccgttgcccacacaggcgctgccggcgggcgcgcagccggacagagccagcgaggcggctgccagccccgaggcacggagaacggtacgacgcgtgatctttttcatgcaaaaaacctcctgataagagcgttttgcgcagccccggcgctgtcggatcggttgcgcgcggtggatgaaaacgaacggcctttcggcactgctttgattgtaattgtaacggttcttgcggcatttgtaaagtgaaaattagcggcagcgtagaagaggggtcaccgccgggaagtgacccttccggggcagcccccggcaaaaaggcagaatcctctgccatgatagcatggagaaaaagtcccagagaaaaagtccccgcgtttcttgcattttggtgcgcgatatggtatctttttatacaggtaaacacttcagggtcggcaaacattttgttacctttgccgcccttgcatgatgacaggaaggaatgatacttatgggtttttttgacaagctttttggcggcaagtccaaggacgaaaacaccgctaagttcaccaaccagagcaagaccgtgctgaccccgctgcagggcaaggtgctggcacaggccgacatcccggacgagacctttgcacagggcattctgggccccggctgtggcattgagcccaccggcgacaccgtgtacgccccctttgacggcactgtgactcagatcgccaccaccctgcacgctgtgggcattaccagcaacgacggcatcgagctgctgatccacgtcggcatggacaccgtggacatgaagggtcagggctttaccgttctggtcaaggaaaaccagaaggtcaccgccggcaccccgctgctgaaggtggatctggacgccatccgcgccgccggccaccccaccgccactgccatcatcgtgaccgatggtgcgggcgacgaggtgaagatgctggcagagggcgatgtcgctcccggcaccccgctgttcaaggtctgattttttgcgtcataaaagaggccgctgcaatcgcgcagcggcctctttttgcggaaagcgtagttttacagcatgatgccgggcagccgcaggctgcccggcatcacttttttacaaggttcagacgatgcggacgcccttctggatgacggccttaaggttcagttccttgtccgcaaggatgacgttgccgtagcgtccggcggcaaggctgccgtagtcgttatccacgccgatgctcttggcgggggtctcgctggcggcgcggacagcgctttccagcggaacgttcatctccagcacagcgcgcttcatgcagtcgtacaggcaggtgttgctgcccgcaatggtgtccgggtgctcggtcagggtagcgcggggtcccttgaccgtgatggcctgtccgcccagactgtactggccgtccggcaggccgcaggacatggcactgtccgcgatcaggcagatgcggtcgtccccgaaggtgttgaaggtgaaccgcaccatggcggggtggatgtgcacgttatcggtgatgagctccacctcggcgtcgtgctccatggccgcaatgatggggccgggcgcacggtgcgtgatgccgggcatggcgttgtacaggtgggtcatgtgggtggcaccggcctcaaaagccttgacggcggtgtcgtagtcggtgcaggtgtgggcgatggagatgcgcacctcgttatggcactccttgataaagtccagattgcccggctcctccggggcaacgtccaccagcttgatcagaccgtttgcacgcttctgcaggcggcggaacatggcggcgtctgcgccctgcacatactccggattctgtgcgcccacctttttggggctgatgaaggggccttccatgttgatgcccacaaggtcggcacccttgccgtttttatgggcggcagcagcgtccatcaccttgttcaggatctcctcgggataggtcatggtagcgggacagatggccagcacacccttgctggcctcgaaatccgccagcgtctggatggcctcctcggtgccgtcgcagaaatccttgcccattgccccgtggaaatggatatccacaaggcccggcagggcgtacagaccctcggcgtccagcacctcctcgccctcttccggggcggcaaagggcacgatgcggccatcgcggatgacgatggtgccgagctcaaaggtgtggcgcggggtatagaccagtgcattctgaaggatcatacaaaacacctcgttctttttttcttttcacccagtatagcacgccgggtgttttttcaaaagtccttttgtgtgaacattgtaccgctgtgtacaaaaagcgggccgccggaagggggcgctgtgcaccccgcccccggcggcccggttcatactgcaaaatcaaccagacttttgcagttcattctttttcagaagtgcaggatcacagcatcttcttcagctcgtcgtagacgaactgcaccttggtgccgatgatgacctggcaagcgttcttgctgggacggatgacaccggcagcaccggcagccttgacagccttctcatcgaccttagcgttatccttcacctcaaaacgcagacgggttgcgcagtaaccaacgtccttcacgttctccttgccgccgacagcagccagaacagcagaagcgacttcggtgtagttgttgttagccagaacgaccttcttctcagcttcctcgtcgtcatcctcacggccgggggtcttcaggtcgaacttggtgatagcaaagtagaacacgaagtagaataccaggaatgctgcgatgcccagaggaatgatcatccaggtcttagcagctgcgggcagggatgcagagaagatcaggtcggtagcacctgcggagaagcagaagccagcacggaaaccggagtagtaggtgatgatggtgaagatgccgtacagagcggagtacacaacgtacagcgggaagcacaggaacatgaagccgaactcgaagggctcggtaacgccgcagacgaatgcgcagattgcagcggacagaaccagaccgatggcggccttcttgttcttagcggtcttgaccatagccagagcagcgcccatgacaccgaacatcatgcaggggaagaagccggacatgtacataccaaggctccagctcacatcagcgctggtctcacctgcccagaagtgggtcaggtcgcccagaccgatggtatcgaaccagaacacgttgttcagagcgtggtgcaggccggtggggatgagcagacggttcaggaaggcgtagatgccggcgccgatgccgtccatgccagcgatgccgttgccaattgcgaccagagcgtcgaagatgacgggccagacgaacagcagaaccacggacaccagaatggagatcaggccggtagcgattgcaacgaagcgcttgccggagaagaatgccagccagtcaggcagctggatattcttgaacttgttgtagcaggcagcgcccacaacagcggccagaatgccgatgaaggagttgccggcgaccttctggaaggcgatgtaggtagcggtgccctcttccagagtgcgcaccatgctgaccacgccggggctcagcagctgctgcatcatcaggaagctgaccagaccggccagacctgcggtaccatcgttgtcagcaaggccgacagcggcaccgatggcaaacagccatgccatgttatcgatcagagcgccgcctgccttgaccagcaggaagccgacggtataagctgcaccggaagtcggtgcaccgggaacgcccataacgcccggagcgagggcataaccaagacccatcaggatgccgcagatcggcagcacggcgacgggaagcatcagagctttgcccagtttctggagatacttcatcataaagcacattcctccttaagaaatgtttgtgtttacagacagtctctggttgcaggctgtccacagttccgtaacagaatagtaacatatttttgcaaaaaaagaaagtggttttttcttttttctattaaaatgcgtcaaaagtccttattcgatggcacatctgtcagtatttttgttttttctgcacgcgtcctgatttaagtgctgaaaaatcttttctttttatgtctattttgtccaaagggttgcatcccaccataggtctctgcgtccgtacatttttaaacaatgcgttttccgtccagcacggcctgtttcagggtgtcgccgtcatacaccagcttgagggaaaagtaggggtgctcttcctccagcagacggaaaaagagcttgtccccctcccagatgggcagtttttgcacctcagacttttgcacccactgcaattcgccctcggcgcaggcatcgccccttatcatctcgccctcccaccggtcggcggtgtacaggtggatgaactcggtcatgttgccccacacaaaggtcagcagtccccgggcacggtagcgcgtcagggtaaggccggtctcctcccgcacctcccgtacaaggcagtcctccgggctttcaaaccgctcaaatttgccgcccacgcccacccatttgtcgtggttgtagtcgtcctgctttttgatgcggtgcagcatcaggtaagcgtcctcccgctccagatagcaaagggtggtgctgaagatgggaaattccgggtccataaatgcgcctaagttcattgggtcgttctccttttttgtccgatgtttttgtcagcgtctgagcgggcggggccgctgaccgtatctcttttcataagaaagggctgctgcatgaaacgctgtgcagcagccctttgggaagtgtttccgctgcggatgcccacaaagcagcggaagcatttttcgatttatgccttgcgcccggcgcggcccttgcctgcgctgttcagcttgcgcaccaagtcgttctggtgcttgcgctggctgggggtgggctgagggtctttggcctcccctgcacgcttgccggtctgggcaacgtcggggtcgatgcgttccagcatccactcctgattgccgcccgccacatagttccagatctgcgcctgtgcgccgttggcggtgttcatgcccacaaggtcgatgtatttatccgccagcacattgcggatgcgggtgcgcccgctgcgggtgggctccagcgcccagcactggctcagcccgctggtgcggctccactggtgcagccatgtgccctccaccacgccgccaagtgccagatcgatcatcttgccggtaaagcggttctggatgcgccagcgtccctcgcccgcgtccacaaactgccactgctgccacggatggcccgcatagctccacagctggatgccggcgccgttctccgtgttgaaatcctttacttccagtaccttcccgttgggggccttgataatgtagtattccccctccataatgacgacctgcgatgcctttgccatagagcacaactcctttccgctatggtagccctattatacccgatttgtccgctggcaacaagaatgcttttccataatctttcttttgttttttgtgcattctgtcgtgtttttgcagcgcaaacgttttcgggagccagcaatgttttttaccggcgggcactttgcactccggcgcaggttgtggtacaataaagccatccactattaaggaggggatctttcatgactaacgagactttacaaaccattcgcagccgccgcagctgccgcgcctacgagccccggcagatcacggatgccgagctggacgccgtactggaggccggcacctacgccgccagcgctatgggacgccagagcgctaagatcgtggtcgtgcaggatgccgccacccgtgcccagctgacccggatgaacgccgccgtcatgggcaccgacagcgaccccatgtacggcgcacccaccattctggtggtgctggccgatgcccacgcaaactgcgccgtgcaggacggcagccttgtcatgggcaacctgatgctggctgccgcatcgctggggctgggcagctgctggatcaaccgtgcccgggaggagttcgactccgccgagggcaaggcactgctgaaaaagtggggcatcgagggcgactggatcggcgtaggccactgcattctgggctaccccgccgccgcgcctaagcccgccgcgccccgcaaaccggactacattgtaaaagtataaggagttttatgaagcctgattacaagctggtcgcaaaggccaaatacatccacaacaccgccgaccttgccagcgaactgtggcacgaggtctacaagcgctactaccccgcaaagcagctggacacccttgtggaggagctgcaaagcgccgacgccattgaagcggacatcgacaatgacgtgaactattttctggtgtttctggggggcaagctcatcggctactttgcgtggaaaatggagaacaccgccctgcacctgatgcacctgtacctcaagccggaataccgcggcaaagccatcggccgggatatcgtgcagacctgtgagcggctggccaagggcgagggcaaaggccgggtgtggtgcaccatccacgccaaggcgctgccggtacagcagttcttcaaggcgctgcgctaccgcgagctgcgccccgccgagcaggagaccggcaccgtgccccgcaacgagctggtgtatgagcacaccctgagctgatttccgaaaaatcacaaaatagccattgaaatttatccgcgtttgtactacactgatgtagtgtaataaagccgctgtctgcgggcattttgtgcaaaaaaggagactatcatggcgaaagatcatcccaccggcaactccggactgtaccgggcttttctgcagctcaagaccccggaggaatgctatcgttttctgcaggacgtgtgcagctattcggaactcagcgcaatggagcagcgctacaacattgccgagttgctggccgacaagtgcatctacaccgagatcatggacaagaccggcgcgtccagcgccatcatcagccgggtcagccgggtgctgagcgcggacgacagtgtgctgcgtgcgctgctggaagctgaaaaaaaggccgctgactgatacaaaagccgcgtaccgcccaaagctgcggcacgcggcttttctttttaagatttgaacaggaggttattcttatggcaaaagctgttgtattttttgcggagggcaccgaggagtgcgaggctctgctggtggtggatctgctccgccgcgccaaggtggaggtgctggtggccagtgcttccggcagccgggagattctgagcagccataaggtgcacatcaccgctgatgcactggcagaggaggtcgattattccgatgtagatctggtggtgctgcccggcggcattcccggtacgccgaaccttgccgccaacaagacggtgaccgacacttgcgccgcctttgcaaaggcaggcaaaaaggtagccgccatctgcgccgcacccagcgtgctggcagcactgggtctgctggagggcaaaaacgccaccgcccacgctgcattccaggacaagctggcgggtgcccatgtgctggacaccgaggtggtcgtggatggcaacatcaccaccagctacggtctgggcggcgcgatcccctttgcgctggagctggtgcgtcagctggccggagaagcggaagccgaccgcatccgcaatgccatcgcctaccggcactgagaggagggagactgtatgcgttttgtcacctgccgcctgccggacggcatggaggaccccgccatcctctcgcaggacggcacacaggtctggccgctcagctggctggggctctcctacgagaccctgtccgatgccatccccttcctcaccccgcaggtgcggttcggcttgcagctggccatcagcggcatccccgcgctgccggtggaggccgtcaccctgcaaagccccatcccctgccccgcgcaggacgtggtctgtctgggcatcaactatatggcgcactcggacgaggccgaaaagtactctgcggacgccttttctaccaagcatcaggatgccatctacttctccaagcgggtcagccgcgcggtaccggacggcggcttcatcgaggcgcacaccgaccttgtgcagaagctggactacgagtgtgagctggctgtggtgctgggtaaggacgccaaggatgtgcccgccgggcagaccaaagactatgtgttcggctacaccatcctgaacgatgtctccgcccgggacgtgcagaccgcccacaagcagtggtatttcggcaaaagtctggacggctttacccccatggggccctgcatcgtcaccgccgacgaatttgacaccttcccgcccgcgctgcctatccgcagccgggtgaacggcgagctgcggcaggattccaacaccaaactgcaaatttttgatatcgaccatgtcatccacgagctttcgcagggcatgaccctgaaagccggtaccatcatcgccaccggtacccctgccggggtgggcatgggcatggacccgccgcagtttttgcacccgggcgacaccgtgcagtgcgagatcgagggaatcggcacgctgaccaacaccgtgcgctgaatctccttgtggaactgcccaaaattttacatggatttcagtccgattgcacgaaatgccgccgcagtactgctcttttacggaaaaatatggtatactataaaatactgataaaaaatgcggcgcatccgcatcaaaggggtaaatgacatgaaggaatacgcatttggcatcgatctgggcggcactaccgccaaggtcggcctgttcaccaccagcggcaagctgctggaaaagtgggaggtaagcaccgatacctctaataacggtgctcacattctggaaaatctggctgctgccgtgcagcagaagatgcaggaaaagggtctgtccgcagacaaagtcgagggtgtcggtctgggcgtgcccggcccggtgctggattccagcattgtgcccatcgtgtgtgcaaaccttggcggctggggcaaccgcaacgtgtccattgagctcagcgagctgctgggcggcattcgggtgctggtgggcaacgacgccaacgtggctgctctgggcgagatctggatgggcgcggcacagggctgccgcagcgccgtcatggtcacactgggcaccggcgtgggcggcggcgtcatcgtgaacggcaaggtcatcgacggcgctcacggtgccggcggcgagatcggccacatcaccgtcaacccccacgagaccgccgtctgcggctgcggcaagcgcggctgtctggagcagtattccagcgccaccggcgttgtgcgctgcatgaagaagctgctggacgcaaacccggacaccgcctgcaccctgcgcggtaaggactttgaagccaaggacgtgttcgacgccgcccgcgccggggatgcactggctgcccgcgaggtggacgagatggcctccacgctgggcatggcactggcaaacattgccgccaccaccgaccccgaaatgttcatgatcggcggcggcgtggcccgcgccggggaggttctgttcaccccgctggtgcgccactacaaggagtacgccttccagtcctgcaaggagacccccatcaaggccgccagccttggcaacgacgccggcatctacggtgccgtgcgcctgatcgtgggtgcctgatcagggaataccgatcgctttcaaaccagccaagcctgcgggcttggctggttttgtttttgcaggagacaaaacaagtctgattttccaaaagcgttgcatatcggcgcaaaaaggcaactgccgtcttgtttattttgtgcatttatgctaaaatagcgtgcatacagttgatttttgtagagcggtattactttttctgatgctgtaaaaattcggctgagccgaaaaaataaggacgcaacaaaggagaacacgccatgaaaaagcttttcgccatgacggtggccgtgctgctgctgttttcggtgctgctggacattcccgccgcctatgggcaggcaccggagacgggcaaaacgctggacatcctgttcagccacgacactcactcccacctgaatacctttaccaccgtggtggaggatgaggagacggacatcggcggctttgcccgcgccaacaccctcatcaaggcgcagcgcgccaaagacccggacacccttgtgatcgacggcggcgatttttccatgggcaccctgatccagacggtgtttgaaacgcaggccgcagagctgcggatgctgggctacatgggctacgatgtgactacctttggcaaccacgagttcgattaccgctccaaggggcttgccaatatgcttaccagtgcccgcacctccggcgatgccgtcccggccatcgtggtctgcaatgtagactgggatgccatggaagccgccggtctcaccgagggtcagcagctgctcaaagacgcctttgccgcctacggcgtgcaggactacaccatggtacagaagggcgatgtgcgcattgctgtggtgggcgttttcggcaaggatgcgctctcctgcgcacccacctgcgagctgaaattcaaggacccagtacaggcggtaaaggccaccgtggcagagatcaaggcgaacgaaaacgtggatatgatcgtctgcgtttcccacagcggtacatgggacgatcccaaaaagtctgaggacgagctgctggccaagggtgtgcccgagctcgaccttatcctcagcggccacacccacagccgcatccgggaacccatccggcacggggacacctatgtggtctcctgcggcgaatacggcaaaaatttgggcagccttaccatggcacaaaaagcggacggccgctggcaggtgaccgattaccagctgatccccatcactgccgatattcccgccgatgcggaaacgcaagaggtcatcgaccgctttatggacacagtggacgaggattatctggcgcagttcggctacaccaaagatcaggtgctggcagaaaacgatgttgttttctctaacctggaggatctgggcaaggtgcacaccgagcataatctgggcgatatcatcgcggatgcctatgtgtacgcggtggagaacgccgccgactatgacggcgtgccggtagatctggcggtagtacccagcggcaccgtgcgcgacacctacgcccggggcgatatcacagtggagcaggtgttcaactccttctcgctgggcatcggcgcggacggcgtgccgggctatcctctcatcgaagtctacctcaccggcaaggaactgcgcaccgccgccgagatcgacgcttccgtgtcggatttcatgaccaccgcgcggctgtattgcagcggcctgaactttacctacaacccccaccgtctgctgctgaacaaggtgacggacgtctatctggtcaaggacgggcagcgcgtggagctgcaggacgacaagctgtaccgcatcgtagcagacctttacagcgggcagatgctgagcgctgtgacggatatgtcctacggccttttgtccatcgtgccgaagtacgccgacggcactcccatcgaagattttgaggatgtgatcctgaccgaaaacggcaaagagctgaagggctgggacgccattgcgcggtacatggcctcgttcgaggacaccgacggcgacggcatcggcaacgtgccggactactacaacaccctgcacgaccgcaaaaaggtagaggacagccgcagcctttccgcgctgctgaaaaagcccaaccgctttgcctttatcctccttggcataattctcaccataattctgctggtggtgtgccttgtgctgctgctccgcaaactggtgcgcaagctccgccgcagaaaaaaagcacgttaaaatagcacaatgccggacagcctgcgggctgtccggcattgtattttcacaatcagaatctccccttctgcaagccttccagcacctcgtacaggtcgcggcactcggcggtgtacagacggcgcatctcgtcgttggcgggtgccatgtccggcaccatcacggtgacaaagccgccggcggcaccggcgcgcacaccgttgtagctgtcctccagcacaagggtacggccgggctgggtgcccagcgcctccgctgcccgcagaaaaatttccgggtcgggcttggacgccgagaactgctcgccggagacgatcaccttgaagtagtgggtcaagccccagccgtccaaatggtgccggatagaggccatccggctggaagaggccaccgccatggggatgtgctgcgcatccagccatgtcagaatttcgtccagtccgggctttttgggcggcggtgcctgaaacgccttttccgcctgtgcgtgcagcgcctcgatgatagcatccgtgtcgcagttttccccgtagaagcggcgcagcaccgcccgcatggtgtcccctgccgtgccgcgggcggcaacgtccagcccttccttataagaaagcccaagggtggcaagtgcaggctcccacagggtagcccagacccgctcggtgtcgaacatcaggccgtccatatcaaaaataacgctgtcgatcatgcagtatgctccttccatagaaaagcggggctgtgccccgcaaagtgctctgtgcccctattgtaccatagatttggcagtttgcacaccattgtgctcacaatctggtgcaactttaccggtggaaagatgaaacattttgcgattccttgcaaaactggcagggaatattataatagaaaccaacatttgtgtcataaagcgccggaaatcgtgcgcacgcgcataaaaggaaagagggaaactcactatgttggatatcaagatcacccgcacggctacgcccaaggcaaagcccaccgatgagacgaagcttggcttcggcaaaaagttctccgaccacatgttcgtcatggattacactgagggtgagggctggcacgatgcccgcatcgtcccctatggtccctttgaactggaccccgctaccgtggtgttccactacgcacaggagatctttgagggcatgaaggcctaccgcaccgccgacgacaccgtgcagctgttccgcccggactgcaacgccaagcgttttcaggattctgccgaccgtctgtgcattcccaagatcccggtagaggactacattcaggctgtcgaggctctggtggacgtggaccgcgactgggtgccccacaccgacggcgcttccctgtacatccgtcccttcatctttgccaatgatgtgggtctgggcgtgcacgcttccaagcactatatcttctgcatcatctgcgctccctccggcgcttactacgccgagggcatcaaccccgtgcgcatctatgtggaagatgagtatatccgcgccgccccgggtctgaccggctttaccaagtgcggcggcaactacgccgcttccatcaaggccggtgagctggccgaggagcagggctacgcacaggtgctgtggctggacggcgtggagaagaagtacgttgaagaagttggcagcatgaacatcatgttcaagatcgacggcaaggtttacaccgccgctaccgtgggcaccgtgctgcccggcgttacccgccgcagctgcatcgaactgctgaaggactggggctacgaggtcgttgagggcaagatcgccattgccgacatcatggcagctgcccgcgaaggcaagctggaagaggtgttcggcaccggtaccgccgctgttgtctcccctgtcaaggagctggtctggaagggcgagcacgccttcatcggcgacggcaagatcggccctgtcacccagaagctgtacgacaccatgaccggtatgcagtggggcaagatccccgataccaagggctggatcgtgcctgtggaaaagaaatattgagccgcctgtcaccctacggcttttaaagggactgctgcataccgtctggggcagcagtcccttttgcatcaccgcagatgccgttcaccgtta

SEQ ID NO: 13772 - DNA, 7799 bp, Unknown
  gut microbiota DNA sequence
ggcagtgcgtcagcactgacggagagggttcttttactccacttcaccgttacagatcatagccaccgctttgggcagcagcttccattccgcctgctccatcacccgtttttgcaacacctcgggggtgtcgccgggcaggatgtccacggccttctgcagcaggataggcccgccgtcgcactcctcgttgacaaagtggacagtagcgccggtcaccttgcagcctcgggccaatgcggcctcgtgggggcgcaggccgtacattcccggcccgcagaaggaaggaatcagcgcagggtgcacgttcaggatgcggcgcggatatgccgcgatgacgctgggacccagcacggacagaaagcccgccagcaccaccagatcgatcttgtgcgcccgcagcgtttccagcagcgcagcgtcaaattcctcgctggtggcgtagtccttgcggcgcaccacacagccttccacacccgcctttgcggcgcgttccagcgcaaagacgccgggcttggaggccactaccagcgtaattttaccattggggttctcgccccggacctcgctgtccagcagcgcctgcagattggtgccgccgccggacactaacacggcaatgttcagcacagctccacgccctcaccttctgcgatgacgcccagacggtaagcctccggctcgccgttggcgtgcaggatctccagtgccttatcagcctgctcggcgggcacggtgagcaccatgcccacgcccatgttgaaggtgttgaacatatcatgctcggagatgccgcccaccttctgcatcaggtggaacagagcgggggtacgcacatctgccttgttgatgcgggcgcagcagccctttttcaggctgcgggggatattctcgtagaagccgccgccggtgatgtgggagatgcccttgacctgcacctcttccagcaccttcagcacgggcttgacgtagatcttggtgggagccagcagcgcctcgccaagggtcttgccgcccagctcggcgggggtggagaacagcacatcgggatcagcgtcgatgttgaacaccttgcgcaccagcgagaagccgttggagtgcacaccggtggaaggcagggcgaggatcacgtcaccggccgccatggtctcgttgttcaagatcttttccttgtccacaacgcccacggtgaaaccggccagatcgtactcgtcctccggcatcatgcccgggtgctcggcagtctcgccgcccaccagagcgcaatcggcctgcacacagccctcggccacgcccttgacgatgttggcgatcttttccggcacgttgcgaccgcaggcgatgtaatccaaaaataccaacggctttgcaccggcgcagatgacatcgttgacgcacatagccacgcagtcgataccaatggtgtcgtgcttatccatgatcatggccaccttcagcttggtgcccacaccatcggtgccggagatcagcaccgggtgcttatagccggtgcagtccagctcaaacaggccgccaaagccgcccaagccgccgatgcagtgctcgttcatggtacgggcgacatactgcttcatcagctccacagagcggtaaccggcggtaatgtccacgcctgctgcggcgtagctttcagaatagctcttttccatgttcttactctcctaactttttggcgtccttgggacgatcgttcaggtgacggtcgtgaatatcggtagaaagcacactttccggctctacggcatactcgccggtaaagcaggcggtgcagaaaccgcattttgcgtttttggcaagctggacaacgtgctcgttggacaaatagcccagcgtatcggcgccgatgacctcgttgatctgctccagcgtgcggccggtggccaccagcagcttctggtccgggatatcggtgccgaagtagcacggatacttgaagggaggcgcagagaccataaagtgcacctcggcagcaccggcatcccgcagcagcttgatgatgcgggcagaggtggtgccgcgcacgatggagtcatccaccagcaccacgcgcttgcccttgacggtgctggacaccacgttcagcttgatgcgcacgctattctcacgctgcttctggctgccctgaatgaaggtgcggccaatgtatttattcttgatgaagccgatgccgtaggggatgccgctctcctgcgagtagcccagtgctgcatccaagccggaatccggcacgccgatgaccacatcggcctccacggggtgctcctgtgcaaggaagcggcctgcctgcttgcgggcctcgtgcactgagctgccctcgatgacgctgtccgggcgggcgaagtagatgaactcgaacacgcacatctgggtgtccgggcggccgcagtgatccttgatgctgcgcagttcgccggtcttggtatccaccactacgatctcgccgggctccacatcccgcagcagggcggcgccggtggcatccagtgcgcagctctcgctggcaaagacgtagccgccgccgggcagggtgccgatgcacaggggccggtagccccgggggtcgcgcactgcgatgagcttggtggcagacatgatcacaaggctgtatgcaccctccagcacgtccatggtcttgctgatggcagtctcgatgctgcccatgcgcagacggttgcgggtgatgaggtagcagatgacctcggtatccgaggagccgtggaagatggcgccctcgttttccagctggcggcgcagctccacagcgttggtcaggttgccgttgtggcacagcgccatggtgccgcggccatgccggacgatcatgggctgggcgttggcgcggacgcgggtgccggcggtggcgtagcgcacatggccggtggccatgtgtgccgtggtagcggacaggcttgccagcacctccggggtgaacacctcgtttacaagacccagatcccggtggccggtgatcacaccgtcatcgttgacggcaataccgcagctctcctgcccgcggtgctgcagcgcatacagggccgaataagccgctgcggctacatcctcggtaccggcacggtcgtagatgccgaaaacgccgcactcctcatgcagcggatatgcaaaatcagacattggttctcctttacagctcgttcagttcgttctgcagcttttcttccttggctgcgatctgctgtgccatggctacgcgctcagcctccagcttttcagccagtgcatcatcgctcagggccagaatttcagcagccagccatgcggcgttcttggcaccgttcagtgccacggttgccaccgggatgccgctgggcatctgcacggtagccagcagagcatccaatccatccatcgcgccgcccttcatggggatgccgatgaccggcagggtggtgttggcggcaaaagcacctgccagatgtgctgccatgcctgctgcgcacaggataacgccaaaaccgttggcctttgcgctttttgcaaaggctgctgcctcggcgggggtgcggtgtgccgaaaggatgtgtgcctcaaaggggatgtccagcgccttcagctgggcgcaggcacccttaaccaccggccaatcgctgtccgaacccatgatcactgccactttacgaaccattttccaaagcctctctttctcatgtccaacaagaccgacaaacaaaaaaggctgcggtacacctgtaccacggcctttatttcgtgtttttctgtccgcgcattttgcacaaggttgcaccatgcccctgattgcagtgaatgtgaccccattccatgcgacccggcaccagcagcatcattgaagtttccctccgcagtttcctgtgcaagcgtttttttcaggcggcgatgcaagcccgttttttggggcatcgtccctgtactagatacagtttacggcaaaaaaaccgctttgcaaagagcgtttgggcaaattctcccttgtgttcccatgccgtcaaaaaactttcgaaagttttgtgcagtttcgccattctttttctttttaagtatgacttatgcggcaggtatattttatgtaaaggctgtgttgatgtatcccagatatcgcgccggatttttaaaaaatgatctttgcggtggcggcgcgtgcagcgcggatcagatccgccggggcgcagcacacctgcgtaccgatgcgccccccggaaacgtagaccttctgctgggtcagcacgctttcgtcaaagacggtgcggtactgctttttcatgcccaccgggctgcagccgccccgcacataaccggtgaccttgttgatatccgccacatggatcatcgccacgctcttttcgcccacgctgcgggcagcggcctttaagtccagctctgccgccaccggaatgacgaacacaaaatagtttttgctgctgccctgcgttaccagcgtcttgtaaacacaggcggggtcctcacctatgctggcggctacggtcacgccgtccaccgccaccccctcctcgtgggggtactcgtgggcggtataggccaccttttcccgttccagaatgcgcattgcgttggttttagcttcttttcccattgttattccctctttgattctattgaaccctctcaggccgcttcgtgtccagctcccccgaaagggggagcttatgcgcggtaaccggcagattctctttccccgggaaataataccccatggaaagcagtaaaaagttcgacctttgggtgcgcagtcattgcacaacaatgactgcgcgggttcttttcttttttattctaccactttttcggaaaaaattcaaaatttctcttgacttcagtttcgtgaagtgatatcatagcgtcacgtacttcagagtactgaagtttgacactgcaagctgcggcaaaggagccggtctccctcgccgtttcacaggatagaaaaaggcaaaggagacaaaacactatgatcatcgtactcaaacaggatgcacccgacgtacaggtgcgcgagttctgccacgagctggaggatatgggcctgcagatcaacgattccaagggcagcgacacccatattctgggtctgatcggcgataccaaggccattgcggaaagctgggttctggcaaacccggtggtggagacctgccgccgcgtgtccgagccctacaaaaaggccaaccgcaagttccacccggacgacagcgttatcgatgtggagggcgtcaagatcggcggcggcaactttgcggtcatcgcagggccgtgcagcattgagagcgaggagcagatcacctactgcgcccagcgggtaaaggcggcgggtgcttccctgctgcgcggcggtgccttcaagccccgcacctccccctactcttttcagggtatgcgcagcgagggtctggacctgctcaagctggcgcgccgcgccacgggttcgcccattgtaaccgagatcatgaacaccgagcacctgcccctgtttgaaaacgtggacctcattcaggtaggtgcccgcaatatgcagaactttgagctgcttaaggccgttggccgccagaaaaagccggtgctgctcaagcgcggccttgccaacacgctggaagagttcgtgatgagtgccgagtacatcatggcagagggcaacgagaacgtcatcctgtgcgagcgcggcatccgcacctttgagaccagtatgcgcaacacgctggaccttgccggtgtggtcatgctgcacaagatgacccacctgccggtggtggtggaccccagccacgcctgcggccacgcatggatggtgccggagctggccaaagccgccgtcgccgccggtgccgatggtctgatgatcgaggtgcacaacaatcccgccaaggccaagtgcgacggcgcacagagcctgacccccgaccagttcgatgaactgatgcagttcatcggcaaagaggtggagttcttcggcaaaaaaatgaactgagcctgcccgaaagaatattgttatacgcagggactgctgtgccgaccgggttcagcagtccttttttgccggaaagttcgccaagccggaagtcttccctcggtcgggggaaggtggctgcgcgcgaagcaagcagacggatgagggcgcagccaagcagcattttaccttaaatacccccgatttctgtgcaccggcgggttttcattttcttttcacgggttttatggtatactatagtgtattttgaaaaaacactgccgaaagaggttttaaagatgaaagcacacattgcacgcaaccagaacgccggggtgccgctggcgctgggctggaacctttcccccgccgaccggggcaagctggagggcatggcacccgcctttggcatgaaactgctgcttgttgcccccgccgatgccggcaagaccgttgcccagctgctgggcgaggtggaggtaaaagcccccagaacactggtactggagccgggtgcctatcccccggcgctggtgctggcaaacttccgtgataaggacgtggacaccctgctggacctgatgcggcaggcacaggtgaccatccccctcaaggcggtggtcacccccgcaaaccgcaactggatatttgcagacctgctggcacatttgcaggaggagcacaccgcctttaccgccgcaaaggagagccagaccgtatgaagagccgcatcacccgcatgaccgctgcactgctggcggcggtactgagccttagcctgctggtcggctgcaagcccaaaaaggagctgacccggtacaccaccatcttttatgatgtgttcgacacagtgacgcaggtcatcgcctactgcgagagcgaggaagagttcaacacccagatgcaggcgctgcatcaggatctgatcgcctacaaccagctctacgatatctacaacgactacgatggcgttgtgaacgtcaagaccatcaacgaaaacgccgggaaagccccggtacaggtagacgaccgcatcctctccatgctggagctggcacagcagatgtacgaactgaccggcggcaagatcaacattgccatgggcatcgtactgggcatctggcacgattaccgcgaagctgccgaacagaacgcctccgaggcagacaacaccctgcccacgcaggaggaactggaggttgctgcccagcactgcgatatcaacgacctcgtcattgacgaggaggccaaaacggtctacctgtccgacccggagatgtcgctggacgtgggcagcgtgggcaagggctacgcggtggagatggtctgccgcgccgccgaagcccggggcctgaccagcgcactggtgagcgtgggcggcaacctgcgcgccatcggcacaaagccggacggcagccagtggaccggcggtgtggagaacccgtggaacgcctcggaggtgtataccaacaccaactccattttcggctcgcccatcaacatgagcgaccttgcactggtgaccagcggtgactaccagcgctactttgtggtggacggcaagcgctaccaccacatcatcgaccccgacaccctgtggcccgctgcctactacaacggcgtcaccgtgctgtgcccggactccggcatggcagactgcctgaccactgccctgttctgtatgccgctggaagaggggcagaagctggtggaatcgctggacggcgtagaggccatgtggtgcacacctgacaagcaggccaccacctccagcggctgggacagccacctgaaaaagtaaatttgtatacagaaaaaacgagcc

SEQ ID NO: 13773 - DNA, 673 bp, Unknown
  gut microbiota DNA sequence
gaaaagtctcccttacacgactggagttcgatttgctgctgatgcttgcctcccacgaaggacaaatcttctcaaaagaaaagcttttccgtgctgtgtggggacaaaactgtgacgacaccttaaaggtcgtggcaaacaccgtttccaatctgcgaaagaagctggccggctgcggcagctttatccgcactacgcagggcggctatgcttttgtgagccaaaaggagaacgacccggcatgaccaggatcttatttgtttgtctcggaaatatctgccgaagcccgatggcggagtatgtgatgaaagaccttacgtccaaggcaggactatccgagcaatttgaaatcgcatcagccgccaccagtgcatgggaaatcggaaatccggtctatcctcctgcacggcagaagctggcagaacatggcatcgactgcaacggcaagaccgcccggcagatgacccggctggattatgcacggtatgatcatctgattggcatggatgaaagtaatctgtgcgacatcctgcggattgtcggcggagacccacagcataaagtctcgctgctgatggcgcatacggaccatccccgtgaagtggcagacccatggttcacgggagattttgaagccacatggcaggatatactggaaggatgcacggcattg

SEQ ID NO: 13774 - DNA, 5310 bp, Unknown
  gut microbiota DNA sequence
atggtccgagtggcgagaatcgaactcacggcctcttgaaccccattcaagcgcgctaccaaaactgcgctacacccggatatctgtttgcttttgtcgctcacagcttgattagtatacccgacttttcccgttttgtcaagcgctttttccaaatttctgatgcagtttttacattttactgtcccggcttttgcccgccaaaaggatgcgcgaaagagcgttattttcaaaaatcgcgatacacatcttcctcatcgtcctcatggatgggggtggtgtcgtccggcggtgcgccaaactccaccgtggcaaaggccagcgcgaatacgctgtctgccccggcgtgcagcagtgcctgtgcgcaggcagcagccgttgtgccggtggtgatgacgtcatccaccagcaggatgcgcttaccctccagctgctgcggctgcgccgcccggaaagcacctgccacgttggcgatgcgctgttccagcggcagaccggcctgatgccgttttgcccgggtgcgctccagtgcctgcggtgccagcggcacctccatagccttggccagcggcagcgccatcagttccggcacattgtagccgcgccttttaccggaggccggcaccggtacgatcaggtcgtacccgatggccgcccacggcaccggctgcgggagcagctcgccgtactgcacggtcagttcaccgccaaaggccagctgtaccagacggttgcccatctccacagcccgccacggcttgccctgatacttcgcgttcaggatgccgcgccgcacacagccgctgtaacggtagggcgcagccgcaccggccagattgctgatatagtgctgcgccgggtccagccggatgcccggcttgcggcgcaacgtctccagctgctctgcacagtccgggcaatcccatacatctccaagtacccgaccacaaaaggggcactcgcgcgggtaaagcagctgccgtaccgcccgaagcgccctgcgccgggggtcatagtagtccatcagtcctttttgactgccacgatcacccgcacgcgcttgcctgctgcgcagccaaagttatcgtaccagccggtcaggtagtagccctcggagttcacctcggaaagcttggtggcgtaatactggcccttgtaccacaggtacacctgcatatcgtcagctgtctcgtagcgggtgccgttgctcatcaccgaggctgcacccaccttgtcgatcttcatgggcatcagctggatcatggcctttaccgtgccgttcacgttctgccgcactgccaagccgcccgccagcaccggatacttgatagaggtggaaaagctggcctgactgccgttgacgtagcagatgtaagtagcgccgccgcccacaaagttgaggatggtgctcatgggctggccggtgattttggccagctgcttgaggccgatgctcagcagcgagccggaactgctggtgatgcggttccagactgtgctcagcagcgagccgtcaatgacgccccacaggatctcgctggtggtgggcaccagcacactgcgcagatcatccaccaccgtggtggtgttggtggtgccgccggtagagccggaaccggaagaactgtcccccttagagccgctgccggaaccggaagaactatttcccgaagaaccattccctgagccggaggagccgctgccagtcagggtacccagaatggaaccggcattgacggccagattcttcacatcgtccagcacgccgtatttccacaggtcaccggtgacatcgttcagaatcaggcggtcgatctgcccctgctcattcagcgtatagtaacgcacggtccgggcattcagctttgtccccgctattcggctgggacgaaccgtcccagccaacccctccgatgtcgtatccagaatttgtacgtcatcggccagagcatagtctcccagcgcggtggcggtgtcgttgatggtgccgctgaccgatttggactcgatggcggtcacctgttccccttcgggggtcacgctgatctccaccagccagccggtggggtagttcaggcttttgtcgatgttcacggtgcggatgatgccgtcggtgcacattaccgagatcttttgcagcacgtctgcaccgttgtcctctacaaggctgcgggtggcggtctgcaccacgccgtagaacacgctgtcggcttcctcgccggtgatcacatcggccacctcgttgtccatgcccagcagcagagtgaccacttcgcccacgccgccgccgttcagggaggagatcttggacgccacggcagagctgcccagcgtgtaattgctgcccgccacggtcagtgcggtaggtgcgctggcgctgggcgataccgccgtaatgcggcctgcggcgcggcgggtgtagatccacaccgtctgcaagctttcgctgtaataatacacatcgtacttgttcagctctgccgaggcagaggtcttatcgttgcggtaaacgctcaccggcgtaaagggcagccgagtgccctctgcggccacaaaggggcccttgcggctcttgagcagcaccgaggaggtatccacctgaccgttggacaccgtaaagcccagcgagctgccgtaggcgctgccgctggcggtgttggcgcgcagggcgttgtacagcagcagggtgcactgctcgtaggtcatggcctgtccctgcgtgcaggtcagctggtcccgcagaccgatctgctgcgccttgttcagctgtgcctgcgggaaggagccggtcaggtcggtggtcttatagctcagcatcttcagcaccgcagcacaggcttcctccagcgtgacggtgtcgtccgggcggaaggagccgtcggtgtagccgttcatccagccctgctgcactgcaatgcggatatagggtgcccactgggaggtgccgggcacatcccggtacaaagtgcccaccgtgccctgcgcgcctacgctttcccggtaggtggaaaaggacaccagcattttggcaaaagcgccgcgggtaatgttggcgctaagttcctgaccggtgggcacagcgcccagagtaatagccgtctgcagggctgtgttgttgatgctggccgccgagaccggcagcaccagcaccgacaccgcaatgctgaccgccagcagaaatgcgagaatccgttttttcattggtcgtacctcttgttctttgtttatcacgccgccgcgatcaatcgtagcgcaatgcttcaatggggttcagccgggctgcgcgccgcgccggcagatagccgaacagcacgccgatgcccaccgagatgccaaaggccaccacaatggagttgaaggaggggcttaccgtaacggtggtatcggtcataaacatgggcagcacccggttggccgccatggacaccgcatagcccagcgcaatgcccaaaacgccgcccagcgccgaggtggtggctgcttccaccacaaactgcgccagaatggtgcgctcctttgcgcccagtgccttgcggatgccgatctcgcgggtgcgctcggtcaccgacaccagcatgatgttcataatgccgatgccgcccaccagcagcgagatactggcaatgccggtaagcaccacgatgaccatgttgatcatcttgttcatttcctccagccactcgctggcgctgtacacatagtagccgttttcggtcttgaggatcgacagcaattcctcttccatggtggccttggcctcgttggcaaggctttcgtcggccatcatggcggtgtagcagtccaccatgctttggctggagagccgcatcacggtggtgtagggcaggtagacgcagtcgtcatcgctgccctgctgcatagtggggtcgctgaccttggcagacagcacacctacgacgcggaacttgttggcaccgatcttgagcgtctgccccacaccgttgccgccaaaggctacgcggttgaggtaatcgccgatgacgcagacctgcttgttgtcctgcatatccatatattgcaggccgcgcccctgaacgatctggtaattcttcatttcggtaaagttttcgtccacaccgctcatgttggaccagcggtagctggtggtgccgatcttcagcgtaccgctggctttgccgctgagtttgacctgcggcgacaccgccttgatcaggtcggaatgccgctggcagatatcgtacatctcctccaccgacacggtacgggagccgtagccccacacctgaatgctgagggtattggtgcccagtgcggaaaagctgtcccgcatgctcttggtcatgccgttgcccagacccacgatgacgatgaccgccatcacgccgatgatgatgcccagcatggtcagaaaggtgcgcagcttgttgctccacacgttctggatagcctgccggaaggtttcaatgatcatgcctgttcctccttttccggcgtttcgggcagcagagtaggctgcaccatggcctccggtgcgtgggagtcaccgtcatacaccacctgaccgtcctccagccggatgatgcggtcggcctgcacggcaatggaattgtcgtgggtgatcagcaccacagtgtgtccctgcttgtgcagctgctgcaaaagccccagcacctcgcggccggtatgggagtccagcgcgccggtgggctcgtccgccagaatgaccggcgggttgcgcaccagtgcccgcgcgatggacacgcgctgctgctggccgccggaaagctggttggggcggtttttcagcttgtcgccaagccccacctgctccagcacctcccgggcgcggatgtggcggtcggcgcgggagatacccgcatacaccagcggcacctccacgttttccatcaggtttagcttgggcagcaggttgtattgctggaagataaagcccagcatctcgttgcggacagcggccagctcgttgcggttcatcttgcccacatcccggccgttgagccggtaggtgccgtgggtaggcacatccagacagccgatgatgttcatgcaggtggatttgcccgagccggactggcccacgatggccacgaactcgcctttttcgattttcatggtgatgtggtcggcagcctttaccgtggtatcgcccatctggtaatatttgcagacctcatcaaactcaatcagagcgctcattcatccctcctgtgtcaatccaccacgaccgtgccggcctcggcggggtcgtggccgtctgccggttcgttgccgtctgctgcgggttcttcactgttttcggtctcctcg

SEQ ID NO: 13775 - DNA, 1571 bp, Unknown
  gut microbiota DNA sequence
cgacgtccatatcgccagagccgtagtagctgtcactgctcacagagctggggtcgtaggcgatggtatcactctcagacaggccgctggtcacctgcgtatagttgtcgtcgctgataccggtcttgaccttgacgtacacatagccctccggtgcgctcatggaggcatcggcgttcacggcactgggcgagtcctgccgcaccagcacataattgccccgcacgatggcggcgttaggcacggtgagcgcatttttagcctgtgccaccacgatctcggcgttggcgttcatgcccgggcgcagaccggtggtctcatcgatgcgcacggtcaccgggtaggtggtggtgccgccgctggtgtcgcccttcatggacacacgggtgaccacgccctcgtaggtcttatccttcacggcgtctgcggtcacctgtacggtctgccccacctgcaggctgctgacctgcagctcgtccacgttgatggtcatttccagataactcaagtcgtaaatggtgcacatgtcgctgccggtgctcagggcatcgcccaccttggcattcttttcgatgatggtgccgctgatgggcgaggtaatggtgtagttatccatggcgtcctgcaggttctgcatggacagctccgcgccgcgcagggtctcggaggcagactggatggactcggtcagttcctcaccgctgagggtcaggatgatgtcgtccttgttcacactgccgccctcccgcacattgatagcagtcacggtgccggaagccagtgaagtcagggtacgctcggcctgatactggaagtttgccgctgcaatggagctgaccccgttgacagtagccgtagccgcctgtgccgtggtcagaccacctgcgttggacaccgagagggtcacagtgcgggtgagcagattaccggtgctcagggcatcggtgccggtcacggcggtaatagtgccgggcagcacctcaaaggtaccgtccagcgtcacctcggcggtctgccctaccgagaagttggcggcatccgcagccgggaactccagcaccagattcatcttggagctgtcccgcaccacagccacttcctgaccgctctttacctcatcgcccttgttcaccttcaggctgctgacgacgcccgccacctcggcgcggacatactgacggtctgcggtcttatcgtagctgcgctgcgcctgctgcaaggtgatggctgcctgctccaccttggtagtggcgtcggaggaatccaccgtgtacagcacagtgccctcttccacgatatcgccctcttcaaagctgccggtcagcaccttgccggccaccagcgacttgacgctgtaagtattggcgggcttcaaagtgcccgtaccgctgagtgtgttggaaacattccgggtctcgggcattgcctccgtgtaggaagtatccacgttggcgggctttgcgctcttgggcttcagcagccaccaaccgccggccagcaccacaattgctaccggcaccagccacttccagttctttttggcaaacgccgccgcgccgccttttttcggt

SEQ ID NO: 13776 - DNA, 26600 bp, Unknown
  gut microbiota DNA sequence
gctacccccttcggggaagctggcgcgggagcgcctgagagggtaaaaaagtgggtcagaagcgcccacaggcgtttctgacccacaaatagaacgatattattgttttacagctggcaggcggtatcgtagccggtgcggatggcgttggagatatccgcagccttaccagcggcatcgccgatggaatacaccgggatgctggcagcctccagcgcagcagcgtcaaattcgttggagcgtgcgcccatggccagcacaatgtaatcgcaggggatggtcacctctgcgccgtccttgttctcgcagacgacggcgtccatgcggaactccttgaccttgtggctggggtactgctccacgccgtaggtcttgtagttttccagcagggtgggcagaatggtggtgctctcgcctgcggcgatcttgtccatcatctcgataacggacaccttgcagccgcgggcagccagatactctgcggtctcgcagcctaccatgccgccgccgatgacggcaaccgtgccgtacacctgctgctcaccggccagcaccttccacgcgtcggcaacgttcacgctgtcgatgccggggatgcggggtgcggcgctgtgtgcgcccacagcgttgatgacagcctcgaagccggcatccttcagctgctctgcggtgcgggtctgacccatgcacaggtgcacaccggcgttgcagactgcgtggatcagatcctgtgcggcacggcgcatctcctccttgcggggaggcacgcaggcaatgttcagctgaccgcccagagtggtggtcttttcaaacagggtcacgtcatggccgcgcagcgctgccacacgggctgcttccagaccggcagggccgccgccgaggacggcaatcttctttttctgcgctgcgggctggatgctgcgggtgttctcgtagccgttctccgcgttcagcacgcaggagaggaactggcggttctggatggcatcggtgcagcccttgttgcagctgatgcagcgtcggatatcgcaggccttcccggcagcgatcttggtgccccagtcggggtctgccagcagcgggcgacccatggcaactatgtcggccatgccgctctcgatgacgcgtgcagccatgtcggcgtccacgatacgacccacggcgctgaccggtacattgacagcctttttgatgtccccggcgatcttgacaaagaagccgtagggctgtacgcccatgggaggaatggtgtcggccatgttgccggtgtggttggcctgggcaacgtggaacatatccacgccgtcctctaccagccactgggcaaactgcacggcgtcggcttcgtcaataccgcccttgccgcgctgcggggtgacgatggacagcttgtagtcgatgaccatatccggcacagccttgcggatggcgcgggtcagcatgcgggcaaagcggacgcggttctccaggctgccgccgaacttatcggtgcggtggttcatgcgggtggagcacaggcagccgttcaggcggtcgccgtggatctggatgacgtccacaccggccttctgggcgcgcactgcgcaggcgcacatcttatcgatgatggacatcagcatctcctcgctggcctcatcggtaaagaacatcatgtcgtgatgcaggcgctgacgcatctcgtcaaacttcttctgcataaacaggctgttgatggcgtccacatcgtactccgggtggaagatctggacgcccagcttggtgccgtaggcgtgtacgctgtcggccagtgccttgaaggcagggatctggctgtcgtcaaacagcttgggggtgggagaaaagctgttgatgggcgcaacatcgcccataacgatgtagcccacgccgccctttgccagacgggtgtagaagcccatgtcctgctcgctgatcatgccgtttttctcgtagccggtggtcagcggggggaacatgatgcggtttttaaaggtctgtccgcccacctcgatgggctgcagaattacgttttccatacaaaagcctccttgcagatacgctttgctttacagatttgctttgatgaatgctgcggtctttttctccacggtggcacgggctgccagcgtggcaaagttgtggccgccgcccgcaatggtgtccacctcgggtgcggtgtacacctgtgcgtaacggctgcaggtgccctcgtccaccagacggtcatcgtcggcgcgcagcagcagcaccgggccgttgtaacccttggcctcggtaaagggatcggggtgcttggccatctcgtagttaaaggccatcttgtagcacagaccctccatgtcggtgtagtccttgccggtctgcacaacaccgtcggcacgctgtgcgcagccgaaccacatcccggcgcccgggcacagcaggatcaggccgtggggctggatgaccggtgcgcaggaagcggcaatgtagccgcccatgctctggccggagaggaacagcttttcgctgtccacatagggctgctcagctgcccatgcaaagatatcctgtgcatcggtgtgcaggccgtcaaagctcatatcttcgaactcgccgtcgctctcgccgttgccgtagaaatcgaaccgggcgctgccgatgccctgcgctgccagagcgcgggacagatgagtgtacatggacttgtagccgctgcagctgccggcaaagccgtgcagatgcaccacaaagggtaccttgccctcggtgtcgggcagggtcacgatgccgcgcagggtgtggccattgcggtttttaaactggacctgtaaaatcttcatggtttacttgctctcctttgcggcgcggcgagctttcagctcggtcagcatctcggcagtcttctgcttggtcagggggtagacgaagaacaggatggcaactgcaatgccgtagcccaggaagtagacgccggtgtaactcttccagatagcgtttacaacgcctgcggtctgcacagcgccagcggtaacgttatagccgatggcacccagcacaaagctggacaggctgccggaaatggcgcttgcaagcttgcggaagaaggagtaggtggagtagacgatgccctcgttgcgctcgccggtctgcagctcgtggtagtcgatggcgtcgttgaccatagcccagatcagcacctgcatgccggaagcacccagatagcagataccgttgatgacgatgaaggccacggggttgtggacggggaagaagaacaggatgccgaacacgatggcggcaaagcctgcgcccatgcagcaccactccttcttgccgaacttgttggcaagaggctgggtgatggcaaaggacagcacggcgtacagcacgctcagcataccggagacagcctgaattttaacgttgccgaagaagtccttatacaggtaggtgttcagaccgttgaccacggaagcaccgatcatgccggtcaggctgaagaacataacgcccagcagagccttgttgtgagagatctccttgagcacgtgcaggtagttcagcttttcgccctgcggacgctcgggcacttccacgcgctccttgcaccacacgcaggtgatctgcaggcacagcagacccagcagagcgcagatgcaggccagcatcaggaagcggccagccacgggcttgttgtccacatacaggaacagggggccgatcatgaccatgacggtcatgaagatggtgccgccaaggctgcggtagcgggacagtgcggtgcgctggctgacatcatcggtcatcacgctggacagggtgccgaagggcacgttgacgcaggtgtacagtgcctcgtacagaacgtaggtgacgaacatgtaggccagacgcaggccgtagttgatgttgcccacattgacaaagcccagtatgcacagcactgccatggggaaggagaaggcgcggatccaagggatgaacttgccgcccttggtggccttgcgggagtccacgatcgcgccgatgatggggtcgttcacggcgtcccagatcttggtgaccagcagcaggatacccacatggaaggggttgacctgcaggatcaaggtgtagaagatcgacagatacatggcgcggtactgctcggtgaagcagcagcccagatcgcccagtgtatagccgatcttgtccttcatggagaagggtcggacggtctttttctggtccattgtgttttatcctccttaaaaacagtgaaaccacgagacttttcgcacaagtctcttttctacgctttgcattatacgttaattttacatcaatacatatccaaaaaatgattgaaaactatcacaaattgatgtattatgcaattataacagttgtacttttctgttgtgtacaacaaactgtcgcacatgacagtttcacggaggtttttttggtgaactatacagtcaagcgttatttttttgagcagagcgccgtccgggaattctattccggcgcgtattatgatttgtttctggtcatgcggggcagcggcgtgttccggtgcagcgaggtggtgctgcccgcacagcagcagaatctcatcatcttcaagcccggtcagggcggcagactggaatacgccggtgcttacggcccgctggaacttattcgggtgcagctgtccccccagacgctggcgcagctttcggacgcggacaccgaccttgaaaaaagcttcaacgtggtgcccttccggcaggtagccgtccgcccggacagccagatctatatgctgctgaaaaaccttgcccggaagttgctgatgctcccgcaggagcgcacccagttcggtgcagcggtattcgagcacggtattctgcaaatgttcgtggtgctggcgctgcgtgcctgcatccatgcagagttccacaccgcatcggtcagccgccaccacctgatgctggacgaggtgtttttgtttattcaggcgcaccttaccgaggagctgacgctggaacggctggagaaggagtttttcgtttcccgggaacatattgcccgggaattcaaacgccagaccgggcagacggtgcaccgctatatcgtaaaggcgcggttagaccgctgctgcaccctcatcgagcaggggctgcccatcaccgaggtgtacaagaccagcggctttggcggttacaaccactttttccgcgcctttaaaaaggagtacggcatgacccccaaggagtacttccaaaccacccggcaggacgcccggggatgaatccggcaaaagcagcgccgtctgcgcctgtgaaaaaagccgcccgggaaaatccgcagatcctcccgggcggcttgcttatcctattttttcttttacttgcggcgggtgaggcagttcagcgccatcacaaccagcacgagaaagccgatgaccagcaggataccggtcatgccgatgagcatcatgggcagggtggtcatccaggaagaaagatgaagcataaaggcacctccgttaagccatcagggaaaggatcagtccgccggcaaggacggatgcgatctgcccggaaacgttgacgctgatggaatacatcagcaggaaattctggttgtcctcggccagacccatcttgttgaccacgcgtccgctcatgggaaaggccgaaatgcctgccgcgccgatcatagggttcagctttttgccctcgggcaggaacaggttcagcagcttggcgaacagcacgccgccagcggtatcaaagataaaggccacaagacccagcgccatgatgagcaaagtatccggccggacgaacttgtcggcggtcatctgcccggctacggtcagacccagcagcagggtgatgaggtttgccagtacgttctgggcggtctcgctcagggagttcagcaccccgcattcccgcagcaggttgccgaacatcaaaaagcccaccagcgccacgctggccggggctaccagaccggcgaccaccgtgaccacaacagggaacaggatcttggtcagctgggtgacattgcctttttcgtagggcatacggatgcggcgttccttctgggtggtcagcagacggatgaccggcggctgcacgatgggcaccagcgccatgtagctgtaagctgccaccataatagcgcccagatactgggatttcagggtgtttgccacaaaaatggcggtggggccgtccgctgcgccgatgaccgcaatggacgcggcgtccttcatatcaaagaagaacccggccagaaacagggtgaaaaagatgccgaactgtgccgctgcgccaaacagcatgagccacggcttttccagcagcgggccaaaatcgatcatggcaccgatgccgatgaacagcagcagcgggaacagctcgttggacatacctgcctcgaacagggcagagatggggccaacggtgtctccctgcgtgatggcaccggatgcgggaaggttgaccagaatggcaccgaaccccatgggcagcaacagactgggctccatctttttgacgatggcaaggtaaatgagcagggcaccgatgccccacatgaccaccatctgccatgtcagcgccccgaagtttgaaaagagcgcggcgaatgtgttccagaaattcatattgtttttctgcctccttttgttttgatgctgcggcaagaaaaaaagagacccttgccacagcgtaagatctgtgacaaaagtctcaagcgaacacatgacatcgggcattgctgccgtgatgacgctgccatgcagcggcctgccgaaaaaagccttgaccggcgggctgccctttactcccctttatcatttttattgataccagaaactgccgcttctgtcaagggggaaaatgcggttttgcgcaaaaatccaaccgtgaaaaggccaaccgggaaaatccgcagattttcccggttggcaaactataaatatttttgctttaaatcgtcagtccaccaccggtacatccagcccgaactcctgcgggcggaagcggggacagacgttctcggtgatgcagatgaccgaagcagcaagacggctgccgatctcgcaggattctgccagcgttttgccgtaggtcaggccgatgaccgtgccggcaaagaaggcgtcccccgcgccagtggtgtccatgacatccacctttttggcgggtacgatgccgcagtcaccgtctgcacaggcatataccgcgccctgcccgcccatggtcaccaccatgctgggaatgttggcgctgcgcacgttgcccgtgagcacccggcacatctcgtccggggagaggtggtcgtagtcgtccgagaacagcagtccggcctcctgctgattgcagacgaagcaatcgatctgctgcaaaaaatcccgccgctccatggcaatgctcatgttggagaccacggcaaacacctttttgccgtactttttggcgtagcgcagggtctgcttcaccgtttctttctcgaggtccagctccagtgcaatggaatcgcagtctgcaaaaatggcgtcgccctgctcctgtaataggccggtcagcggggtggtgtccggccgcttggagatggcggcgtgcacatcgccgtcgttgtcaaaaatggccagccatgtgcccatgccgtccggcactttctggataaagcgggtgttgaccttgtgccttgccagcttgtcgatgacgtcctgtcccatgccggtgtcgtctaccagacccacaaaggtggggcgcagctccacgttggcgatatcctccaccacgttgcggctcacaccgccgtgtacctgctcgatgcgtccggcgttgcgcccgccggggatataggtggaaaggggatagcccttgatatccacaaaaacagctccgatgactacgatgcccataaacgataaacctttctgacttcagttgattttacctgtagattttacctgtattatacaggaagcagacaaaagatgctatccctttgccgttttttgcggaaaaatatcttccgctaagacccttccgtgaaaaggccaatcgggaaaatccgcagattttcccgattggcaaatataaatagtctttccgctaaaaatgcccagagcgcaacggagggcattctgtatcagcccctgtcacatcgccgtgcgggcggtgcgcaccagatactccatggcctgcaccgggtactgcccggcggcggtctcgccggtgagcatcaggctggatgcgccgtccagtacggcgttgtagatgtcgctcacctcggcgcgggtgggtacagcccgggtgtgcatgctgtccagcatctgggtcaccaccataaagggcaccccggctgcccggcaggcggcagaaagctgcttctggcagcggggcagctcccataggggcatcgcgttgccaaggtcgccccgggcaatgaccacctcgtccaccagcggcaaaaactccggcagcgcctgtacgcccgcaaggttttcaattttggcaagaatcttcagcccgggtgcaccggcctctgccagcgcctgccgcaggttgcggatatccgcagcgccgcgtacaaagggcagcatgaccccggtaacgccgcaatcggcggcgatggcaaggttctccttgtcctcggtggtcagggtgggcatctggatatctgcccccggtgcggccagacttttgcggctttgcagcaccccgccccgcattacggtacacacgagcgcatccggttccgcggtgtccacccgtgccagcagcttgccgtcatccagcagcagctcctgcccgggctgcacgctgtgcaccagcgcggcagggcagggaatgccctgcgcgcccagacgcacggtctgcccggcggtcagggacagcggctgcggcagacgaccgatgcgtaattccggcccctgcagatcaatgagcagctttttgaccccggctttatgcagcatcaccagccagtccttgtgcgctgccagcggcccgtgagaaaggttcatgcggatgccggtcataccggcttccaccatctgctgcaaaagctttacatcggcacaggcagggccgatggttccgtaaaaatccataattcctcctgcaattcacgttttctttctattgtagcatgaccgcgctgcaaaagatagcccggcggcgcacaaaaaaacaccggaagctgatgcaaagcctccggtgtctttttatgatgccttatggggtttactgctacactttgcaccgcctgcgttcagtacaaagcttacagctccctctatttttaaaggttgtacttagtttacagcatttcgggcggttcgtcaagagctttttccagcttttgccggcaaaaaccggaatatcacaacattatcacaactgcagctggtggtagcacgcgccctccatggtcttccaacaggcggtgcttccctccagggtcatgtagctgtgggcggtgttttccttgggcaggcttacagagccggggttcaggtaaaggctcccctgcccgaagtttgtccatgcgggcacatgggtgtgaccgtggagcaaaatatcccccggggcaaggggcggcagatggttcaggttgaacacatggccgtgggtaacgtagaccagccgctgccccaccggcagcacggcgtagtctgccagtaccgggaaattgagcaccatctggtccacctcggcgtcgcagttgccgcgcacacacagcagcctgggcgcaaggctgttcagcagcggaatcacctttttgggggcgtaatcccggggcaggtcgttgcgggggccgtggtagagcaggtctcccagaaagagcaggcggtcggcctgctcccgttcaaaggcctgctgcagctgctgcgcataataataggagccgtgcaggtctgatgcgatcatccatttcatatacaatgccctccctcagagccggtttgccttattgtagcgcctgctgtaaaaatggtcaagtgattacaaaagtcatacttttgtaccaaaaccccttgacacgccgctgagaatgtggtattctgctggagttgcagcccgcaaatgcgcaggctgcatatcgcggacagctgccgcgatcataaaaaccgtgtggatttttacagcaacattgctacttttcgccacacaatgacctcacaagggccattgtgtggcttttttgtgcgccggaaaccggctacaggccggtgctgcgccttccacatttttactttttacagatagcaggtgaaatttttcaatgaacgaaacttttatgaaggagaagccggtgctgccgctgctgctctcgatggcactgcccaacgtggtctccatgctggtgaacagcctctacaatatcgtggacagcctgtttgtggcgcgcatcagcgaggacgccatgaccgcgttaagtctggtgtttcccatccagaacttttccaacgccattgccatcggctttggcatcggcatcaacgccatgatcgcgctgtatctgggcgcaggcgaccgcgaaaaggcagagacggccgcaacccacggctttgtgctcagccttgtgcacggcgtggtgatgatggtggtcagcatcgccatcatgcccggctttctgcgccgctttacgcaggacgagacgctgatcgccgccggcatcacctactctaccattgtgttcctgtttttggtcgtgaacatggtctcgcttgcctttgaaaagatctttcaggcggtgggccgcatgaaggtgtccatggtcgccctgatcaccggctgcgtgtgcaatattctgctggacccggtgctcatcttcgggcttgggccggtgcctgccatgggcattgcaggcgcggcactggctaccggcatcggtcaggtgctcagcgtggtggtctaccttgtggtctatctgcgcaccgagctgccggtgcggctgcgccgcagctgtctgcgcccggacgcggcgctggacggcagactgtacgccatcggcgttccggccatcctgaatctggcgctgccctcgctgctggtcaccttcctcaacgggctgctggcggccttttctcagagctatgtggtggtgctgggcatctactataaattgcagacctttttgtacctgcccgccaacggcttcgtgcagggcatgcgcccccttattggctacaactacggcgcgcgggagtacgcccgggtgaaaaagctgttccagctgaccctgctcatgagcgcagccatcatggcggcgggcactgtcatctgtcaggttgcctccgggcagctgatggggctgttcacccagaaccccgaaaccatcgccgccgggcagaccgcgctgcgcatcatcagcatcggctttgtcatctcggcagtctccaccaccgcctccggtgcactggagggtctgggcaagggcgcagaatcgctggtcatcgcgctgtgccggtacgtcattttcatcatgccgctggctgcgctgctgtgtaactggctgggcgcagacggcgcatggcacgccttctggcttaccgaggtgctggcggcagtggtctccggtatcgtctaccgccgggcggtcacacataaaaaataagaatttctgataggggcgtttcataacgtccctatttttcattgacactacgggaaaagtacggtaaaataattttcgtgttttgacaaaaactgtcagtgcgcaagatattacagaggatgtggaagtatatgatcgagaccattgccgccgtcaatcaggcggtgaacagctttatctggggcatccccgccatggtatgcatcattggcgtggggctgctgctcagtgtccgcacgggctttttgcagatccgcaaattcccctacgccatccgcaccaccgtgggccggatgttccgcaagcgggatgcttcggacggtgccatgaccccctttcaggcggtgtgcaccgcgctggcgggcacggttggcaccggcaacattgccggtgtggcgggtgctattgccatcggcggcccgggtgccgtgttctggatgtggtgctctgcgctgctggggatgtgcaccaagttttccgaggtgacgctggcggtgcatttccgggagcgcagcgataccggcgagtgggtgggcggcccgatgtactatattaaaaacggccttggccgccgctggcagtttctggccgtgctgtacgcactgttcggcgtgctgaccgtgttcggcaccggcaacgcaacgcaggtgaacaccatcgtggcagcagtggataccgccctgctggaatacgggctggtgggcggcagctttctgcccaccctcaacctcatcgtgggcatccttgtggcggtgctggtggcgctggtgctgctgggcggcatcaagcgcattggcagcgtaagcgagaagctggtgccctttatggcactgttctacattgtgctgtcggtgggcgtggtggtgctcaacttctcccgcctgccctacgtgctggaatccatcgtggcgggcgcgttcaaccctgctgcctttaccggcggcactattggcagcctgttcgtcagtatgcaaaagggcgtttcccgcggcatcttttccaacgaggccggtcttggcaccggttctatcgcccatgcctgcgccgacaccaaaaagccggtcaagcagggcatgttcggtatttttgaggtgtttgccgataccatcgtcatctgcaccctgaccgcgctggtcatcctgtgcagcggcacccaggtcagctacggcgcagcggcgggtgctgagctgaccatctccggctttaccaccacctacggcggctgggcgtccatttttaccgctgtggcgctgtgctgctttgccttttccaccatcatcggctggggtctgtacggctcccgctttctggtgttcctgtgcaagagtaacaaagtggcgcgccccttctttgtggtgtatgctctggtggccattctgggtgctaccatggatcttggtctgctgtggagcatcgccgacaccttcaacggcctgatgagcatccccaacctcattgcattgctgctgctttccggcacggtggtgcagctgacccgcgccttttttgaatcggaagggtgaacggcagctctgcccatagtggacagaaacgccggaacgcggtatactgagaaaaaacaacggtggctatgcaccacaggaggttctaacgtggaaaactttaacgaactgctgcagaagtatgcggattttatcgtccgggtgggtgtgaacccgcagccggggcagactttgatcatcaactgcccgctggaaggtgccccgctggcacggctgtgcgtgcgcagcgcctacgaggccggtgcgcgggacgtgcaggtgaactggcaggatgatgccgttacccgcatccgcatggagctgggcagcgaggaggccctgaccgaccacaagggctggcagctgcgccgctatctggactacgccgagagcgagggcggtgtgtgcgtgctgcacctcatcgcggacgacccggaactgtttgccgggctggacggtgccaagatcagtcgcgtgaacagcgcgaaccgcagctttatgcagccgtggcgggagtacaccatgaacgaccgggtgcagtggtccatcgccgccctgcccgcagagccgtgggcaaagaagatgttcccggagctggacactgccgccgccattgaagcacagtggaagctgatcttcgacacctgccgtgtgaccggcggcgacccggtaggggagtggcagaagcatctggaccgcctgaacgagctgggcgcaaagatgaacgccctggatctggaaagcgtgcattttgaaagcgccaacggcaccgacctgaccgtgggtctggccgagcaggcggtgtgggagagcgccggcagcaaaaacgagaagggcgtgcccttcctgcccaacatccccaccgaggaggtgttcaccgcgccccataaggataaggtggacggcatcgtttacggcacaaagccctacgtctttaacggtcagctgatcaaaaacttccatgtcaccttcaaggacggcaaggtggtggagcacggcgccgacgagggcgcagacctgctgggtcagctgctggacaccgatgagggcgcacgccacattggtgaggtggcactggtgcccgcctccagccccatcaaccgcagcggcaagctgttctacaacaccctgtttgacgagaacgctgcctgccacatcgcctttggcgacagctaccccggcaccaccgtgggcggcaccggcctttccaaggaggagctggcagcccgcggcatgaaccactcctccctgcacgaggacgtgatgatcggtgcagaggacagccgcatcaccggcaaatgccgcgacggccgcaccgtgccgctgtttgaaaacggcgtctgggtgctgtaaaaaagccccaaagggcgcgcaactgcaaaaaaattgcgaaaatgcttgcataaatcgcaagagtatgctatattctagtagtacgatatagtttaacctgaaacgtgggccgcaaggtccgcgtttcttgtttgtttggaggttttttatggcgaagcagtctggcggcaacaccgcgcagagagtggaagcgcttgtccgtcccacggtggaaggcatgggtctgcgcctgtgggatgtggtttttgagaaggaagggccggactggtatcttcgcatcctcatcgaccgggacggcaccatggataccgacacctgtgcagaggtgtcccacgcactggaccccattctggatgaggcagaccccatcgaccagagctattatctggaagtgggcagccccggccttggccgcaagctgacccgcccggagcactacgaggcactcaagggccagaaggtgcgggcaaagctcatccgccccaacgctgacggcgtgcgggaactgtccggcatcctgaccggccgcgagggcagcaccgtgacgctggagaccgagaacggccccgtgacctttgaggtgaatgcagcctccggcgtgcagctgtgcgacgacgaggatctgttcaactgagaagaaccgtctctgatggagaaaagagaacaaaatatataggaggaacccgaaaaatgacagcagcgaataaggatttttttgaagcgctctccatgctggagcatgagcgcggcatcaccgcagaatacctgatcgaaaagatcaaggcggctatcatcattgccgtcaagaagaactatgaggtcgaggaggatcacatccgggtggatatcgaccccgacaccggccgctttgatgtggcactgatccaggatatcgtggcagacgaggactggtacgacgagcacgccgagatcggtgtgaccgaggcacgcaagatccgcagcagctacgaggtgggcgaccgcatcatcaccccgctcaagacccgcgattttggccgtattgccgcccagaccgcaaagcacgtcatccgtcagggcatccgcgaggccgagcgcaaccagcagctcagtgagatccagtcccgcgcacacgatatcgtgcaggccaccgttacccgcgtggataccgagaagggcatcgtagcgctggatctgggcaagggcggcgaggctgttctgccccgcaacgagcaggtgcccggcgaggtgtacaccgagggcgagaccctgcaggtctacatcgtggacgtggtcagcaccgagcgcggcccccgcgtgatgatcagccgcacccatccaggccttgtcaaacgcctgtttgagctggaagtgcccgagatctttgacggcactgtggaggtaaaggccatcagccgcgaggccggtgcccgcaccaagatggctgtctggtccaaggaccccaacgtcaaccccgtttccgcctgcatcggcgagcacggcgcccgcgtggccgctgttgtggaaaagctgggcggcgagaagatcgatatcgtcaagtggagcgaggatatctcggagtttatctccgcagccctgagccccgccaaggtggtcaaggtggagctgctgcccggcgagacccgctcctgccgcgtcaccgtgcccgaccagcagctgagccttgccattggcaataagggtcagaacgcccgcctgtgcgcacgcctgaccggctacaacattgatatccgtcccgagagcggctactacggcgaggacgaggagcccaagaaggacgcagcagacgctgaataagcccggcaccatctgccgaaggagggaaaccggatggcacaaaaaaagatccctgcccgccagtgcatcggctgcatgaccagccgccccaaaaaggagctggtgcgcgtggtgcgcgcacccagcggggagatcagcattgatctggtaggcaaaaagccgggacgcggcgcatatctctgcccggacccggactgcctgaccaaggcaaaaaagaaaaaggcgctggaacgctgctttgagcagccggttcccgccgaggtatacgacgcgctggctgtacagctggccgcagccgcaaaggaggcagcagccgatggcaaaaaagaataacgcccccgcaaaacccaagctgcccccggaggaggcgctgtatcaggccgtgagcctgtgccgcaaggccggtgcgctgaccatgggctttgatgccgtggaggaggcctgcgtcaaaagcaaggcatggctggtgatgaccgcatcggacatcagccccaagaccctgcagcgtttgaactacgccgtgggggacctagtggacgtgttcaccatgccgctgacacaggataagctggccgatatcagccacaagcccgtggctgtttatgcggtgaccgaccgcaacctcgcaaagctctgcttcgaccgcctgtcggactgcggagcaatcaaaaatgaggaggatatgagcgaatgatcgtaaaatataaagtgagtgactttgcaaaggatctgaacctttctgcaaagaaggtactggacgaactggccgctatgggcagcaccggcaagaagaacagctccaatctggaggagaacgagctgaactacctgctggaaaagttcagcaaggacaacagcgtggcaaatctggacgagtttttgaacagcgccaaggctcccaaggaggagcccaaggccgagaagaaggccgagaagaaggctgaaaagaagcccgaggctctgaaggccgacaaaaagccccagcagcccgccgcaaaggccgagcagcccaaggcaaacaataataataacaataacggcaagcacggcgacaagaagcccgagcagcataagaagcgcgaggaaaagaccgtttccttcagcgaactggcacgtgagaccggcgcaaaggctactgctgcccccgcacaggctgtttctgtccgccgcgaggacaatcaggtcaccgtggatacccgcactgtggatatgaacgtggaccgcttcgacgcccgctacgatgatctggcctccaccaagaacaccgagaaccgccgtaagcccactccgcagggtaacaagcagaagttcacccagcgtggtcagcgccagcgccagcagttccagaagggcaagcgcgagactgagttcgagcgtctgcagcgcatccagctggagaaggcccgcaacgcccagctgaaggtgatgatccctgacgagatcaccgtgggcgagctggctgcccgcctgaagcagcaggccggtaaggtcattgccaagttcatgcagatgggcgagatgcacgccatcaacgacgtgatcgatttcgacaccgcagctctgctggcagaggagttccacgcaaaggtcgagcacgaggtgcatgtgaccatcgaggagcgcctgttcacgcaggaagaggattcgcaggaggatctggtggagcgtcccccggtggtctgcgttatgggccacgttgaccacggcaagaccagtattctggatgccatccgcaagaccaacgttaccgcaggcgaggccggcggcatcacgcaggccatcggtgcatatcaggtcaaggtcaacgacagcctcatcaccttcttggataccccgggccacgaggcattcacctccatgcgtgcccgcggtgccaacatgaccgatatcgccgttctggtggttgctgccgatgacggcatcatgccccagaccatcgagtccatcaaccacgccaaggctgcaaatgtcaagctcatcgtggcaatgaacaagatggataagcccaccgcaaaccccgagcgcgtgatggaaggcctgaccaagtacggcatcatcaccgaggactggggcggcgatgtggcctgcatcccggtgtctgccctgaccggcatgggcatcaacgacctgctggagcgcattgctctggaagctgaggtcatggagctgaaggcaaaccccaaccgccgcgccaagggtgcggtcgtcgaggcccgtctggacaagggccagggccccattgccaccattctggtgcagaacggcaccctgcactccggcgacgtcatcattgccggtaccgctgtgggccgcgtgcgcaccatgcgcagcgacaagggtcaactgctcaccgatgccggcccctctacccctgtggagatcaccggcctgaccgcagtgcccgaggcaggcgacctgttcgaggctgttgaggacgagcgtctggcccgtgaactggccgagcagcgcatcgctgccgccaaggagaagcagttctcctccttccagaaggtcacgctggataacctgttcagccagatggcacagaacgacatgaaggagctggccatcgtggtcaaggccgacgtgcagggctctgccgaggctgtgaagcagagtctggagaagatctccaacgacgaggtgcgcgtgcgcgtcatccacgccggtgtcggcgccatcagcaagtccgacgtggatctggccgatgcctccaacgccatcatcatcggcttcaatgtccgcccggacaacgtggccaaggaagaagctgctgccaccaaggtggaaatgcgtatgtaccgcgtcatttacgacgccatcaacgatgtcaccgacgctatgaagggtatgctggcacccaagttccgcgaggtctctctgggcgaactgcaggtgcgtcaggtgtacaagatctccaatgtgggcaccgttgcaggctgccgcgtgaccagcggcaagatcacccgcgacagcaaggtgcgcgtggtgcgtgacggcattgtcatcgccgaggacgagatcgcatccctgaagcgcttcaaggacgacgctaaggaagtggccgagggctacgagtgcggcgtgaccctggagaagtttgcggacgtcaaggaaggcgacgtgtacgaggccttcaagatggaagagtaccgcgactaagcaaaaaccgaatatataacagcttcccggcagaaaaggcttcccccgtccgggggaagctgtcgaacgaagtgagactgatgagggcgtatctttcgcaggtgtggagcgtgcgccctcatccgtcgttttggcagataaatgccgccttgccccggccggggcaaggccttgggaagctgccggacagaatttggagaaaactatgtctcagaaaaatatgggccgtcttgcgcaggatatgaagcgcgaggtcattgccatcatcggccggctgaaggacccgcggctggagggcggtctgctgaccgtcacccgtctggatgtgacgccggatctggatgtggcaaaagtgtatgtaagcgtgatgggccgcgcagacggccccaagcccgcaatcgaagcgctgaaccgtgccgcaggccatgtgcgcaccgaggtcagcaaaaaaatgcacatccgcaaggcaccccgcttcatctttgtggaggatgacggtgccgcctacgccgcccacatcaacgagctgctgcgcagcctgaacgtgaacggcgaggaggaagcacagcctgctgataccgaacagaccgaggactgactgcctttgcggaaaggatggatcattggatgacagaacaactggatgtgcagcagatggcgcagcgcctgctggctgcggacaacattttgattctgtgccacaaaaacccggacggtgacaccatcggctgcggcagcgccctgtactatgcgctcaaagcgctggaaaaaacaacggcggtgctctgctccgatgccgttccgtcccgctacgcctttacgaacccacggctgttcaagggcgagttcgagccccacaccgtgatcgcggtggacgtggccggtttgcagctgttgggcgaaaataacggtgtgccgcagtacgcacgccatgtagacctgtgcatcgaccaccacgcaggcaacaacggctatgccgattttacccttctggatgccggtgccgctgcggcagcggaactgctgtatcatgtcatcgtggagatgggggtgactatcaccccccacattgccgactgcctgtacaccggcattgctaccgacaccggctgcttcaagttctcctccaccacagctaacacccacacggtggcggcaaagcttattgaggccggctgtcatgtggaggagctgaacaccctgctcttcgacaccaagcctcgtgcccgcatggaggccgagcgtatcgcccgcaaccatctggagtactatctggacggtcgctgcgccctgatctacctgacgagggacgagatacggcagagcggggtagaccccgcagatctggaggaactgaccagtctgcccatcagcatcgagggagtcaaggtgggtctgaccctgcgccagcagcccggcggcagctaccgcatcagcgtgcgcactgcaaagggcgtggacgcctgtgccatcgcacggcggctgggcggcggcggccacacccgcgcagcgggctgtgagctgctgggcgaccttgaaaacgccaaaaacgcgatccttgcagaggtggaagccgagctggacgcaccgcaggaggaagcatgatgcagggcatcctgatcgtagataagcccatggactggaccagctttgacgtggtggcaaagctgcgcggcgtgctgggcacccgcaagctggggcacagcggtacactggaccccatggccaccggcgttctgccggtgttctgcggcggtgccagcaaggcggtggacctgcagctgaaccatgataaagcttaccgcgccaccctgcgcctgggtgcacgcaccgataccggcgatagcaccggcacggtgctggagactgcacccgtcaccgccggagagaaggaactgctggctgtgctgccgcagtttatcggcccgcagatgcaggtgccgcccatgtactcggcggtcaagatcaacggccagccgctgtataagctggcgcgcgagggcgtgaccgtggaacgcaaggcgcgccccattgaaatctacggcatcgagtacggcggcagtccggcagaaaacgagtatgtactgacggtgcgctgctccaaaggcacctatatccgcaccctgctggaggatatcgccgccgcaatggggcagaagggcaccatgagcgcgctgcgccgcactgctgccggtctgtacaccgaagcagatgcccacacgctggaagaaattcttgccgcaaaggagcaggggaacgctgcactggaagcactgatgctgccggtggaaagcgtgttcaccccgctgccgctgctgatggtggagccatgggtggagcagcacctgtacaacggctgtcccaccagccgctaccccgcagcagacggacgctaccgggtgcgcaatgccgccgggcagttccttggccttgccaacattaccggcggggtgctccgggtggaaaaactgttcgtggaacgtaattgagcaataaaggaaacaagacccatgcagatcatttctcagtttgccccgctgccgctggcacagcccgcaaagggtaccgccgtggccatgggctactttgacggcatccatatcggccaccgggcggtgatcgaaggggcggtacaatgggcaaagacccatgatgcagctccggcggtgttcaccttccgcctgccggtggaaaataaaatgaagggcaagcgcctgctctccaccgaggacaagcacgccctgatccacagtcttggggtggagtattacctcaccccggactttgaggcgatcaaggcactgagcccggaggagttcgtgcgcggcatcgtggaaaactgccacgcccgggcgctgttctgcggcgagaacttcacctttggcgcaaaggctgccggtaccccggagctgctgcgcaccctctgtgcccctcttggggtagaggtagtggtggtgcccatggctcagtttgaggaaaagccggtgtcctctacccgcatccgcaccgcgctggagggcggggacatcccggccgccaacgccatgctgggcatgccctatgccatccgctttgcggtgcagcacggggcagggctggggcacaccctcggtgtgcccactatcaaccagctgtacccgcagggcttccagatgccccgcagcggcatttatatcacccgcacctgcatcaacggggtgtggtatccctcggccaccggtctgggcagccgccctaccgtgaacgatgatgccacaaaggtgacctgtgagacctttatcccgggcttttccggtgacttgtacggtaccgacccggtggtggagttccacgcttacctgagccccagcaaaaagtttgatacgctggaccagctgcgggactgcatcaacgatgccgctcgccgcgcacaggaatattttgcataacgcatcaacagcggaaaaattatttttatttggggtcgagaaacgcctgtgggcgtttttcgaccccttttgtcatgaaggaaaacagcatttccggcgtctgcgggcagaaaaaaccgcacttcgggcaaaatagacacatttccgtgcaacaatggcaaatgtttgttaaacaattatctatctcatatccttgcaatgcacgcagtttttgtttataatagtagctgtacggggcaaagccccgattgtgagcgagactctggttcagaattataacttgagaggagtttttaccatgggtttaggtaagaagacgatcgacgatcagaactactgcggcaagaaggtgcttgtccgctgcgatttcaacgtcccgatgaaggacggtgtcatcaccaacgagaaccgcatcaacgcagcactgcccaccatccagaagctggtcaacgatggcgctaaggtcatcctgtgcagccacttgggcaagcccaagaacggccccgaggctaagttcagcctggctcccgttgctgtggctctgagcgcaaagctgggcaagaccgttgtgtttgctgacgacgacaacgttgtgggcgagaacgcaaaggctgctgtggctgctatgaacaacggcgacgtcgttctgctgcagaacacccgtttccgcaaggaagagactaagaacatgcccgagttcagcgaggagctggcttctctggctgatgcttatgtggacgatgccttcggcagctgccaccgtgcacactgctccactgcaggtgtcaccgactacatcaaggataccgctgtcggctacctgatggagaaggagatcaagtatctgggcaacgccgtcaacgaccccgtccgtcccttcaccgctattctgggcggtgccaaggttgctgataagctgaacgtcatctccaacctgctggagaaggtcgataccctgatcatcggcggcggcatggcttacaccttcgtcaaggctcagggctacgaagtgggcaagagcctgtgcgacgacaccaagctggactactgcaaggaaatgatggcaaaggccaaggagaagggcgtcaagctgctgctgcccgtggatgcagtctgcatcaaggacttccccgatcccatcgatgctcccgtggatgtgaccgtggtgcctgtcaccgcaatccctgctgacatggagggctgcgacatcggccccgagaccatgaagctgtttgctgacgctgtcaaggcttccaagactgttgtctggaacggccccatgggcgtgttcgagaaccccactctggcagccggtactctggctgttgccaaggctatggctgagagcgatgctaccaccgtcatcggcggcggcgacagcgcagcagctgtgcagcagatgggtctgggcgacaagatgacccacatctccaccggcggcggcgcttctctggagtatctggagggcaaggagctgcccggcatcgcagtcatccagaacgcataatttttccggcatcacaatgggtgcggcggcatttacgccgccgcatcttttctttttgtgcaggcaatttgtaaatagttacgaaggtaaggagaaaataacaatggataaggcaaagcgcaaggctattatcgctggcaactggaaaatgaacaagaccgcctccgaggctgctgttctggtggacgagctgatccccgccgtgaaggacgccacctgcgaggtggtcatctgcactccgtttaccgatctggtcaccgctgtggctaagaccaagggcaccaacatccatgtgggtgccgagaacgtccactttgaaaagtccggtgctttcaccggcgagatcagcgccgatatgctggtggatctgggcgtggagtacgtcatcgtcggccactctgagcgccgtcagtactttgcagagaccgaccagaccgtcaacaagcgcacgctggctgctctgaacgccggtctgaaggtcatcctgtgcgtgggcgagagcctgcagcagcgcgaggagggcgttaccgaggagctggttcgtatgcagaccaagatcgctctgcgtgacgtgaccgccgagcagatggcaaatgttgtcatcgcctacgagcctgtctgggctatcggcaccggcaagaccgctaccgctgatcaggcagaggaagtctgcgctcagatccgcaaggtggtgggcgagctgtacggcgaggccgtggccgaggctaccaccgtgcagtacggcggcagcatgaacgccaagaactgcgaggagctgctgagcaagaaggacgtggacggcggcctgatcggcggcgcatccctgaaggctcctgactttgctgtcatcgtcaatgcagccaccaagggctgagcaactgcctttttccctaattagctgtttcagcgcccggctgcgccgttttttcagcgctgagccgggcgctgatctgtttttacagcagccgctcgggtgttatgcacccgctggctgcacctccgcaggcagggctctggccttgcccgcaacgcgtgataaattcaaaggagattcaattttatggcaaagaaacctgttcttctgtgcatcatggatggcttcggctgggtgccgaacgagaccttcggcaacgctgttgtggctgccaagaccccccatctggatgctctgatggcaaagtaccccatgactaccattgatgcctccggtatggctgtcggcctgcccgatggccagatgggtaactccgaggtcggccacaccaacatgggcgcaggccgcatcgtctaccagcagctgaccctcatcaccaagtccatccgtgacggtgagatgttcaagaaccctgtgctgttcaagaacatgaaggctgctatcgaggccggtaaggccatccacctgatgggtctggtgggcaccggcggcgtgcacagccatgccgaccactggtttggcgtgctggaaatggcaaagcatctgggtgcaaaggaagtttacctgcactgcatcaccgacggccgtgacaccgacccccactccggcaagggcttccttgctgacctgcaggccaagctggacgagctgggcgtgggcaagatcgccagcgtttccggccgttactacgccatggaccgtgataacaactgggaccgcgaggagaaggcctacgctgcctttgtctacggcgagggtgagcatgctgccaacgctgccgaggccatcgaggcttcctacgcagcagacaagaccgatgagttcgtgctgccctgcgtcacctgcgagggtggccgcgtgcaggacggcgacaccgttatcttcatgaacttccgccccgaccgtgcccgccagatgacccgcatcttctgcgacgatgcctttaccggcttcgagcgccgcggcggccgcaagcaggtgcactatgtctgcatggccgagtacgatgccaccatgcccaactgcgaggtggcctatcccccggtggagctgaagaacgttctgggcgagtatctgtccgcccacggcaagacccagctgcgcattgccgagaccgagaagtacgcgcacgtcaccttcttcttcaacggcggcgtggaggctccctacgagggcgaggatcgctgcgtcatccccagccccaaggttgccacctacgacctgaagcccgagatgagcgcccccgaagtcgctgccgagtgcgtcaagcgcatcgagagcggcaagtacgatgtggtcatcctgaactttgcaaactgcga

SEQ ID NO: 13777 - DNA, 728 bp, Unknown
  gut microbiota DNA sequence
acacggaggtacaattttgcagcaaaactggaaattccagcgtggagacattttcttcacccgtttcgacaacaccaccggttcagagcaaagcggaaatcgtccggcagtcattcttcagaacgatgtgggaaatttttactcgcctacgctgatcgtggccacattaacaagcaaggcggcaaaaaagtatacccagccgacccactgcctgctggtgaacgagtttctttccgttccgtccatcgttcaggcagagcagatctttaccgtaaacaagagcagggttctgaaatatctcggacacctcaccccggaagaaatgagccgggtggatgatgctgtccgtgccagccttgccttgaacccatttgggagcattcagcggcttccgcccatcatccgttctacagcagcttacgcgccgcctgaagtggttaacggcaagccgcccctctatccctacacacccattaaatcgtcctttgaggacgctgggagcgttgaggatatgatgctgtacaccgagctggaagctgcggtacacgcaatgattcagcgactggaatacagcttcacgtttaaccccagcctgctcaccatcccgaaacgtaagcagcaggttgctgatatcctgaaagaagccgaaacgtacatttggagaatcaaggaagaaatgcgatgcagctgaacgacaataatgcctttatcagtgtcagccccccgta

SEQ ID NO: 13778 - DNA, 7600 bp, Unknown
  gut microbiota DNA sequence
gcgttactctggacagattctgcgttttcctttttctcttcggtctgaacattcggaaggaactctgttttctccattacaaaattctccctttccacttcatcggaatgctttacatcctttacggaaggtcgctcttcctttgttctcattatagcaagggtgttagacagaatctgtccatcttcttttttctttgaaattcctgtgtcgattttccaaaatgctcgcctttgtttcgatatatactgtcaaaagtatacgacttatataattatcggtcaagtctcatcacaataaaatcgtaagtacacactacgatttatctaaggaggctgaaccatggaacgagagaagcccacatttgatatcctgggccgtattgagcgggaacgcctttcccgtggctggtctgagtatgccctcgcagagaattcaggtctgacacaatctaccatttctacctggcgcagacggaatcttcaacccaatgtagcttctcttgagaagatctgctccggccttggtatctcgctttctcagttctttcaggaggaagactctgtttacttaacccccgatcaaaaggaaattcttgatctatgggctaaactctctcctgttcaaagaacagcggtctctcaaatgctgcgttccttcctatatataaaggaagaggaataaattttttccgctcgtgagccgcttgtgtcaaaagcgaatttccgcgagcaccctctcacggcacacccattttcagaatgggtgtgctataggggcgcttgcaaaaattcactttcgacacgcgcgtctcactcacggactatgtttttgtagtttcttatataagataaaattcaactattccgcagcaaaatacggtcaagcccatgaaggacttgaccgttttatcattttgaataataggttttagatacaagattcccgaatttttgcaagatcactgttcagaagcgtttcatgttccagaagaccatgctgcacagcaagcagaaaatacttattattatgaagaatcttatatgctcttcggtaaagttcttccagttttgctgacttgatggcttcattataagaaagtctctgctcggacattctgttgtcccctgattcaattcctacgaagccaccacctgcaaagtgacacagccaaatatccatgagcttatctgcttgctctatatcggctgatgcctgaatatccataacaccatagatcagagacacacccgctctgcctgccaatgttttggtcacttcatccagaaattcctcctcattttgtgcataagtagcacagccatttgccataccaccgatcacaccttggcttccgcgaaccgtgacaattccaatgcttccggggtgaagaatttctccgaccactgcatgggcagcttcatgtactgcaattagttgacgctctgtggagtcagtttccttatccgtcttttggagtttatatactacctgaagaagagcttctgtgatatcttccttctggatgtgctcatgaccttgatagacactgttcagcgcagcaaggttcattaccgtttccagtgtagcacagcttaccttgggcatagccttgacgatatctgaaatcagcacatcctctgccaaatctttatccctgagatagtagctgacaatgttctctgcattctctccaatcggaggttgcagatagatcacataatcaaatctacccggtctcaacaaggatggtggcatataccttgtatcgttagtagtagcaatcacaaatagatctgtgtcctttgcatcatcaatacaggcttgcagacaagcccattccggagcatagggagaggtggattccacatagaggttcaaatcttctaggagcagtatactaggtgcttcctccttcgccatagcaaatacagccctcaattcatccagaaaactgttttcctgactggttttacgaaaaacaaagggctttcgttcagattcctccatcaggatagatgccagcagactttttccaagaccaggatcagattccatcagcagccctcttggaatagaaatgccctttcttttataaacctccggtctttttagaatatccagaatctgacgcagaatctctttcgtagattcgtagccgataactttttcatcaaacttatccattgtattctcccttcttatttgcgctttgattttttgttctgattcatttgaccttttgctgtcagagaaatgcttccgtatcgaacgatatcatcgccatacaatgcagcttctcttgactgcctcatttggatattattttgaagcatctcgtcgaactcagatttccactgatttgttactgacacgagcatttttctctcagcttcccactgaatatgaaacatattctgtgtttgaaacgatactgcacaaactgcaaaatgaatatgtacattaaatctatccgcatgaattccgtaagctgtaataaagccattccttgcatagatacttgctattctttctgccagagatactacatcctgtggcagaatacaatccgttgccgcgaaagaaacaatgcggtgttttgcaaactgcggaatacctttatgtcttctccttacttcaaaaagcatcaggttataaacggcacttggatcacacaaatattcattgggaatcatcgctggctgacaacctgctaaggtatttgttatagtattcgctctttgactatcttctgctgtcttatctaatctaagaatatattgcaataaatgttttaagtcctccgaagtttcatacttatcatttttgagttcgatataacacatacctatgaacctcctcttttactccttcccaatttttttcactcgcataatttccaatattagatatgatttcatcaacaaggtctgcatctatttcagtaaagtagattgcactcttaaatacttctgttgcttttttaccagtttcatccattctctgttgtagatgaattttatcttcagcggtcaatcgtatattaacagtatctcccattataattgccttctttctatccatagagtttcatgcgaacaaattcagaaaaaacaaaaataaaatattatttatgacggcatccgcctccccttagcaagaatagccaaatgtatatacactacacattcggccattcttgtgcgaccgtttgtactacaactattccattcggccgctttattctaatgttagtgcctttaataaagatcaacttctaccttccttctgctccatgcattatttagcattaacactggattatctacatgtgcattcctctatcaaacattattttcaagcaacagaaaacccacatggagtcattatccatgtgggcatttttcgtattaccatccagtagctttcatatgagcttcctgcacaatatattcttgtactgctctcttaggaattttccaaactcgaccgatcctcatagcttttatttttcccgacttcaaaagcttataggtggtattcataccacatcccagcatatcggcaacttcttccggggttatcagagtatcataataatcaaacataacggccaatcctcctttgatggtttactatactgttgccgaatgtcaaatcataccagatacagagaaagggcaaccacttgcgtggttgccctaaattggtgtcataatactataatgcagccttcgttcctacactttcaaaaaaactttgcttggaacattcccattttcctggtattagggaacatttaacgctgaatttttttcagaagtgtaggaacaccatcagattgtaaactttattacactcattcctcctgccaacactgcttcatttctttttaagaactgtagttttgaatatttcaaatagtagtcttttttcttaggcatcatagtgtcgatttcttctagcgttattggcacctttatttcctgtgcggtttctatcgctctagtcacataacccgacagagcttttagcataatagtattttgttctaattccctcatatcattttcatcaaacaatcttgtttctaattttacatctttttccttgatgtactcagacagttcattgtacattctgcaaacaacattttgtcccttttcctgcatattttcctcaatattttttcttagcacaacacaaaagcatgataaaaacaatggaaacgcccagtttgtccaagagtcgatatcctccttataaacagctttccaacggtttaggtcgaataaatcttgctcatcattttgacgcgcaatcgtttttccaaaaacatcttgaagttctgtcttccatgtgtccattgtacggttttcttttttctcttgaagttctttatagtctctcagtccatcaaattccatatttacaatctcagcacgacaaaccacattattcattttaaaacagttgctcattgtctcaattgattctgcatcaaaaagtaaaatattggcccttgaatttgcgagctcagatatatttttccaaaggcataccatcatattgtagttcaatactttttcaatttgaacctgaacatacagtttatcagccgctgtcatatgacgtaaagactccagctggttcaatgatttatacagcccattcagttcttgaagcctttcgatgtcaagaccaatattatcgctcttgcttttttctattttctcaacaacattccaccgcgatgacgatcttctgaaaattgccattacatccaaatcactaatatttagaaactccctaagtacgctttctccttttacgttaacctctttattttttataaaaggcttataccccgacacttcagcaagttttttatcaaggccatttatgcttctttttaatggttgatttctgctccgtaaaaattctgctcgattggcttccacatggtctttctcaacctttaatggatttttcccctctccaaatttatgataaatgcctctttccaataggtcgtccattcctgtaatgtatttgcttagattttttcgtttcttctttttatcttgctcagcctccttttcttcaacaaatgcttcctcatcaaaaaaagcatattcgcccgacgcatatacagttattctgttttcctcgccaactacttctcgtaccatacagtagacgctcactatggcatcctttatcagcatatttttccttttttcatgaaattcagtcagtatgccaatatcaagatttttatttagttcgtctaatcgaactcgatttgttaaaaacgggtggccattccatctgtcagaaacaaacggcgcaaacattctgtatgcctgttctgctgcctcttcaaccaacaatccgcgttcttgatttgcaacttcttcagctggcattccttgcttctgatcttcggctgctgcaaaatttagccgaaaagtatacttcagcaccttctcggcttcatctatccgatttacaaattcttccactttcataggtttttcctttcatatgatttaattttatatcaaaagttagattttattatattcatttttattagtatattgcattaatccttatattacaatacactttttagtcaaacaacattttttgtactgcgaattttattcatgtggattttgttgtacaatatggtcaccggaagcgatccggggactgagccaagcaaaacaaggctcactcgatgcacacataaccggcaggaggtataacgatgatctacaatacagcatagcccttgaggcaccggcaccttgctacgaaggaaacgtagcagttgatccttgaaaactaaatatagaaaaaaggagatgtattgcatgggcacttatcaagcgccgcaagttccgcaaccaggtgtcacatttggagatgaacggctcgttgatccatgggcagtaaccatgctccagaatacctgtagtaatcttcaggtgcaaaacatggcgttgcagcaagagaacgccgctttgaaaaacaaaagccaatctctacagcagcagagggagaatccgctttgtaaagcagctaatcgcgcctacctgcgagaattcaccgcatataaaacagagagtctcgtagaatttcccgacggaaggtactaccttgttaaggaaaaccctcttggtgaaccctacaagtttatcaagcccgtgtcagactgtacagaattctctgctcgatatgcgatcgatccacgggacggctctacgagtattgaagtccggtacagacttcctaacggaactctttcaggcttccgtgttgccgatgacaaatttcagcagaacgctttgattcaaggattttacaaaagcggcggcacactccgctgtggaaaagatggtccccggttgttttatatgctcgttgcgcagcttttgagtaagcacgagatctattttcaacctatacctgggtggaatatcaacgcctcaagatggttttttaaagagtcggcaggatgtgaggcgccgctggatagtccgattcttcgtcctgatgctctgacatccgaagaccagatgatgatggccgcggtcatcggattatccttcttgaagacacgtcttcctgaagacatgcagccgactaagccgtttgctgtgatctctgagagtttttcgatcacaacagagatcactctcaattgcaagctcgccgagcttaaaaagcagctgaaccatcatcgagacgacttgctcatccatgtccgtggtggatttgcgtccaaccggtatcagaaagctacgaattatgattacctctccgatgaagccgagaagggaagcgcaagtcgttcgatctacattgttcaggcaaaagaattgacaccggagattcgtgagcattgcattccgatccagttaaatccggcagaggcttgctccgctactaccggtgtagattctgtaacatggaatgatttgatttccttggtagagggcaatccaaacgaatttgattcccgcgtgtatcgcgcatataaggaggaacgtgacagaatggaaggatcaagtttttgtcaggaaattgccgttttacgtgctgtaagcgaaatcatttgctggacgttttctcaaaaagcgtctttttccgaagaaaaggttcgagatgcttataaaaccgccttcgatcactatccttcccggtgggattctatgctaaacacaaccgcatcggattgcttccgcaatgccctttatgcagctgcacgcgaacagaccatccgattccgggacattggtgatttagacgagacttattgcaaagaaaaggaggtactatatgatgagtataagctctatctcacccttgatcttgtgaaacgtttggctgcaaagcacatgccggaatttcttacatctgacgttctggctcagctgactgaagctggcattctttcgagctctatcgtaaagacgctcaggctctctaccgggcattccaaaaatgtcaggcttcgatcaattaatcgcagctttgtgaatggatatggtcgtcgtgacattacaactatttcaacctaaaggaggtt

SEQ ID NO: 13779 - DNA, 1177 bp, Unknown
  gut microbiota DNA sequence
ggctcagccagcttgctcatgggcagttttttggccagcatgacctccatcatcttcaggctggtcaggataccatcaccggtgcttgcgtacttgctgaagataatatgaccgctctgctcaccgccaatacggcagccgttcttagccatgtactcatagacgtacttgtcgcccacagcggtcttggcgtagccgatgccattctcatcaaaagccttatacaggccgaagttggacatgaccgtggtaacgacggtattggtcagcagcttgccgcgctccttcatgtagcagccgtagatgtacaggatatggtcgccagtgatcacattacccttttcatccacacacaggcaacgatcagcatcgccgtcataggcgaaaccaacatccagacccttctctaccacgaacttctgcaagccctcaatgtgagtagatccagcattgttattgatattcgtaccgttgggctgtgcattgatgacgtaggtgtcagcacccagcgcatcgaacacagacttagcgatgttccaggaactaccgttggcgcagtccagaccaaccttgacgcccttgaaggagtagataccaaggctgatcagatagcccatgtagcggttacgaccagaaacatagtccacagtgcagccaatgtgctcacggtgagcaaagggcagctccggccagtccttgtcgaacacatggagctttccgtcgatgtagtcctctaccagcaacaggatttcctcgggcattttctcgccatagcagtcgatcagtttgatgccgttatcgtagtagggattatggctggcagaaatcatgatgccacagtcgaagtcgtccacgcgggcgatgtaggccacactgggcgtagtagtgacgtgcagcagataggcgtctgcgccggaagcagtcagaccagcaaccaagctatactcgaacatataggagctgcggcgagtgtccttaccgatgacgatgcgggcaggctcgttgttgccgttacgctcgcgcagggcgttgtagtaccagccgaggaagcggccaaccttgtaggcgtggtcggcagtcagatcaataccagcttcaccacggaagccatcagtcccaaaatattttcccattatagtttttcctcattcaaagagtgaattgacgaatagaaatg

SEQ ID NO: 13780 - DNA, 846 bp, Unknown
  gut microbiota DNA sequence
caagctgaccaaggagtatggcaagactgttatcgtcaatgtcatcgaggtgaagagcccctccaccaacgcacagctggttgctgaggacatcgctcgtcagctggagaaccgcgtcaccttccgtcgtgctatgaagcagtgcatgcgcaatgccatgagcccccgcgatcgcgcaaccgttcccgcaaagggcatcaaggcaatgtgctccggccgtctgggcggcgctgatatcgcccgcaccgagagctaccacgagggcaccatccccctgcagaccctgcgtgccgacatcgactacggctttgcagaggctgctaccacctacggccgcatcggcgttaaggtgtggatctacaagggcgaggtcctcaagagcgcaaagaccgctcctaagaaggaaggaggcaacaagtaatgttactgcctaagcgtgttaagtaccgccgcgttcagcgcggccgcatgaccggcaaggctacccgcggcaacgtggtgtgccagggtcagtacggccttgttgctctggagccggcatggatctcctccaagcagatcgaggctgcccgtgttgccatgactcgttacatcaagcgtggcggcaaggtttggatcaagatcttccccgataagcccgtgactgaaaagcccgctgagacccgcatgggctccggtaagggctctcccgaatactgggttgcagtcgtgaagcccggccgcgtgatgttcgagctggcagatgtcgatgaggcaactgctcgcgaggctctgcgtctggctatgcacaagctgcccatcaagtgcaaatttgttgtccgtgaggactccgtgaaggaggatggc

SEQ ID NO: 13781 - DNA, 9510 bp, Unknown
  gut microbiota DNA sequence
caatttctttgatgatttccgagtagaatgctttctcttctatcttttcatctaaggtgtataaaacattttttatacaaatttcagccaaaatcttgtcagttagatgtttctgaagattacgctcattttcataatcctgaaaaaaacgtccatcacattcacggcaaattctttgaaaaatgccagagttcattactcctttttcaacatcaagcgattcgatatccataaagatggacggatgaaataccattccactttcagcgatatatttgagcgaaaattgtggaactgaatgtgatttgcaaaatccatctgttttctttccacataataagcatcgtgatccccttgcctttttcttaactctattgtaaaaacggctcaatatgattttagattcaatattgtagtcatccagtcccatatatcctcctgaataatgatctctgttatcttggccgatgtttcctaagtttaggaaagcctccataatgaaatcttaattgttcaattttgagccttaggcataaatcctgtaaaacaacagacaattgagagcaatcatcaaatatttaggatataatactgtgcgccatcagataacgactggtcttatactgccaattatcgtgatggataattctttccgtggcgtactgcaatagttcattgtacaagctgtgccgcagttccgtattattcatgcgtttaagatatttcttgacaaatttttcaaaaatatctttgcgataaatatataacggccccatggttttcgtagtaaactcaataatgctatacatttcaaattcgattacaaggcattcgcttgcagatacacgataagcatctgtactatatggaacatattggctccagaattgcagacgttcatcattgctgtttttggagaagctctctcgaatcagaatataattcagccagcggtgatacttgagttcctgctcaggcgtgaaaccggaaaagaaattcttatactttagcgttcctgcatcgctggtataaatattgcgaagataggagccacactggtagtatctctgaaagtcctcaactttcagttctgtcaagatattcttcaggaacagctttatagaatccggagaatacttcttcaaagcaggcagcatatcccggtcagaaatttcaagatagcctgttcgatcacagaaagtaaggtattcctgaatacaaagctgtcctagccgagtggatggcatgattcccaacgtcatcaggcggtcagaaaaacggatgcggtcagatttttgccaacgcatacactctctgccgactgcataggggatatttttactgggaaaccactgcatcatagtggtgttttccagtttggtgttggaaacgattttctttaccagttcaggcttgtcctgtacgatacgataaaggagatagcatagatcttgattcgtgaaataatcctgccagagaataaagagcgaccgtgcgatttcttcatttgcgcgcagaaataaaatccttgtcaggttgagaagcggaagatgcagagagtttgctggcacataatttgccagcagccgcactttgcgaattggaatggtaatggcttctccatctacatcttctttgggtagtttagcccactggcgcacttcgtctaagaagctattatcaagctgataattcttgatttcagaacttgtaggatgttctttccgcacctgcgcagcaatagccggaagtttagaaggcttatagcttgttttcattttgtttcctcaagcatttcggcaatctgatttatcatttcctcatcctttaagcggaacttgatttccacacggcgggatgcctgcatatcaaccgttccgtccgctgcataaataggcgcactccacgagcgtccatttgcggtcagcaaaacgcgcagctcttccaactggctgtccgaaagaaaatggttattttcatccagacagtaggacacgacggcaaatgcacggttctgcgacaattgaaggttgtacatataaccgccatctgtgtcggtatgtccctcaatgataatttcagcgacatacggtgaaaagtccttgcccagcagaacagaaaagtatttcggcaaaaactctgccagaaaagtcttgccggaatcctggagtttatcatcgttgtagccaaagagcagcgttgaatcaaaagtgattgcaccagactgtgcatccaccttgacggaaaggtcgttaccagagaactctttgctcagggcatcaatcagatctccacgaacacccacaatcgtatcaatttgcgactgctgattcagaataatctgttctttttcttccagctcggcctgtttcgcttcataggttgcgcgggtttccagcagggtacaggacaggatcagaataaagaccagcagcagtgccgccatcatgtcagagtaggaaagccagaaattcagcttttcgccgtttttatttcgtttggtatagcgtctcattgacgattcccttcttcattagccacagcaggagccttttgctcaaccagtgcggtcaacttttccattgcatccagataactctgagtctggctggtcagtttagcgagaaccgcttcatactgcttcgtagattcacggataacgtgcggcagggcctcagtagtatcgcgcacatcggcaatggtgccgctcaggtgctgcgaaatatcggtcaggctgctgtcgaacgacgtaaaggtgcgatcaagtacatcatccagattcttatccagcagctttgccgcgttctccatgccagcggtcgcagactgaatttcgcttgtagtctgacctgcaaaattggacagaccagacacctctttatccacagcttccaccaattttttgtgctcttgttgtacaaagtcggagaagtcattggtagcctgcatcaaagcatccgactgtgcctgtgttgccttgattgcttcctcaatctgctgcttgctattttgcatcacattatttgcagcctcagaaatcacggacatctgctcagaggatgccttcgtcagttccatcagctgtttgtggttttcttcgctcagttgggcggcagtgttggacagcaactgcatttcgctttcagcagtctgtgccagcgtttccatctgcgaatggctagcctctgtcaaaacctttgtagatgcggccagagcgtccatatcttgcttggcagcatccacaataccactgatctggtctttgcaatggtccgacagcatatcaacggcctgctgtgcagcatccgcttcttttttcacgttgtctgccaaatcagcaacacggctttcgctttccaccaatttatccaaataattggcttgtcgttcgctgatttcattgctgtttgcaatctgctgctgaatgagttctgcttcagaatggagtttttcctgatactccttcagaagcgtgacaaaaccgttcatttcttcaacggtctgatgggaaacggcattgactttttcaatttcgttcgatgtatcgcaaatgctatccacaattttttgcatttgctcggtggacgctttctgccattcgcaagttttctgaatcgttgcggccagttcatcaaactgcccacgcagggattcgttcatgcagcgaataaattcctgcacgacctgatttaggccatctttctgctgctggcttgcaatttcgctgaactctttaacagtagacttcatttcatcgaaaatcggaaccagctcggtacgcatggtattagcgatagaggtgctgacagcttccgaaacgacggtagcaaagtttttcatcaactcggtctgctgctgttggtaacccaaaagctggttttcggcattactggaagagccatctagattcttgtcatggaatgcagttacaaaatcttcaaggctttgatttgtgctgtcgacgtactttttatagatatgtgaaaacgcaagagatagtagcacaccaacaatacttgtcaaaaaagctgtactcatgccaccaagaaggtgggtgatactaaccataacagcatctgtagtggatgtgtcaaatccaccaacaccgagaactaagccaacaaaggttcctaaaattccaaggccagtcatagttccgggaaccaattcacagaatccggtgtgtcccaattcgtctaagaattccccgttaaagaaatctgtaatatcgacaaaaggagccgcaaaactagtgctttttgttcgctgatacgcagctcgatactcttcaagtttggcgtttaatttatcagactgaaataatttgttttgctcgctagtcgttccgtcaagatactcctgtaaatcaataacagcctgggcatcggttttaattcttttccctattaatgcaaagtctttctgatattttgatagattgacaatatggtagaatccacatccaacaaaaaacgccatgagtgcataaattataattgacaccaacaggtttagactcatagtagtctggctcctttataaattcaattcaatttcagcggtttctatcgcggtgccatttttacagacacaccggattttatatttaattgtctttccaccctgagcggcagcatccagatacatggtctgctccacaggaagctccgcaagagttgtccatccatagacatccgagtatttctggacaatatatttttctgcttcaaaaagcatactccatttgagttggaggccagaaaaggtaaactgcaactctcgaatttgaaatacaggtggcttgcttggggcaatcagctgaatatctgcggaatgtgcaatatcttttccagattcattcaatccccggattgcataagtatagcagcagttagcttccacatcgtaatcctgataccgtggaatagggaaagaaccttccttgattttgacaggttgctctgattcttttgcccgccagatttcatagcattcgatttccgattgtttttcccattgaagccgaatgcccatgcgaatagaatcctgcgaaattgattcgatcttgagcagattttcagctggattctgttgtggctttatcggaattgcaggtcgtgcagtagattcagcggaatttatgcgagattctctgcactcgtcagcatcattaagtgcacgataaagaatatctgcatcaacgctgtcttgccaataatcaatagcattcttagctgcgttttccagcatggcatactggctgacaagacctgtcgtgattttcaacctatcatctgttgaaatcggattgctgcgttggatggcttctagtattccaagttcataggctgcttgcaatacgcgaaacttcggcaagtcattcttcagagcatcttttagcaaacttaatgttcgggttttatctttgagtgccggtggacactgtttcagatatcttccaaattcggtcatgatctttcctcacacacaacacaaaaaggcccacgccacatctggcgaagaccttttgacgaatcaatgtgaaatcccttgagtttcctgcattacttccgattttgccgcatcctgaatggaaatcaagtctttcgcatcggaatcgggtacaactacattctcagcctgtattgcaacattccccaaggtatcgcgttccagtgcgttcagtctggcttgcagtgacttccattcagcctgcgccttataaagagcgacctccgatgcttttagaccagcttcagcatccagcagacgttccgtcagtttctgaagttccgtccggtttcgcttcatgttgttttcgatatagtttctcttctcgatggcggatcgatgggtgcgctctgccttttctaattgggctttcagccggatttcttcgccgcacagcctaattttagcaactgaaccttcagaaagatccgtgcgaataatgcctgcaatggaaacatcatcaccgctgccccgtctggtgatttttggcaagtagtcacggacttcattgttaccaacttctgtactatgttctgcaaagacaatgaaaatgtttcgatacagttcatgcaattccatctcagaggaatagctgtcatcaatgccatcacttccgataaaaattgcagcagggaaatccttttgaattacataacgaaattcttcaattgcatcgctgtcacaaatactggtggtaatattctgttcacaagcttcatcccatgggataggctcgcaaagcgttccattttccagaagttcaacacatttcccatctccaatgtggatgccaaaccaaccctcgctggtcatacagactgcaatcagggtcgttccataagccttggcattatattgcccggaagcgtaccgttgcttatatttctctgatacttttgccagttcttccggctggaatggttcacaggcaacatcattttctacctgcgtataccaccgagcaagaatatttttggaaacctgaatcaattcggtttcagaatcaggaacagtggacagatgattttcccgcgcttcctgtacaaaggccttgatagctgtcaaagccgcagaaaccgcaaatttactgccacggtctgtgcgaatatagttatcgctgccgtgaccgtctgccacagcaataatgcttacatcttcaaagtggcactcaccggatgcatcctgacaaaccttgtttgctttaatatggttatagccttgtacagaatgagcgaactggtaatattcagccataatttgacctcccaccgagaatcagcttttaccagttgccccaatcctgatccagtgaaacatcaatggcaccagagtcaccaccagaaacagggctgttctgagaagcatcctgcttaatctcattgacggcatcctgtgcaattttggcactatcatcctcggcactggaggtcgtatcaccggattgcttgctgtgactctggaactccgatgcgcggacactgaccttgcgaatcagagctttcagcgtgtgcttatcattgaccgtaatgacagactcaatcgttccggtaaactcggccagaaccgtcttatctgcatcgtcaccgatggcaatggcaattttaatagcgtgtttgaaccagttgttcagcttcagctgttttaattccttttcccagttgtccgtggggccgccatcactgaacagcagaatgaccggagcatacgctcctgtctggctgttcaaatactcattgcgagagagttttttatccagttccttacaggctgcgcccaaatcggtcacgccgcctgcattcagatcgttccagatcacatctccaatagcaataggaccactctgcggagtgatccacgaacaaccactgctgaactgcatgatggccactttgatttcagcatcatcgtttgctgcgctgatctccggcaaatcactggtaatggcttcctccattgcgctgttgacgctgccgattttgcttccgcacatactgccggaggtatcgaccacataaaacagcgtcatgacttttcgaggggcaggtgctacgttatccaacagagacatttttcttcacctttctcttttacttgataattccagaatcattcgttccaccaaggaaatggatttcaaatccagcgcgaacgggtacaacttgctgtggtggcaggggacgctgagaaccatctggcagatttacgctccaagtgcgctggctgaggtttcggaggccaagtagtctcggatctttcggattcttcactacttcggctacctgtgtgcggatatcttccagagagctgtccactgtccacaaactgattttcaagccggggaagataggcagaatctgatttttgatttgcagagcatttgtaatgggaatctttttgccgcattccatgcagggaatatcgtggctgcccttgaatgtataaaatgtttcctgaccgcagtatgggcagcggccaatttccgtgcgcaggcggataaaaatatccatccactctttttccagaatgcgtggcttttgcttcatcatcacatcatgactgaatgcacggataaaagcatcttttacatagtctggataaacgttccagaacagcttcagattgtggtcggttcccggaatcggacgattttccgaagtggtcgggtcatagacaaaaattggagcactgccataatatttctgctctaattcttttgtcatacaaggaggtgtactataacggccttccaacgggtgattgataaacaacagccggaacaataccactgccagactgaaccggtcgctgttcttgtccgggtcattcttacccataacaatttccggagccatccagcgctgcttacccataatgccaagattggttccgaatggactgacattatcattatcgcaaatcagcacatcgccattttccggattgataaagaagttgccgttgttgatatcctgataactgtatccattattgtgcagagcacggaaggcttcgataatattgattgctgccgtacagagggcgtagaaacttttgaaacgcgcctgtttctgctttcggccacccacaaaaaagttggtcagttcttcgtaaccagacgggcgcacatccatcagatagccaaactggtcgttataaactttggtaatggcttttggccagagaaaagcatccgttggcgcaccattgctaatattgttttcgaggttcttatagaagtcattttcctttcccttgaaaactcccggatgataccatttcagagcataggttttgccgttgtacgataccttgtagaccgtaccctgaccaccagaaccaaattcatccagaacctcaacctgtccaccagcttgaatatccagcttatcatgtacttttagatttcccatattgcaataccctttcgatgatttacgtcataatttgaagtgtctgtactgccagatccgcacgaggcagaataaagtttatgaccttttgtccaaattgaaacccgattgcgttggaatagggatggaatgcggaaagagaaccaatggacttttctaagccgcctttctgtgaggtgaaaataatacgtttgttggtaatataaaggtatcccggtatgtaatccaccttggtctctgtcacagggacagattcgctgctgcccatgtgataccgtactcctttgaaaaagacgcttggcatactggtgccgccggatttccggatatttcgtgttgtggtcgtttcaaccatttcatagctcttgtctacaaagcagcatttttcgccttttttaagcatcaggttgggaacgtttaattccgccagactgccgctttcaatccgggagattgcagcagaaggcagaaccgtctgactggtagaaaaagtcggcatgggtttctgttgtggtttgttgaagatactcataatcttttaccgatctccgctgctgtgactgtgagcagaaagccgtgctgctggatt

SEQ ID NO: 13782 - DNA, 3508 bp, Unknown
  gut microbiota DNA sequence
tcatcatgcccggtaaatcctgccgtggcaaacaaacaacacctttttcatcttactcccccagcacctcacccagtgccagcacagcgttacagacgcactccgggcaggggcacagcggtgcaccggtctccacacccttcagatctttacaaatggtagcaccgcatttttcctgaaagttttgcagcagttccttggaaatgcggggcgtgcccttgccgtcggtggcagcacccgccaccatcactgcgccgatgagtgcgccgcaggtgctttccatgcagcccataccggcggcatagcctgcgcccagcttcatcagggtgtcggcatccaccggcagcttatcctcaaatgctttcagcaccgcctgcgcgcaattgcactgtccggcagctttccatgcggcagcctgcgctgcccgttcttcgatgttcattttacagtcctcatctttctttgatccgttccggttcattgcgttcagtataccacgcttttcccctgcggaaaagattccgcccccataaagccctatttccgggatcagttcctacaccaccacatacagcatagctccggcaaaaaggtcaagaacctttgttcaccttgtgccctcctgcggcttcaacgcacttttgcggtattgcagagggctttgcccggtggcttttgcaaagcgggtggaaaagttgctggcatccccaaagcctaccttctgtgcaatttcgccgacgctgtggtcggtgaggacaagcagttcctttgcctgtgtaatgcggaagttgaccagataattatacggtgtcgtgcccatataccgccggaacagccgcagaaaataacttttgctcatgtgtgcctctgccagcaggtcggcaaggcaaagttcctgctggtaatgtttgcgtatggtctccactgcctgcaaaatgacctgccgtgtgctggtggtttcagcttctgcaagaatgctccgggcgcacagcgccagcatctcgtgcagcgccagcccggtggtcaccatgctgtccacggtgctgtgctccatctgccctaaaagcatttcaaaatattcctgcatcttgaccccggtgagctgcaccggggtcagttttttgccaggaagcagcagcggctccatggcggcgacccctgcgccgtccagatgcacccaataatgatgccagcagctttgccccggggcggtgcagtagctctgcggggtgcggcagttcagcagcagcgcctgcccggtgctgagcaccacatggctttccccctgctcgatgagccctgcaccccggagggtataaaacaggatgtaactttccttatctgtccgggcggtggaaaaatgctgctgggcatagaacacccccgcctcggtgcagtagtagggctgtgccagctctgcttcgctgggggtagtgcgtttccatacactctccggggtcacatccatgttgtaggtcagcattttccgtttcctctctttccacattcagtatagcgcaccgctctttgcagcgcaagagtagatttttcgcaaagaatgcgtcacctttgcggatggaattgcccgcattataccgctatactggtagcagacaaggccacacaggagacgcattatgcacaaaaattatcttgccatcgacattggtgcgtccagcgggcggcacattgtcggatggatggagaacggcgttctccgcaccgaggaagtgtaccgttttcctaatagcgtccggcgggtggacggtcatctggaatgggacatcgacagcctgtttatcaacgtgaagcagggcatccgggaagcgtttgcaaagttcccggaaattgagagcctttccatcgacacatgggcggtggactatgtgctgctgaaagacggtcagcccctctcccctgtctacgcctaccgcgacagccggacgcaggcggtgctagatgaagtccacagcatcctgccctttgcgcagctctatgcacgcaccggcatccaattccagcccttcaacagcatttatcagctgtatgccgacaaaaaagacggacggctggcgcaggccgaggactttttgatgatcccggagtatctgctgtggaagctctgcggcgtgaaagcgcgggagtacaccaacgccacctccaccggccttgtgaacgcccagaccggagaatacgacccggagattctcaaagctttgggcttgccggaggcgatgttccctaagctcaccgctcccggtacggtgctgggcccgttgaaggcggacattgccgccgaggtgggcgggcaaaccaaggtagcgctgtgcgccacccacgacaccgccagcgcggtggagggcatccccatggagcaggacgatgcgccgtttttgtcctccggtacatggagtttgctgggggtcaagctggtaaagcccatcaccagcccggagagctgccgcgccaactttaccaacgagggtggtgtggggtacatccgctacctgaaaaacatcatggggctgtggatcatccagtgcgtgcaaaagcagctgggtatctcctttgccgagatggtggaactggccaagaccagcacctacacccgcatttttgatgtgaacgcagcccgcttctccgcgccgcaggatatgcgcgcagagattcgcacggctctcgccgagaccggcgaagcccctgccacggatgccgacctcatcaacagcatctaccactcgctggcgtactgctacggcgaagcctatcgcgagatggaagccgtgaccggccggcactgggacaagctctacatcgcaggcggcggcgcaaagaacgccaccctgaacgagctgaccgcccactataccggaaagcaggtggtggcgctgcccatcgaggccaccgccatcggcaacttgaagatccagatgagcatttctgaaggaggaaccctatgagttacgcagaagcaaaagcccgctacgctgccattggcgtggacaccgaagctgccattgcccggttaaagaccgtgcccatttctctgcactgctggcagggagatgacgttcgtggctttgataccgaccccaccaagcccctgaccggcggcatccagaccaccggcaactaccccggccgtgcccgcaccccggaggaactgatggcagatatggacaaggtgctgtccttctgccccggcaccaaaaagatcaacctccatgcctcctatgccatttttgacgaggaaaaaccgtgggtagaccgggacaaactggagccgaagcacttcaaaaaatgggtgaatttttgcaaggcaagagggctgggtgcagacttcaaccccacctttttctcccaccccaagtgcgacccgctgacccttgccagccccaacgaggagacccggaaattctgggtagaacacggcaaggcctgcatccgcatcagtcagtatctggccgaggagctggggcagccctgcaccatgaacatctggacgggc

SEQ ID NO: 13783 - DNA, 8499 bp, Unknown
  gut microbiota DNA sequence
accggccgaccgcaaaggcccccgggaccgctataaggcaagcattgacgagattttgagcgagccttacgacttcaagctggtgaagccctgcatcgagagcaaggtgttcggcatcggtgtggaggcgtacaccgtgggcagcgcggagtttgccctgagctacgccgccttcaaccgggaaaagtgcattccgctgatggataacggccactaccatcccaccgaggtggtcagcgataagatccccgccctgctggccttcttcccggagatcgcactccacattacccgccccatccgctgggactccgaccatgtggtactgttcgacgatgaaacaaaggagatctgcaaggagatcgtccgctgcggcggtctggacggccgggtgaacattgcactggattactttgatgcctccatcaaccgcatttccgcatggacggtgggctttcgcaacgtggaaaaggcgctgctgtctgccttgtgtaccccccatgcggcactgaaggagctgcaggacaccaaccagtttaccgagctgatggtgcggcaggaggagctgaagaccctgccctttggggaggtctgggacgaatactgccgccggaacggtgtaccggtggacggtgcatggtttgaggaagtaaagaaatacaagcagaacgtgctgagcaagcgcatttgaatgagagaggtttttgaagatgggtattctggatattgaaattgtcaaaggttttatgcggatgtgcaacgatggctggctgcagggttggcacgagcgcaacggcggcaacctgacctaccgcatgaaggaagaagaagtggcgcagtgccgccccttctttgacgagcagccccggggatgggtgaacatgggcgtgcaggcggataatctggcgggggagtatttcatcactaccggctccggcaagtttttccgcaacgtggagccggaccctgtccacagcatcggcattgtggagatcaacgacaagggcgacagctggcgcatcgtctggggcttggagggcggtgcaaagcctaccagcgagttccccagccactttatgaaccacagcgtccgcaaggctgccaccaatggcgcaaaccgcgtcatctaccattgccatgccaccaacgtcattgccctgacctacatcctgcccctgaccgaccgggatttcacccgtgccctgtggcagagcgccaccgagtgcccggtagtgttcccggagggtgtgggtgtctgcccgtggatggtgcccggcggggcggacatcgccatggccaccagtgagctgatgaagcactatcaggcagccgtctgggcacagcacggtctgtttgcctccggtccggactttgacatcacttttggtcttgcccacaccatcgaaaagagtgctgagatctacgtcaaggtgctctccatgggcggcggcatcatccggcagaccatcaccgacgatgacctgcgcgccatcgcccgcgactttggtgtgaccctgaacgagaagttcctcaactgagctattttcccccatttttcttcttcaaagcaaaacaggcatcctgtccgatacccccaaatggtatcgcaggatgcctgttctgctttatgtttcccggaactccatgggtgtttttccggtgacctgctgaaagactgcactgaaataattgcgggtggcaaagccaagctgctcggaaatttcccggacgctgagcgttgtgcttttcagcagaaccttcgcgcgttcgacctttgcaaacttcacatagttcgtgacgctcagacccgtttcttccttgaatttatgggtgaggtagtattccgtgtagcccaccagagcggcaagatcttccgccacgatctttttgtccagattcatctcgatataatccacacatttctggatctgcatactgaggttggggttcgtccggtgtttgtggacacgccgaatgaaatcatcgtacatcatcattgcaagcgggctcagttcatccaacgattttgccgcttccgccgtctgaatgtagctgtcccccagcgagtacgcctcctccggggaaaggccgccctcaatggcggcacggcacaccagcgaggtgaacacgatgatggaagtcttgctctggcgcagaacatcgctgctctgcaccggcacgcctgcgcttatgctcatactgttggaaagtgcctgcttgtaattcaggtctccggtgcggaccatttgcagcattccctgctccgccatccagatcttatggcggtcatggggaatggcatcgcttttcagccgttcgtcctgtgctgcactgctgttcacactgctcagctccagccgctgcccggtcaggcagtagtgcatcatcagcagatagcggttcataatagtgttttgcagggtaggaactttttcaagggctttgtaaagctggatcgaccatgccacactgatctccagcttgctgtaatatttcagcccttcctcgatcccgcgcattgtcacatcctgatagaacaccggcccgatgacccagacacgcttcagttcttcctcttccttttcaaaggctgcgccccacaaaagacccaatgccgtccccaaggtaacaggtacatcgtcccgatccccatgctccagcatccgctgtttgcagccgaacagttcaaatgcactggcaagaaatgcctcgtccgggcagttgctccgcaagagcacaccttgtgcatcatagcaccatgtatatacatttccgccgcactggacaagctcggaaaacagcatcatattctggagaacatccatgcgtaacccctccggctcattgatggaaacagtatatcatacttctgccgttttttctaccgatgcccggagccagtgcagcagaatgcctgcagagatgaccgcagcgcccacgtctgccatcaggtgcgccgccgcaatgccctgcaccccgcaaagcgcattcatcaggtacagcagcgggatcagcagcagcccctgccgcaaaagagagagcaccaccgcaccacttgccctgcccacggattgcagcaggctggttgccagataggtcagaccgatcaccgggctgcccagcaccagatagaccaccagctgcgtccccagacggaatgctccttcttccttgatgaacatcccgatcagggcattgcgtccggcaaagctggccgccccggcaagaacaccaaaaacaacggtcagcaggatcagatctttcaaaagctgcttcaggcgcttcgtgtcgcctgcaccgtagctgtacgccagaagcggctggcaccccatgcagatcgccatggcgatcatactgatgatcatggtcgtcttgcccgctgccgccatggctgcgaccgccgccgtgccgtgggtcaccagcagccggttgctgaaggaggaggcaaaccctgccagaaggctgctgatcccgttgggcagaccaatggccagcatctcacccagcatctgcggctttttcagggcaggacggagatcaatggtcagcactgtgccgtgtttgacgatgtagcgcagatagcagcccgttgccacaagattgcccagcacactggcagcagccgcaccgctgacgccgaagttcagcaccagaatgaacagcgggtcaaaaatgcagttgaccagtgtgcccagaagattgccgatcaagccttcttttactgcgccctctgcacgcaccagcatcgccatgctgttggacaggataaaaagcggcgcacccagtgcaaggacctgaagataccgctctgcatagggaaaaaattctgcatttgagcccagcacccccagaagcggcactctgctcaccagcagaccgatgctgaccagaacgcccagaaaaaagctgctccagaagcagagcgaggagcaagtcttgccctgctcgatctcgcctgcgccaaagcagcgtgcaatgatggcgctgctgcctgcgccaagcatggtcgctactgccgaaaggatcgaaaacaccggccccacaacggagaccgccgccacctgtgcggtatctcccagacagcccacaaaaaacatatccgccatgttgtacagcaccatgacaaggataatgataatggagggcaccgccatggaaatgatggatttccagacagagccggtacggaaaagtgcttcgtttttcatggtctcctcccaaaaatcaaccgcacgcaggcagaacgaaagcccctgtcaaagaggctttccgagctgcttcggtcacaggttgtccagcgcatccagcagtgctttcagcgccatttccggcagcccaagcatagggccgatcttgccaaatgtcatgccgtaggcagcttttgcctgctggttgtcggcaaaaccgggcaggtactgctccacgatggcttttgcggcctcgttttccatcagtgctgcaatcgtgctctggctgttcagcttgccgccggtcaaaatttccgggtgcttccagctgctgatgctctggtgtccggcagacagtgcgccgtccaccgggatggctgcaccagtgatgtaccgtgccagaccgctggcaaggaaaagtgccaatgcagcgcactcctccgggtcgcccatccgctttgccgggcagtcggatgcaaaaaagtccatggccgcagccggtgcatccccgaaaatactggttctggtgtagccgggacagatagcgttgacggtaatgccgtattctgcgtaatccagcgccgctgcgcgggtcatgccgaccacgccgaacttggtggcactgtacagcgcctgtccacgctggggcacaagacccgccaccgatgccacattgatgaggaatccgccttcgctgtggctcttgaggatggcctctgcgccgtacttcatcccggcaaagacgccctcgctgttcagggagaagatcttctcgtaatcctctacctcatactcatgcagcggtgtgccgcccatgccgatgcctgcgttgctgacaacgccatccagcttgccgtagtgcgtcaccgtcttatccaccagttctttgatggcagaagccttgctgcaatcggtctggataaagatggcatcgccgcccttggcgcagatgccatctgccacagcccgcccctgttctgcactgcgggctgcacagaccaccttcatgccgttttcgccaaagcactcggcaatggcccggccgatgccacggcttgcgccggtgacgatggccactttgcctttgacactgttaaaatccatcattttcattctcctttttctcagatcatgttactctgcttcagccattccacttcatcgtggatggtctcccgatgatttatcgtatttacgaatcagatttgcaaccatcagttgcttatccatccctgtggtgctataataacactgtggcgcaggagctgcaatcagcagtttccggcgtgtccggtgtttaagcaacggatcacgtccaaagcgttggttaagcaccatttatgaaatacattgacggaggaattctatggatatccgggtcaaaaaaacgaagcgtgccattcagaaagcatttgttgccctgctgcgggagaagccgatcgaaaagatcacggtcaaagaaattgccgaacgggccgagatcaacaaaacgaccttttattcccactatgaaacgctggatgccctcaccgccgaaatggagcggcaaacggtccagctcgtctgcgacaatatgggcggcgcacagcagctgctggatacgccggaggcttttgtgcgggagatgtttgctaatctccagcaggcgaccgattatctcggcgtggttcctgcatcagcgatgaaccgctttacacagcatttgcgggatgccgttctggaacagatcaaaagtgataacatcgagccttctcaatatgaaaatgtcggtgcgatcctgatttttgtaatgaacggtctttccgggcttctgaacaccgacgcaaaactggcacaaaaacaaattgatgtgatcgccgccgtggttgcggatggtgtccatggtctgcatctttcccgctgagccaaaacaggctgcaagaagcatcttccgcagcctgttttttgctattgcagcttatctttctgtgtaactacccagcaccgcaaggctgggctttgctgtccgctccatcgtttcgcggttcacggcgatcagtccaaactgcatggcatagcccttctgccactcaaagttgtccatcagactccaatggaagtatcccttcaccgggatgccgtcggcaatgcagtgctgcacgccatccagtgcctgccggataaacgccacacggcgggtatcatcggcggtggcaatgccgttttcggtcacgatcaggtcacccttgaattcctctgccaccttgcgaatgacgtgttccagtgcctgcggatagacctcgtagtccatctgggtcagttctgcgccctccggtgccggcagctgcccctgcgggccataaagggtgcgggtatagttctgcacacccagaaaatcatcgtctttgatataaggcagataatgggtgaactcctcctgccatgcggcctcggcaaaggcttcgccgccgggctgtgcctgcaggtcgtgcagcgagagggtcagacccaccttgatctgcgggcagagggctttgatggcatcccgtgcggctgcatgggcacgcatcaccagcagatcaccttccggggtgcgctcgctgacaaagatcttcggctggggtgtgccgaacacctgtgcattctccatggcagcatacttcatgttttccatcatcttctggaagttcatgcccacctgcaccgtgccctcggcagactttccggccgatgcggcattttgggcagcctgttctgccatcagacggaaccgcttggagatcgcggcaagctgcaagcccatattggcctcgttgatggtgcagacatagcgcagctcgctgcccagctgttccatcacataggtcacataacgtttaaaatcctctacggtgctttcggtttcccagccgcccttgcagatgagccatttcgggctggtgaagtgcagtagggtgacgatgggttctacaccatgcgctttgcagcaggcgatcaccttgcggtaatgctcgatggcttccggatcgaactttccttcctccggctctacccgtgcccactcgatagaaaagcggtaggcattcagcccggcatcagccaagagcttgatatcttcttcgtaccgttgataatggtcacaggcaatgccgctgggctccgtaaagctggaatggggcagctgttcctgtgcccagtagtcactattcgtattgttgccctctacctgatgggctgctgttgcagcaccgatgaaaaagcctttttcaaatttctgcatgatggttctcccttcctgcgtgttgcttgttgagactattgtagcagacctgttttgcccctatgggacaataaatcgtgaatgcgggcgcaaattcacacaccgcaaattattgcacgaatttttatccttaactatcgtttttcatccggcagtggctgttgcattctgttattctggtgtcagaaaaagcggaactcagttcacacaaaaaggaggaaaatcattatgttccaaaagaaacccagtgccagtgaagtagacggcgtccagtaccgccgtgcaaagctctggcagatcatctgttacgcctgcaacgcttttgtgggcatgagcgtctattccctgatcggtatggccagttactcggccagcatcggctacggcatcaccactgcaaccgtcggtctcatcctgatgctggcccgcattctggacggctttaccgacccgatgctggcattcatctacgaccgcgtcaacacccgtttcggcaagctgcgtattctgctgatcagcggctacctgatcgaggctgtcggcctgctgtgtatgttcaacctgtgctccagcaagggtttcggccttccggtgttcgttttgacctacattatttacatcatcggctataccgtcaccaacatgaccgcccagaccctgccggctatcatgaccaacgatccccgccagcgtcccaccatcggtgtctggaccactgcgctgaactacgccgtgcccatgggcatgagcatgctgatctacaccgtcatcctgcccaagtgcggcggcacctttaatcaggatttcctcagcacggtctgcaccatcgtgctgatcattgccggtatcggcaccctgatcgtctgcgccggtatctccgcctacgataagcccgaaaccttcgagggcaccagcaaaaaacacgagccgctgaaaactgcggatattcttgaggtgctcaagcacaacaagcccctgcagtgctacatcgcctccaacgcttccgataagctggcacagcaggtaggcagccaggccatcatcaacacgatg

SEQ ID NO: 13784 - DNA, 9099 bp, Unknown
  gut microbiota DNA sequence
ttaccgtatccagatgccgaaagttacccctcatgtatgcaggcacaccttttgctctaatatggcaaaatccgggatgaatccaaaaaccttgcagtatatcatgggtcacgcagacatcagtgtaaccttgaacacttacacccatgtaaattttgatgatgcaaaggaagaagtatatcggatagcgaatagttaaaaaagcccgttggtaaggacgcttgctttaccaacggatttaccaagattgcagggaaaaacataagaaaatacgagaagatttgagaagataccttaaaaagaaaggaaaattcaaaagtcggaaaaccctgaaatatcaagtgtttgagaagaaatacaagacttaaatggagatataaaaagatgataaaaatactttttatttgccacggcaatatctgccgcagccccatggcagaatttgtgatgaaggacttagtggaaaaggctgggctttccgcgcagtttgaaattgcctcagctgccacaagcaccgaggaaatcggcaacccggtctatccgcctgcccggcgcaagctggcggagcacggcatctcctgcgcgggtaagaccgcccggcagatgacccggcgggactacgagacttacgattatcttatcgccatggatcacaacaacctgcggaacatggcacggtttgtgtggggtgacccagagcacaaagtctcgctgctgatggatcacacccgccgccccggcgatgtggcagacccgtggtacaccggggactttgaagccacatggcaggatgtgctggagggctgcaccgccctgctggaagaactgcgataaaaaggggaaggctatgacagaacgttattgcgaaggtgaacggtttaccggcctgtcatttgcaggggaagcctttgaaagctgcgattttgcggactgcgtatttgtggactgctctttttcaaaatgtgagctggaccacaccaccctgaacgagtgtcggttcgtgcggtgcgagatcaccgggctgcggagcgtgtcctcctcagtgcagtcgctggattttgaggactgccgcctgcaggagatcgagtgggcatcgttgctgtcaaacggcgcattcccagaccctatccacaccctgaaggactgcagcctgaaatacaacacctttaccgaaatgaacttcaaccgctttgatttttcaaacggcaacgagatcgtaggctccatgtttgccaagtgcgagatgcaactggcaagtttcaagggcacagagctgcacgaaacggagttctaccagtgcgatctgcgcaaagcggatttccgggacgccacgggctataaggtggatattctgggcagccgcatgaaggatgccaggttctcgctgccggaggcggtaaatctgctggctgatttgaagatcaagctgtcctgaacagggaggacaacggctacaccgccgacaagctgaccttgcaggatttggaagccgagtaagacataataaaataagtgaaaagggagctctgcccggacattggtccgggacggaactcccttttttgctttgtatttcacgaaaaaagacctgatacaccgacaagggcaaggcagaaaaacaccttgcctatgcctgctgctttcggcagaacgacagaaattttctttaaaatttgtgcaattttcaacggaagcaaagtgaccggcagtcaacactttattattttaacacggcaaaggctttttgctgcttctcctgccggaaatgtatccaaaagctgttcacactttagtcatactcatttgacagaaactgcttttttcggtatcctgtccgtatcacgaggacggcgggcagaaaatacccgctttttttcgtttattctgtatttataggaaggacaatctatggcaaccatgaaagatatcatccagagcccgctgctgctggcgctggtcatcggcggtcttttgtacatttccgcattctcgctggtctacctcaaaaaggcctacgaccactgtctggagctgggcattacccgcaaggaactgagcaacgtgatcaaatccagcctgatattctctgttgtacccagcctttccatcgtggtgggcctgttcgtgctcattgcggttctgggcagcgtgtgggcatggtggcggctgtcggtcatcggttctctgtcctacgagactatgatctccagctccattgcgcaggtgctgggctatgcatcctctgcggaaatgctggaaagcgccaccggacggcagttcggcgtggtgatgatcctgatgagcgtgggtatgctgagcggctttctgatcctgctgcccctcggcaaaaagctgtgcaagagcgtggaccgctctgcagccgaaaacggcggcagcacctggaaaaatgtgctgtccggcgtgttcatgcttgtgatgttctcggtatacattcccattctgctgttcactgacaatgtgcaggctgccgttatgatcaccggtcttgtgatcgccattggtgtgggcgtgctggcaaagcgcccgggtcttgcatggctcaataacttcgtgatggcattctccatgctgggcggtctgatctcgtcgctggcgtgggtacggattttcggttgaggagggaaacggacatgagcaaagcaaagattgagaccaaaatggactccttccagagctgggcgcaccgctggggccgtgtgggtaccctgatcgccctcatttacatggtggcgctgccctttgtggtgctggctgcctacgacagcatcccgtctctgggcgaggtgttcaacgtgaacaccttttccatcctgctcatctacatcccggtgggcttttcggaagcactgagctacacccccattctgggctgctcggcctatctggccttcatcaccggcaacattatgaacctgaagctcccggtggcggcaaacgccatgaacctgaccaaaaagcagcccaacaccccggagggtgaggccattgcctcggtggctgttgcggtctcctccctgatgaccgttgccatcctgacgctggcagcggtgtgcgcctccttcatcagcccggtattcgagctgcccgccgtcaagacggcctccggctacctgctgccggccctgttcggctccatggcgctgggtctgttcgccagctcgtccagcggcagcaaggtggtcaagggtggcatcaagggggtgcttccggtgctgatcatcatgacggtggtttcccttgccgcacgccttgcgggctacggttccgtgctgggcggacttgtgggcatctttatcatcgtgatgctgcccatcggcatcctgacttcctatgtgctgtggaagaagggcaaaatccaggtagtggacaaagagcagaagtaaagcaatcggaacggtctggatcctgtatggtacagggctcaggccgttttgctttcattaggggggcaggggtgactactccgcaccttccgaaaattgacaaataattctcaattttagtattctcaacgaggccattgagcagatcagctttcaggctacgaaggcccgagcctttgccgctggcagataaaggcatagaataacaaaaaagtctgaactgaggcatgagccaccggttcagacttttttcatactatgaaaacaccagctgctgcggatagcagcgtgcagttcaatttgttatcagcactcgtcgtactgtttttgcagatattgcaggcaccggactgcgttttccggggtggtgttctccaaggtggcgaacacatagggcttctgttccttggcaaaccgcagaatggtgcggtagtcgcccataccgccctgtccggcaccggtggcagccagctgcccgtcggcgtcctgcagcaaaaagtccttgaagtggatcatggccacatccttgcccagcagctcaatggtctcggcgaacacttcctcccgctggtccacgttttccatgttcaaaaggttcaccgggtcgagcagaatctgcagattggggctgccgatctcgtccagcacggtgcgggcgcggcgggcgtcatacacaatgtgtctgaccaccggctcaatggcaatggtcacgccgtattgctcggcgcagcgcaccaccggcttgaagttcttgataaaggtagcaagggcggcatcgctgcggcactccgggcagaacttgtactccgcgttgggtgcaccggtctcggtgcccaccatgccgcagcccagcaggctggcaaagcggatatgcgcatagtacttttcctgaatggcgtgcagggcagccgcatccgggtgcgccagattcaggtagttgcccagcaccgcaatgtccagctcgtttttggcaaacaggcggcgcagataggccgcgtagccgggggtgagggcagagggggtgttgggcacctccttcagggatttgctcagcgccagatgcacgcaggaaaagcccttctggcgtaccagcggcagcacctgttcaatgggcagcttttctgcgtcgtgcagacgtagaccgaattggatcatgcttggttcctcctttaatatgggtgcgtttttaccattatacaccaaaattgtctgcgaaggaacaccttaaacgccttttagcgctgctgatcgttgccccgggcagtacctgacaacgcgagtgacgcagaagtgtgttaaaaagtgtgatataaagaagataaaatacggatttgttagcttgtttgttggattatgacataatttcaggcatttcacaacacatataaaagcaaaaatcccacgatacacgccgctattctagcggtatatcgcaggacttttcttggagctggtgacaggagttgaacctgcaacccactgattacaaatcagttgcgctgccattgcgccacaccagcaaaggttgctaaaatagtataacacaggcacggcaatttggcaaggattgtttttttgcaggggataataatgccggaaaacagacaaagatgatagaaaataatacacaagtataaaaatatactacaaatttaaacaattttgcattgcaaattttttgacgatgtgctatgctgaaacgtagaggaacgccgccggaaaggcggctgcaaacagatttggaggatttgtattatggctgaccgcattgttctgaataccatctcctaccacggccacggtgctatcgagaacatcgttcccgagctgaccgcccgtggctacaagaaggctttcgtctgctccgaccccgacctaatcaagtttggcgttaccaaaaaggtcaccgacctgctggatgccgcaaactttgcctacgctgtttacagcgagatcaagcccaaccccaccatcgccaacgtacaggacggcgtggctgccttcaaggctgccgaggctgactgcatcgtgaccattggcggcggctcctccatggataccgcaaaggccatcggcatcatcatcaataaccccgagtttgcggacgtccgctctctggaaggtgttgctcccacaaagaagcacgcggtgttcaccatcgcagtgcccaccaccgccggtactgctgccgaggtcaccatcaactacgtcatcaccgacgtggagaagaagcgcaagttcgtctgcgtggacaccaacgatatccccgagatcgctgtggttgaccccgatatgatgtcctccatgcccaagggtctgaccgccgccaccggtatggatgcgctgacccacgccatcgagggctacatcaccaagggccactgcgtcatctccgatatgttccatctggaagccatcaagctcatcagccagagcctgcgcggcgctgtgcagaacaccccggagggccgcgagggcatggctctgggccagtacatcgccggtatgggcttctccaacgtgggtctgggcatcgtgcactccatggcacacggcctgtctgctctgtatgacaccccccacggtgtggcctgcgccatcctgctgccggtgggtctggagtacaacaagagcgttgccggcgaacgctaccgcgccgtgggtaaggccatgggcgttatgggcattgacgagatgaacgatgtggaagccgctgatgctaccatcgctgccgtcaagcagctgagcgcagacgtgggcatccccgcaaacctgcacggcatcctgaaggaagaggacatccagttcctcgccgagtccgcttttgcagacgcctgccgtcccggcaacccccgtgacaccagcgtggaggaaatcgtggagctgtataagagccagctgtaatccattataaataaactccgagagccgctgcaccgtgtttgtgcagcggcttttttagcggaatgatgcgttcgtaaaatgaaatcccgcgccaattgtaacatttttctgctgtcctcttgtataaatcggcgcaagcgagtacaatcagagcataaaaacagaaggcgaggaaagcgcgatgacactgaacttctatacgctgggcgtgctgtatttggtctattccttccttgggtgggtaggggagaccgtggtggctaccttccggggcaagcggtttgcaaaccgcggcatggcggcggggccgttctgctttgtgtacggcaccacggccatcctgatggcagtgggctttgcagatatgcgcacaaagccggtggtgctgtttgtggcctgtatgcttacggctaccgtggtggagtggctcacggcaaagctgctggagcggctgcacaatcgcaaatggtgggattactccgataaaaagttcaacctgaatggctacgtctgcctgcagtactcggtgctgtggggcgcgctgggcatggtgaccgtgctttggggcaacgggctgctgttgcgtctgtgcgcccttgtgccggactggctgctgcatccgctggtgtgggctgcgctgggcatcgcggcgctggaccagctgggctcggcggttctggtggggcggtatgcggcgcagcacccggtgctggaacagctgaaccagaaactggaggcgcgctccgacaccttgcgccgccgcattgccgtgtatgtggaaaagcgtatccagcgcgcctacccggaggccgcccggcagcagcccacggcggtgcagaaggggcaggccgacttcctcagcgcggcagacctgctgtggctgttcgtcatcggggcgtttctgggcgatatggtggagaccgtgttctgccgcctgaccgctggggtatggatgagccgctccagtctggtgtgggggcctttcagcgtggtgtggggtctggcgctggctatggctaccgtgctgctgcggcagaatcaggaaaaaagcgaccgctatctcttcgccttcggcacggtgctgggcggcgtatatgaatatgtgtgcagcgccgttaccgagctgctgttcggcaccgtgttctgggattacagcaagttcaagttcaatctgggcgggcgcatcaacctgctgtactgctttttctggggcattgcggcggtgctatggatgcgctacggctatccgttggtgctgaagctgatgaaaaaggtgcgcagccatatccgtccgtggatgacagcaatgctggcggtgttcatggcggtgaatatgcttaccagcgcgctggcattggcgcggtacgatgcccgcaccagcggcgaagcgcccaacggacagctggaagtgttccttgatgagcatttcgacaatgcccgcatggagcgcatttaccccaacgccaaaaaagtgatcaaggcagaataaatcccatatttccccttgcgcttttgccggaaaacaggtataatattctctggataaaagggagtaaggggcgtaccttggttgaaaaacgggtgcgctgtgctgcagcgacagtcccggcagaaatgcccgatgcagcaccggatgcttgagacttttatcacatttccccgttccgggcaagatgtgataaaggtctttttttgtgcctctgctgccatcatttaaaaaaaaggagaaatactatgctgatccctgttctgttgtttatcgtgggtctgctgtgcctgatcaagggcggcgactggtttgtggacggtgccaccggcatcgcccgccgcttccatgtgccggagctgctcatcggtgccacggtggtgtccatcggtaccaccctgccggaggtcatggtgtccaccacctctgccctcaccggtcacggcgagatcgcctacggcaacgccatcggctcggtcatctgcaattctgcactgatcgccgccatcaccattgcggtgcgcccgggcaaggttgaccccaagagcctgcgcaccccggtggccttcttctttgtggctgccgctttctatgccggtgtggcctacaccaccggctccttcacccgcccggtaggtctgatcctgctggccatgttcgtggcttacatcgtgtgcaacgtgctggctatgaaaaacacccccgccccggaagaggaggagcaggctgaggaaggccccttcgccaaggagctggggctgctggccatcggcgcagtgctcattgctgtgggcgctgacctgctggtggacaacggcaccctcatcgcgcaggcactgggcgtgccggagtcggtcattgcgctgacctttgtggcactgggcacctcgctgccggagctggtcactgccatcacctcgctggctaagggccacggcgcgctgtcgctgggcaacgtcatcggtgcaaacgtgttcaatctggtgctggtcagcggcgtgtccgttacgctggcacccttcagcatcccgcagaactccaccatcgcaggtatgaacgcctcgctggtgatggatatcccggtcatgtttgccgtgatgctgctgctcaccgtgcccgctctgatcaagggcaagctgagccgcccgcagggcattgcactgctgtgcatctatgccgctttctgcgccgtgcagttcagcatctgatctgttgtaaacgtaaaatatttaaggctgctgcacaaagcactgtgcagcagcctttttatgtgggacgatttggagtggccgccgccatcgggtt

SEQ ID NO: 13785 - DNA, 672 bp, Unknown
  gut microbiota DNA sequence
ctgaagaagctgcttgccagcggtatgtccgctgatgaaattgttgccaaactccagtaaatttttatggaagccagcaagcgaatctgtccgaactgcggacgtaaaatgaagcagcagttcattggtctgttccactgcaaatgcggcacaagctggcggcgtgatataggattttttgaacgtactccagatatggtgttctcactggaacgcaaaaaagtcagaaacaaagtcaagcagttaccgacgatacatcataagtaggcaagaccaccagccgttttttcgactggtggccttttttgtgcttaatcctctgtaatgccgagatattggtcaatctccatgatgctttccccactgatctcaaccagatcttcaaagggcactacggtttcgcccacttgcaaggtgcggaacaccgggtcgatgcggtccgcttttccggtcagcgtgatgtagttgcccactgcgggaatctccgggtgggcggtatcctctttgaaataccgcaccgtgatggtcatgcccttggtgacctgcatcagccgatcggacagagccgacatttcttcctcagtcagaatgcgcttgggcacacgctcggtgcgctgcttttctgcggcaagctgctcatcataatactgcttctatttatcctttggcaat

SEQ ID NO: 13786 - DNA, 201 bp, Unknown
  gut microbiota DNA sequence
cgtggacgaagaccgaaaacagcattcggccacgcctgatttaataagttaaggtctcgcatattcgccctcggctccctgcgagtggggcataaacatctggcagcggacttgtaccgcttcattggcatttcagccaccccgtctgctttgtgaccgggccgcgaattacggaagtatcattatcggagtaccagatga

SEQ ID NO: 13787 - DNA, 13998 bp, Unknown
  gut microbiota DNA sequence
atacagcccctctcgtgaaaatgatttcagagccccggaacgccgctggcgttccggggctccatttctatgggcgattttatacaatttttccaagcatttcttgggcaacctgccgccggcagcttccgcgcactgcaaaatttctgctgttccggcacaaaaggggcgcgaatgcttttttcgttcataactttgtgataccatacctctataagcttatcactcagacggagatcctgccatggaacactacgattggaacgagggctggctgttcacccccacattcgacccggcgctggtgcgcccggagtgcccggagctttcccttaccccggtgcggttgccgcacacggtcaagcctctgccttataactactgcaatgaaaacgactaccagcgcctgtgcggctaccggcgggagttttttgcgcccaaggagtggctgggccgcaccgtgctgcttaccttcggggcggtggcgcacgacgccaccgtgttctgcaacgggcggcgggtgttccaccatggctgcggctacaccgcctttacggtagacctgaccggcgcgctgcgtcttggacagaaaaacgtggtggctgtgcgctgcgacagccgggaggatctgaacatcccgcccttcggcgggcagctggatgcgctgacttacggcggcatctaccgcgccgtcagtctggatatcaaggagcccgcctacctgcgggacgtgttcatcgaggcaaaggccgagggcgatttccgcatctacaccgccaccgtgggcgagacggtcggctgcacgctgcaggccgagatccgcagccccgccgggagccgggcagtgtacagcggcgagctttccctgcccatcaccggcacactgaacaacgtgcacccgtggagcctggagcaccccaccctgtacaccctgaccatgcggctcatccgccccggcaccggcggtctgcccgaccgggtgctggacgaaaaaaccgtgcggttcggtttccgcacggtgcagttcgtggcaggcgggctgtacctgaacggccagcgggtggagctgcgcgggctagaccggcaccagagctacccctatcagggctacgccatgccggacagcatccagcggctggacgcccagctgctgaaaaagggactgggctgcaacgccgtgcgcacctgctatgcgccccccagcccggcgtttctggacgcctgcgatgaactgggtctgctggtgttccccgaaatgcccggctggcagcacatcggtgacgaagtgtggcaggcgcaggcgctgcaaaactgccgggagatggtgtgccagtaccgcaaccatcccagcatctttttgtggggtgcccgcatcagcggcagccccgacaacgaggccttttataagcgctccaacgaagccatccaccggctggaccccacccgccccacggcgggcacccgcagcacccgcaagagccagctgctggaggacgtttacgcctacaacgattattcctacgccgggcgcggcgcgggctgcgagaaccgcgccgccgtgacccctgacacccgcaagggctacctcatcagcgaattcggcggccagaacttccccgccaagccctttgacgatgaacctcaccgtctggtgcaggcgctgcaccacgccgctgtgctgaacgacagcatcgcccagccgggcgtggcgggcagctttggctggtgcatggccgactacaacacccaccgggaattcggcagcggcgaccgcatctgctaccacggcgtgatggatctgttccgcaaccccaaactctctgccgccgtctatgccagccagaaaacgccccgcgcaccctccgacatcgtgctggaggtctcctccgccatgacgctgggcgacctgcccggcggcgcagccgccgcctgctgggtgttcaccaatgccgagagcgtgcggctgtaccgcggcaatgactttgtggccgagtttggccccgaccgccggggacgctttgccgccctgccccacccgcccatcgagatcaacgattttgtgggctcgctgctggaaaagtatgagggcatggatcacgccaccggcgcacaggtcgccgccatcctcaacgagctgcggcgggacgccatggcgctttcgcccctttccaaggcgcggatgctctcgctgcggctgagctggaacgagctgctgcggatgtactacaaatacatcggtgtgctgggcagttccgcgccggtgtaccggttcgaggcggtatggcatggccgcgccgtgcgcaccgtggtgcgggagccggtgcagagcgtccgactggaatgcaccgtgcacaatcccctgctgaccgacggccccacatgggactgcgccgcggtcagcctgcgcgccatcgaccagaacggcaacctgctgccctactgcggcgaggccgtctgcctgtccgtggaggggccgctgaaaattctgggccccagcgtggtgcccctgcggggcggcatggcgggcacctaccttgccaccaccggcgaggccggacgcgccgtgctgcactgccgcatggagggcgcactggacacggaggcggtgctcaccgtgcgcagccgggaggagcaaaacgtttaattttcgtcctttcatgatagatttgcagtctgttcaaaattttatcatggttggctgatatcctagaagcacaaagtattccgcagggcggcgctgctgccctgcgtttccgtgtgtaaagccccagagaagaggatgcgaaaacctatgagagaaaagttccgtcaattcatgatcgggcgctacggcaccgatggcctgaaccagtttttgagcatgagctccatcgtgatgctgctggtatcgctgctcacccgcgtttccttgttcacatggctgggcgcagcgctgctgattttgtgctactaccgcagcctgagccgcaacatttccaagcgcaccgaggagaactaccgcttttacagcctgaaggaccggttcaataacaagttccgcagcctgaaggagcagtgggccaaccgcaagctgtaccactactaccgctgcccccagtgccgtcagaagctgcgcgtgccccggggacgcggccgcatccagatctcctgcccgcgctgcggcacccagttcattaaaaagagctgaaccgccatgtttggatatgtgatcccggaccgggccagcctcagccccgaggcgcagagccgctaccgctcggcctactgcgggctgtgccgccgcatcgatgctctgcatgggctgcggggacggttcagcctgagctatgacctgacctttttaaatatcctgctgtgcagcctgtacgagggcgagacccccgcagacagcggcatcagccgctgccccatccacccggtacacggtgtactttggcgcagtgccgaccctaccgactactgcgccgacctgagcgtagcgctgcattactacaacgcgcaggacaaatggcaggatgaccataatctgctggcactggggtacagcaccctgctggacaacagcaccgccgaggccgccctgcgctggccgcggcagtgcaatgccatccgtgcgtgtctcgccaagcttgccgagtacgaggccgccggcagcactgaccttgacgcggtgtccggctgcttcggtgcgctgatggcagagctgttcgactaccggcaggatcgctgggcaccggagctgcgcagcatcggcttccatctgggcaagtttatctacctgctggacgcctacgacgacctgccccgcgacaagcgccagggcgcatacaatcccctgcgggagctgagcacccacccggactatgaggaagagatgctggacatcttcgagctgctgctggcacgctgcgcgcagaactttgagcgtctgccctgcgtggaggacgcggacctgctgcgcaacatcctgtattccggcgtatggctgaaatacaactgcaaaaacgcaaaacgcaccggaaagcccgatgcatcttgattttgtgccgatgttccggtaaaataaaacggatgcggtgcagcggtgctgtaccgtcagtataatgagtgaggaagtataccgagcatgagagatccctatgaggtgctgggcgttcagcgcggcgcaagcgacgacgagatcaaaaaagcataccgcgccaagtgcaaacgctggcacccggatttgaaccccaacgaccccacggctgaggagcacttcaaggaggtgcaggccgcctacgatgccattaccaagggcgatgccggcccccagatgggcggcaacccctacggcggctaccaacagcagggctacaaccggcagagctatggtcagcaaggctatgggcagcagaactacggttacaccggctttgatggctttgacgggtttgagggcttcgacccctttggcttcggttttggctttggcggctatcagcaggccgggcccagcgcctccggcaccgacaccccggagatgcaggccgcccgcaattttgtggccaatggccgctacgccgaagcgcgccgggtgctggacggcatgaccggccgcaatgcgcggtggtattacctctcttcgctggccaatcaggggctgggcaaaagcgtggacgccctgcaggatgcccgccgcgccgtgcagctggacccgaacaacaccgagtaccagatgcacctgcgccggatgcagaaccccggccagacctaccgcacccagaccacctacgcccagcccggcgggcttttgcgctggtgctggagcatgattttgctgaacctgctgtgcaactgctgctgcggcggctggggcttccgtgggttccggatgtgatatgattttatacaaaaaggctgctgcacgcacggtgcagcagcctttttctgtttgcggatgtaagggtttgctcttacttctggggagcctcgaaagcaatagcggtagcaccggcagcggcgtccacactcttcagagagatgggagccacctcgtagtgcagggtgtcaaagctctgggtgttgccgtcctcggtggtgaactccagaacgtagacaacgtcagcctgcttgtcagcctcgacatcgcgggtgatgacgatgctctcgccgtcagccagaccctcgcctgccaggttctcgcccttgtcctcagagcctgcatcgtacaggtacagctcggtcaccttgctgccggtggtgttgtacacggtgtactcggcagaagtggcctcagcctcggaggaagcaacctcggaggaagcagcctcggaagaggcagcagcagaggatgcggtggaggatgcagcggtagaggcagcgccgccgcaggcggtcatgccgacagccagtgccagagcggcagcggcaattgcaacagtcttgagcttcatagggattatctcctttttcgtcttttgttggtgtcagcccccggcagcataccaaccgccttggttgggctgatgttctcttattatacgcacattgacaaaaaaagcaagcttttttcgtgaaaaatcaacgatgaaacaagaactgttaccattttgacatgaatttggcacattttaggtggcagaaacatgaaacaggttgcatatatgcagctttcgtttcctgccgctgtgcagacggcgaaatagagctgcaaaaaattttattctccccttgacaacagcccaccgccgctgtatactgtgcatcgtgaacgttgttcatgttggagggtgagtgtatgaatccaatggcaacatccaaggcggacatcctgaaaaccagccgggagctgatccagcagaacggctgggcagcggtcaacatccgtgcggtcgcggccgcctgcggggtctctgtgggctgcatctacaactacttcggctccaagaccgagctggtaagcgcggccgtggaaagcatctggaacgacatcttccaccacccggaggacgaagccgtgtttcaggacaccctgtcctgcatccggtggatgtaccggcagatggaatacggctgccagcagtatcccggcttcttcacccaccacgcgctgggttttgtgcggcaggacactgccgacggcaagcagcagatgcggcagacatggcagcacattctggatgctttgtgcaacgtgctgcgccacgataccaagatccgtccggacgcctttaccgagcagttcaccccggaacagtttgcgggcatcctgttctccctgatgctgtctgcggtggtgcagcagagcttcgacccctctgcggtgctggagatcgtgcgcaggaccatttattaagcaaaaaaacatcccacaagccttgtgggagttttttaagtcccaatgtgaacatggttcaatttggtttttgtgcccctcgaaacatactatcaccagcccttttccctacgatgcttccggtacggctctgccgcgcggttcgctataaaatcaaaaaactgcaatcaaaacaaataaaggagaaaaacgtatgagagctgttattgaaaccgttttcgatatcttctatctggtcaccgtgctcacggtgggcatccgcatgatccgcgatagcaagactggcacccagttccgcctgttcggcctgatggccgttgtgctgggcgcgggcgactccttccatctggtgccccgcgcactggcgctgtgcaccaccggtctggaaaactacgccgtgccgctgggtctgggcaagtggatcacctctgtgaccatgaccgtgttctatgtgctgctgtactacgtctggcgcaagcgctaccagatcgaaggacagaagaacgtgactgccgccgtgtacgccctgtccgctgtgcgcatcgtgctgtgcatgatgccgcagaaccggtggctcaccaaccacaccccgctggcatggggcatcctgcgcaatgtgccctttgccctgctgggtctgctgatcatcgtgctgttctaccgcagcgccaagcagaacaacgacaaggctttccgctggatgtggctgaccatcgtgctgagcttcggcttctatatccccgtggtgctgtgggcagacgtgaatcccatgatcggtatgctgatgatccccaagacctgcgcctacgtctggaccgtgctcatcggctacaacgccatgaaagccgagaccggcaatcagaactaaccttttcccccgctgcttaacagaaaacccgccgacagacagcgatgcactgctctgccggcgggctttttacattgtataaataaatgtggctccaaaacacctgcaggtgttttggagccacattgaaacaatttcttttcacccctcggtgaaatactccgggtggacactgcgggcctgctccaccgagagcttataacggttcaggtggctttccagcgcttcgcccagttcatcggcggtgccgtgcagcaccatttccagaatgcgggtgtgggcggcgcagacggacttgttctcgttggtctgcaggctgaacttgcggatacgttccacatgctgcagctcgcccagcatatggtcaaaatgcgcctccatgccagtgatctcaaaggccttgcggtggaactgattgtccagttccagcagccgggtctcccggttcggctgggtctgatcggcttccagcaggcggtagttctcgatgatctgccggtactcctgctcctgctgctcggtcaggcggccgcggatgcggttcaggatctctttttcaagggtaaagcgggcaaactgctccagctccatccgcttcaggtcgataggtgccacatgggtaccgctttgcggcttgatgtccaccatgtgggcaatgttgagcatgatcagcgcctcccgcatgggggtgcggctgatgcccatctgctccgcaagttccctgtcgttcagggggtcgccgggcttcagctccatggtgatgatccggctgcggatggtctgatacgcctgttccctcgcactcaaagatgccattgcagtgttctcccttcggggtcagttggtgatatactagtatatgaccatattacccaactgccgggcaactgtcaatagcaggagcaaccgaaaatcaagggcaattttttgctattttgttcaatgaagtgcccgcgccgggcggtacaccaccggcagccacacaaaagccaccgccaagccgcaggccacatcaatgaccgagtgctgcttggtgaacacggtggacaggcagatcagcgccgcccacacccacgccagcaccttgcgcagaggcttgccctctgccagcttgctgtgactgaaggccattgccatgcaggcagagctctggcagtggatggaggggcagacgttcacggcggcgtccgccttccacagcagctgcatgatccgcagcgccgggttatcccggccaagagtctccacggcaggacgcagttccagcccgttgggcaggatcatgtacacgatcaggcagaaggtcatgccggaaaacatggtcatgcaaagtttatcatagctggcggtatcgcaccaccacagtgccgccgtcacccccgccagcagcagaaaccagctgcaataggggagcacaaaccactcgttaaaggggatcagatcgtccagcgggctgtgcaggatatatttcggggcggtgacggtgaggtccagccagaagaaccagatcaggtacaccacccagtacagctggtaccacaaatgcgggcggcaccggctgcgcagttggctaagtttcatgtcgtttctcctattttttatgtgaattgacgtgttattatagcacattccgtccacttgcgcaaatgttttccctgcgatacaataaaaacaagctgcatcttatttataaaaggagtacgtcatgccacaagaattttccgccatccgtctggtcgcgctggatctggacggcaccctgctgaaccgcgaggggcacgtcaccccccgcacccgcgccgctctgcaagctgctgtggataaaggcgtgtacatcgtgcccgccaccggccgaccgctggccagtctgccgccggaggtggcgcagctgcccggcatccgctacgtcatcacctgcaacggtgccgccgtgtgggatttgggcaccgaccccgtgggcgcagtgtacagccgctattccaacgcaaaagagcaccgcaccagcaccccggtctgcctgctgcacagcctgatgccggtggagactgcccgcgaggcctttgccgtctgcgagagctgccacgccgacctgcgcattttctcggacggatacgcctgcaccgatgcccgcagcattgcgctggccgctgcccgggcagcaaagaaggacggcaccgaagcgtgccagcccaacgatggccgctttaccattctgcgggacgcagccgagtggatgagccgcaacgcctttgccattgaaaagctctgcgtgttttttgaaaccccgcagcaggctgcggccgcgctgccccgcttccgcgccgtcccgggcgtggagatcgtacaggggtcgccgaaaaacgtggaggtgaccgccgccggtgtggacaagggcgaggcgctgcgcgcactggccgaccggctgggcgtcccgcacgaatgcacccttgcggtgggcgacagcgagaacgaccgcgccatgctgcaaaaggccggggtagccgctgtaatggccaacggcatgccggagatccgggcactggcgcaccttgtcagcaaagccgactgcgaccacgacggcgtggccgagatactggaaacccttggcatctgagccagtttttgcagcaattttccagcatttttaccggcatttgccccgatttttcgggtcattcgtcatttttgtgcaatgtatacaagctcttatgcaaaacattgtgcttgttgagtattaccaaagacgggctgttcgtttatactagtactataagcgcgtatgggggtattgcgcccactggagcaaacccgacgcaccaagagagttcaaatataaaaggagaaatgcgttatgaatcccatcgtagaaaaggtctatcagatcggcattatccctgttatcgctttcaacagcgttgatgaggccctgcccctgtgcaaggctctggctgagggcggtctgcccgcagctgaggtcaccttccgcactgcctgtgctgaagagtgcatccgcaagatccacgaggagatgcccgagatgctgctgggtgccggcaccgttctgacctgcgagcaggccgaccgtgctatggctgccggtgcttccttcatcgttgctcccggcttcgaccccgaggtctgcaagcacgtcatcgacaagggcggcatcatgatgcccggcacctgctccgcaggcgagatgcagcaggccatgaacatgggctgcgaggctctgaagttcttccccgctgaggcaaacggcggcgtgggcatgctgaagaacatcggcgctgccctgaagggcgctcgctggatgtgcaccggcggtgtcaacgccaagaacgtcaacgattatctgggctatgaccagatctttgccgtgggcggcacctggatgtgcaagagcgatgtgatcaaggccggcgactgggcaaagatcaccgcacagagcaaggaagctgttgacaccatgctgggcctgaagctgctgcatgtcggtatcaacaccggcaacgaggaagaggccatgaaggtggctaacctgatcggcgctatgctgaacatgaaggtcgctcccggcaactccagcatctttgtcggcaacaaggagttcgagatcatgaagaagcccggccgcggcaccaatggccacatcgccatcggctgcaataacgtggaccgcgccatctatcacctgtctcagcgcggcgtgaagttcgatctggacagcaagaacgtgaagaacggcaagaccgttgcctgctacatggcagacgagatcgccggctttgccttccatctggtgcaggcataagcgcctgtcccccttttaccgtaaaagccccgccgcagcgggtatgccctgcggcgggatgatgaaacacctgatataaaggagaataaccaatgaaagtcgttacttttggcgaactgatggtccgtctgcagcccttcaactacgagcgtttcgttcaggctaacagcctggagttcagcttcggcggcggcgaggctaacgttgctgtttctctggccaactacggtctggacgcagcttttgttaccaagctgcccgcacacgccatcggtcaggccgctgtcaacagcctgcgccgctacggcgttgataccagcatgatcacccgcggtggtgaccgtgtgggcatctactacaacgagaagggcgcttctcagcgtggttccgtctgcatctacgaccgtgccaacagcgccatccagctggctcagccctccgactttgattgggacaagatcttcgaaggcgtggattggttccacttcaccggcatcaccccggctctgggcgagaacgttgtcgagatctgccgcgaggcctgcaaggctgctaaggctcacggcgtgaagatcagctgcgacctgaactaccgcggcaagctgtggacccgtgagcaggcccgcgctgccatgaccgacctgtgccagtacgttgacgtctgcatctccaacgaggaggacgcaaaggacgtgttcggcatcgaggccgaggctaccgatatctacggcggcaagctgaacgctgagggctacaagagcgttgccaagcagctggctgacaagttccacttcgagaaggtcgctatcaccctgcgtgagagccacagcgcattcgacaacggctggagcgctatgctgtacgatgttgcttccaacgagtactgcttctccaagaagtacgacctgcacatcatcgaccgcgttggcggcggcgactccttcggcggcggcctgatctacagcctgctgaccggcaagagcacccaggaggctgtggagttcgcagttgcagcttccgctctgaagcactccatcgagggcgactacaacatgatgaccgtgtccgaggtcgagaagctggccggcggcgacggttccggccgtatccagcgctaagagcaggagggagtccgccatggatatccgttattcctgcaaccagaaggattttaagcgctataccaccgaggaaatgcgggacgagatgctgatcaccggcctgtataaggcggatgaagtggtggccgtttacagccatgtggaccgtatggtcacgctgggctgcatgccggtgcacgagaccgtgtctatcgacaagggcatcgacatctgggccaacttcggcacccactatttcctggagcgccgcgagatcggcatgttcaacatcggcaaggattccaccggtatcgtggtggccgatggcgtaaagtacgagctgggctacaaggactgcctgtacattacgcagggcaccaaggaagtcacctttgcttccgccgacccggagcatcccgccaagttctacatggtctctgctccggcacactgcgcttaccagacccgtctgatcaagatggccgatgcaaaccaccgcccgctgggcagcgtggacacctgcaacaagcgcaccatcaaccagttcatccacccggatgtgctgaagacctgccagctgagcatgggtatgaccgagctggcaccgggttccaactggaacacgatgcccagccacacccacgagcggcgcatggagatctatacctactttgaactgcccgaggggcaggtggtgttccatatgtgcggcgagcctacccagacccgccacatcgtgatgcacaacgaggatgctgtcatcagcccctcctggagcattcacagcggcgtaggcacctcgaactatacgtttatctgggcaatgggcggcgagaacatggagtttgacgacatggacaacatcgctaccactgacctgcgctaaaagcaccaatcaaacgccccgtaccgggaaaccggcacggggcgttttgctaaaaaattaacttggatactgtgaaaaaaggagaacctcatggatctgtctgcattcaacctgcagggcaaggtggccctgatcaccggcggtgcccacggcatcggtttttccatcgcagagggcatggccaagtgcggcgccgtcatctgcttcaactgctcctctgaggccagcttggagaaaggcatggccgcctacaaggctgccggcatcgacgcccacggctatgtggcagacgtttccgacgaggacgccgtaaacaccatggtggcaaagatcaaggccgaggtcggcccggtggacattctggtaaacaacgccggtctgatgaagcgcgtgcccatgatcgagatgagccacgccgactttatgcgtgtgatcgacgtgcatgtgggcggtgccttcaactgctccaaggccgtgctgcccgacatgatggaaaagcgcgcgggcaagatcatcaacatctgctccatgatgagcgagctgggtcgcgagaccgtctctgcctacgccgccgccaagggcgcgctgaagatgctgaccaagaacatcgcctctgagtacggcgagtacaacattcagtgcaacggcatgggccccggctacattgccaccgcccagaccgcgcccctgcgcgagcgtcagccggacggcagccgtcatccctttgaccagttcatcgttgccaagacccccgcgggccgctggggcgacccggaggacatggttggcccctgcgtgttccttgccagccacgcatccgacttcgtgaacggccagatcctctacgccgacggcggcattctggcctatatcggccgccagcctaagtaaatcctgaaaaaaatccccccggcgctgctcgccgaggggattttttataggcaaattagacgattttaaatgcgctccgcttcgctctgcgcataatcagcg

SEQ ID NO: 13788 - DNA, 4992 bp, Unknown
  gut microbiota DNA sequence
tcctttgtcctgaaattgaatcgtatcaaatcacactctgctccagccagctgccccggcggaagcgcaggtagaagcacagcgagcggaacacccagtccagatacatgcccatccagatgctcagaagcccgccgccgaagcagagcactgccagatagcagaagcccacccggaacgcccacatggacacgatgctcacggtcatggtaaaccgggcgtcaccggcggcgcgcaggatattgggcagagtaaagctggacggccacacgaacagggaaacgatgttgaaccacaccatgatgtccagcgccatggcctgcgcttccggcgaaaggttgaacaaagacaccgcgaaccggttggcgaagaagaaggccgaaaggttcatcacccacgcgccgcagtaggcggtcagcatcaggcggcgggagtagtacaccgcctgctccttttcgcccgcgcccagacactggcctaccacggtcagggcagccatgcccacggcgttggcggggatgttcaggaaagtggtggtggtattggctaccgcgttggcggcaatggcagccgtgccaagggtggaggtcaggctggagaccgacagcttgccgatctggaacatgccgttctcgataccggcggggatgcccacccgcaggatgcgccggatcagcccgccgttcggagccatcgcccgcaggctgtccacccgcagggcgcagcccggcttttgcagcagatacagcaccactgcgcaggcaatggcgcgggacacaaggcttgccagcgccgcgcccatgacccccatgccgaagccgtagatcagcaccgcgttgccgccgatgttcaccacgttcatcaccagactggacagcatgctgatcttgctgttgccttgtgcccggaacagggccgcaccggcgttgtacaggccaatgaaggggtagctcagcgccgaaagcagaaaataggtctcggcgtagtgcatcacgtccgcatcaatggagccgaagatgccccgcaggatggcgtgccgcccaccgatgaccaccgccgccaccagcacactgaaactggacagcacgaataaaatctgcgccgccgccgccttggcgtttttcggctcctgatggccgatgtactggctggtgaccaccgcgccgccggtggccagtgcgctcatgatctggatcatcagggtgttgaagctgtccacaaggcttacgccggacacggcggcttcgcccaccgaggacaccatcaaagtgtccgccagaccgatggtcacgcttaacgcctgctccgcgatcagcggcagcagcagcgccaccagcgcctgccgtggaaacaggggagtggatgtgaatttggacgatttcatgctgtcctccgttgcaaatgacaaaaaagctcgaatgcttctatcatacagcggaagctgtcgaaatgcaagaggttgtatacaagaaagtgccaaaaagcaacagcccgccgcgctgtgcgccctttacccatgggcacagttgtgttaaaataaggttgcagcccgccccgctgtgcaggagaggggcgctgttttggtaaatgataagatatatgataagaagttgaggacccataagggggtaaagtatgcagcaaactgcgcataaggtcgttgtcatcggacatcgcaacccggacaccgactccatctgctctgccattgcctatgcagagctgaaaaacaagaccagcgatctggtttgcgaggcccggcgtgcgggcaagatgaatcaggaaacggaatttgtgctgaaaaagttcggggtcacgccgccccggatgtgcaccgacgtcaaccctaaaattcgggatgtggattaccggcaggtgcccggcatccccggctccaccagcctgcgcaaggcgtgggagatcatgcgcgaccagaagatcgacaccctccccgtgaccagcgaggatgacgaattgcagggcgtcatcacggtgaaggatatcgccaccgccaacatggacctgttcgacaccggcatccttgccaagagccgcaccagctaccgcaatattctggaaacgctgggcgctaccatggtggtgggcagtgaggacgcagtgtgcaccaccggccacatccgcattggcaccgccaccccggaaatgctggaaagcagcatggaaaagggtgatatcgtcatcctgaccaaccgctacgaaagccagctctgcgccatcgagaaggaagcttctctcatcatcatctgcaacggcgcaaaggtgggccgcaccatccagcatatcgccgccgagaccggcgtagccattatgagcgccccctgcgatacctacgcggcggcaaagctcatcagccagtgcgcgcccatctcctattacatgacccgggacgatatcatgaagttcaccctcgtcaccccggtggcagacgtcacccgtgtgatggcaaaggtgcgtcaccggtatttccccattctggatgcagacggcaagtactgcggcatgatcagccgccgcaacatcatcaacctgcgcaagcgccgcatcattctggtggaccacaacgaggccacacaggcggtggagggctttgatcaggccgagattctggagatcatcgaccaccaccgcatcggcagtctggagaccagcggcccggtgtatttccgcaaccagccagtgggctgcaccgccaccatcgtcacccagatgtacgatgaaaacggcgtgaccatcccgcaaaagaccgccggtctgctgctggccgccatcctgtcggatacgctggtgttccgcagccccacctgcacccccgttgacgtgaacgccgccaaccgtctggcaaagatcgccggggtggacatcaacgagtttgccaacgaaatgtttgaagccggcgaaaagctggacggcaagaccgccgaggaagtgttcttgcaggactttaaggtgttcatgtgcggtgatatccgctttggtgtggcgcagggcagctatatgacccgcaagaacctgaccgccgccgaggcgctgttgaagccctatctcgaggaggcacgcaacaagcagaacgtggaggacatctatatgctgctgaccgacgtgcccaaggaggagagcgtggtcatctgcaacggacgctacgccgccgaggtgctgacggatggcttcgacacccagcccgccgccgatgccagctggacgctgccgggcgtggtgagccgcaaaaagcagttcattcccgccctgatgaccgcttatcaggagttgtaaagggacactgccgtgtttgattttctttccaaaaaggatcgcaccccgcccgcactgccggaaggcacggagcggcggcgctacaccatcaccggacaggtgcagggggtgggtttccgctatcgtgcgcggtacgccgcgcagacccttgacctgaccggctgggtgcagaacgaggacgatggcagcgtgacgctggaggtgcagggcgacccggataaattcatctccctgtttgccatgatccagaaaagcgactatatccaaattaccggcatccgtagcaagaatatcccgcccgacccgtgggagcgcgggttctcggtgaagggatattaaaggaactgaatagaaacaaagcgcctgacaccgcagtgtcaggcgctctgttttatcatattatattttcaccccagcaccttgaggggggagttttccacccacagggtattgtccagcaggcgggtgacggcaagccgtccatttgccgttacccgggcggggtcgagggcgtagaagtcgctctcggtcaggttttccgggtcggcggtgggggagatgcccgccacgcatacccagtgtccgtaggtgctgctggtggcaatgtgggggtagttcacctcgctccagccggaggaagtcaggtggtattcataagtagaggtgcggttcgtgtggcgctttaccccgctgaccgtggtgtttttcaggtgcacgatcaccggatgcccggcggaaagttcgctgtacagctttttcaggcactcggcgcgggtgccggagtacccggtgtagcccgctgcggaccacaccgcaccgttcgaccacatcccgctgccggagcacaccttgccgtccagaatggtgcgggcatagcgcagcgcgtacaggctgcacttgccggaagtctggttgccgatggaaagaatgtggctggtgtcgaagctgagcagccggatgccgtttttctctttcagttcagcggcgtgggcacggggcaaaaaggcgcacagcagcaaaaccagcgccagaactgccgccgccagccgctgtgccgcgcgggcgggacagtgttgcatgggtacttcctccaagttcgtttcaatctggacatgattttaccactaaaacgtggtgaaaatgtgtaaaaaggcaaaataatggggctctctccccgagggagctggcgcggcacaagccgcgtctgagggagttaataccgctaacacaacatatgtccaaatttaagtgctcccgcacccggcaaaaccgcgccgccggggcagggaaacggagattccgtagattgtcgacaaaattgatcccagaacataccagaactgcaacaaatcccgcttattttcatcattttcacgaaactgcttcaggaagtttagcgatattcccgattgacaaaaccgtcaggcgtcggatataatcagggcagaaaggcaacgatggttgcgaaagcctttcgagaaaaaagaaacatatccacaaaaaacgctgattggagggatacccctatgaagaaactgtcaaagatcgtcgctctgctgcttgcaggcgcaatggctatggtgatgctcactgcctgttccggcggcggcaacactggcagcatgaaagaggacacaacggctgaggataaggtcctgggcaagtacagcaccagcactgcaagcgtagataataacaaag

SEQ ID NO: 13789 - DNA, 33855 bp, Unknown
  gut microbiota DNA sequence
agaaaaacggcctgaacgtgaaggaactgtgcgagatgaacaccggctttaccgccaacggggaaaacggcctgacccagaactccaagatcctgcccggcgatgcactgaccgtggtgcgggaggaggagacgctggaggtgcgcatcaccaaggtggaaagctgggaggaagagatcgcctacaccaccgagaccaccaagtccaaagagctgaactccggtaccaagcgcgttacccagaagggcgagaacggcatccgcaccgtgacggcacagcgggtgtacgatgcaaacggcaatcagctttcccagcagattttgagcactgtggtgaccaaggagcctgtgactgaaaaagttacggtgggcaccaaaaaggtgtcctccggtgcatcctatatcaccggcagcggacggttcatctggccggtgcccggctatcggaactgctcccgctggtacggcggcagccacaagggcgtggatatctgcgccgccgccggtacgcccatttacgcttcggcaggcggtacggtgaccaaggccggctataaccgcgccggtgcgggtacaggctacggcaactccatcatcatcagccacggcaacggctacaccaccttgtacgcccactgcctgtcgctggtggtgcacgccggtcagtcggtcaagcagggtcagctcatcggctatgtgggcagcaccggacgttccagcggcaaccactgccacttcgagatccggcgcaacggctcttacatcgcaccgcagaacgtgttcaaccgcagcaaatatcggtaaatagcagcaagggcttttccgcagggggaaagcccctctgctgtatcatgaataaaaaggagagatcatctatgtctacccctcacatcagcgcagaaatgggcgatttcgccaagacagtccttatgccgggtgaccccctgcgtgccaaatttattgccgacacctttttgcaggatgtccggcaggtgactggcgtgcgcgggatgctgggctttaccggcacctacgaaggccgccccatcagcgtgatgggcagcggtatggggatgccctccatcggcatctactcctacgagctgttcaacttctacggcgtggaaaatatcatccgcatcggttctgctggcagctataccgagaaggccaagctgtttgacaccgtgctggctaccggtgctgtgagcgagagcaactacgcccgggtgcagagcggctttaccggcaacatcaccctgcccagcgcagccctgaacgaaaagctgcgtgcctccgctgcaaagcagggcattcccctgatcgagggcaacatccattcctcggatgtgttctaccgccagccctcggacgcaaagcccacctactgggaaaagttgcgggacgaggacggctgcctgtgcgtggagatggaaagctttgctctgtttgccaacgcgcaggtgctgggcaagaacgccgcctgcctgctgaccatctcggacagctttgtggcccccggcattaccaccgccgaggagcgccagaagagctttaccgacatgatgaaggtcgctctgggcgcagagtactgatcgcataactttccagcgcggctgccgccccaaggcacagccgcgctgtttttgcccgtaaaaggaggaaacagcatgacgaaactgaccatggaagaaaaacagcagctgatccgcatggcactggccgcacgggaaaaggcctatgcgccttacagtgattttatggtgggcgctgcactgcgcgctgcggatggccgcatctttaccggctgcaacgtggagaacgccgcctttacccccaccagctgcgccgagcgcaccgccctgttcaaggcggtggcggaaggtgtgaccgcgtttacggatattgcggtggtgggcagccgccggggcgaagtgaaccggcagatcacctcgccctgcggggtgtgccgtcaggcactattcgagtttggcgggccggagctgaacgtcattatggcaaagaccccggaggacttcattgagcgcagcatggacgagctgctgcccttcggctttggcccctccaacgtggcgggcaacagcgccgtggaaggaaagtaactgtccttctgcgaaaaacagcgcaagcaggggaaatttggtgaataagcattacttttttataaattatacaagggatttgtaaagaatttgtaatcggaaattgcttgcatctgtcacttccacccgctatacttgagccagtagatgtgccagagtgcacatttcattcatttgacgcaattttttaaaataaaaggagagtttcttatgaagatttctcgtcgtaactttctggctgtggccggtgctgctgccgctgccgctgctctgaccgcctgcggcggttcctccgcttcctctaccagcactgcttcttccgcagctgccagctcttccgccgcttccggcgcagcagacggcgctgagaagatcgctaaggtcgctctgacctgcgatactggcacgatcgatgatgagagcttcaaccaggcttgctgggctgctgtttccagctacatgggcgacaactgccagtactacatccccgattccgatgcttccgatgaggatcgcgagaccatgatccgtcaggctgtcaacgacggcgccgacgttatcgtctgcgttggctacctgtacggcgcatctctggcatgggctgctgagcagtaccccgacatcaagttcatcgcgatcgatgtgacccagggcgatatcggcaccgacagcatccccgccaactgctactgcatcaccttcaaggaggagcaggcaggctatctggcaggctacgccgttgttaaggacggctacaccaagctgggcttcctgggcggcatggctgtgcccgccgttatccgttacggctacggctatgtgcagggcgctgacgctgctgcaaaggagctgggcaccaacattgacatcaactacttctacggcggccagttctacggcgatgccaacatcacctcccgtatggagggctggtatgccaacggcacccagatcgtctttgcctgcggcggcggcatctacacttccgctgtcgaggctgctctgaagaacaacggctacgttgtgggcgttgacgttgaccagaactacatcggtgctaatggcgttgagaaggacggctacgcttacaacccgttcatcacctctgccatgaagggcctgtctgagtctgtcagcaccgctctgggcgacatcgaggccggcgagtggagcaacatcgctgctaccaacggtaacttcggtctggaggatggcgactatgttggtctgcccactgctgatgacagctggaacttcaagaccttcaccaaggacgagtacgagaccctgaagagcaagatcgcttccggcgagctcgttgtggacaacagctctgacgacgctaccaagcccaccgtcagcgagttcaccaaggtcaactacatccagtaatcgctatcccggaattactcccgtaataggggcggggtgctcatgcaggggcaccccgccctttttgtatgcctgtgtgggagaaacaggtaggaaatcatgcagaccgtacaaaagtaatacttttacttgtgctttttgacaaaaaatcaaaaagccgtgtgcaaactgcaaaaaatcaggtataatgggttgtagtatagaaaaaggtgtcgttacggcacgaaaggagagtgagcagattggcagaggattatgtgatcgagatgctccacattaccaaggaattccccggtatcaaggcaaacgatgatatcaccctgcaactgcgcaagggcgaggtacacgcccttctgggcgagaacggtgcgggcaaaagtacgctgatgagcgtgctgttcggcctgtatcagccggaacagggcaagatcctgaaaaacggcaaggaggttgccatccgcaaccccaacgatgccaacgcactgggcatcggcatggtgcaccagcatttcaagctggtggaatgcttcagcgtgctggacaacatcattctgggcgttgagcccaacaagatgggctttttgcagaaggccgaggcacgcaaaaaggtgatggcgctgagcaaaaagtacggcctgcgggtggacccggacgccctggtcagcgatatctcggtgggtatgcagcagcgcgtagagatcctgaagatgctgtaccgcgacaacgagatcctgatctttgacgagcccaccgctgtgttgaccccgcaggagatcgacgaactgatggagatcatgcgcgggttcaagaaggagggcaagtccatcctgttcatcacccataagctcaacgagatcatggctgtggccgaccgctgcaccgtgctgcgcaagggcaagtatatgggcacggtggatatcaagggtaccaccaaggaagagctttcccgccgcatggtgggccgtgacgtgcagctgcaggtagaaaagcagcccgcgcaccccggcgagactgtgctggacgtggaaaacgttaccatccacaacgaccagcgcaagaaggatgtggtgaaggacgtgtccttcaaggtgcacgcaggcgagatcgtctgtctggcgggcatcgagggcaacggccagaccgagttcatctacggcctgaccggcctgagcaagctgtctagcggcaagcttacgctggacggcaaggatatcacccacgagagcatccgccagcgcgccaaggacggcatgggtcacatcccggaggaccgccacaagcacggtcttgtgctggatttcagtctggaaaacaacatcgtgctgcagcgctactggcagccggagttccagaagggtggctttatccgtgccgataaggtgcgcgagtactctgaccggctgattgagcagtacgacgtgcgcagcggtcagggcagtttgaccaccgtgcgcagtatgtccggcggcaaccagcagaaggccatcattgcccgcgagatcgaccgcgaccccaagctgctggtggcagtgcagcctacccgtggtctggacgtgggtgccattgagtacatccaccgccagatcgtggccgagcgcgacaagggcaaggccgtgctgctggtcagcttggagctggacgaggtgatgaacctttctgaccgcatccttgtaatgtacgagggcgagatcgtgggcgagtttgaccccaagaccaccaccgtgcaggagctgggtctgtatatggcaggcgcccgcaagcagggaaaggaggagcagtaacacatgaataagaaaaaactttcccgcagcggcagcctgcaaagctctgttaccagcgtgctggctgcactgctgtgcatcctgattggtttgctggtgggctttctggtgctggtagccatcaaccccgcacacgcatggggcgatggctttgtgcgcatcatcaagggcggtttccacgatgccccctacggcgtgggcaaggagcttgccaatgccgcacccctgattatgaccggtctgtccgtggcctttgccttcaagaccggcctgttcaacatcggtgcagccggtcagtatacgctgggcgcttacggtgcgctgtactgcgccattatgctcaagctgccctggttcgtctgcctgctggcagcagcggtgctgggcgggttgtggggcgcgatccccggctttttcaaggcctacttcaacatcaacgaggtcattacctccatcatgttcaactggatcggcctgtatctggtaaatgaactcatctaccagaacggcaccggccccatgtacgacgtgcgcaacacccgtactttgaacctgagcaaaaacgccgattttgcccagtccctgatcccggacttcggcctgaacaagctgttccagaccaatagcaccaccattgccatcttcttggcggcagcggtggccgtgctgatctgggtggtgctgaacaagaccaccttcggctacgagctcaaggccgttggcctgaacaagaacgccgcccgttacgccggtatcaacgagaagaagaacatcatcctctccatggccattgccggtgcgctggcaggcttcggcgcaggtttgttctatctgtccaacgtgtcccagtggaacccgctgaactccaccagcctgccgggcatgggcttcaacggtatctcggtggcactgctggcaagctccaaccccattggcaccgtgttctctgcgctgttcatctcccatatctcggtcggcggctccttcctgtccaccaagttttaccccactgagatctcggatctgatcagcggcatcatcatctatctgtgcgcattctccatgctgttccgcggcaagatccagagcctgctgttccggaatgccgaaaagaccaatgtgaacgcagagcctgcgcctgccgcagaaaagaccaaaaaggagggcaagtaatatgctgcttctgatcaaatataccctgctgtacggtatcgtgctgatgctggtggcactgggcggtatgttcagcgaacactccggtatcatcaacattgcactggagggcatcatggtcatcggcggtgtggccggtgtgcttaccctgaccatgctgcctgcaagcctgtcgcccttccttgtggtgctgatctccattctggtggcagcgctggcgggcgtgatctacagcctgctgctggcctttgcctccatcaacctgaaggcggaccagaccatcggcggcacggcactgaacctgctggctaccgccattgccgtggtcatctccaagtacttcagcgagagcggcagcgccaagctgaactactccaacaagcccttcctgttcagcatcggcggactggaactcagcgtgttcgtgccgctggggctgatcttgctggtggtcagctacatcgtgctgtataaaacccgcttcggcctgcgtctgcgtgcctgcggcgagcacccgcaggctgcggactcggtgggcatcaacgtttacaagatgcgttacgccggtgtgatcctttccggtgcgctgggcgccgtcggcggtctggcgtatatcgtgcccccggtgcagacctggaactttgaagtcggcgtggccggtgcaggctttctggcactggcagttatgatttttggccagtggaagcctttccacatctttggcgcggccatgttctttgccgtgttcaagagccttgccaatattgcagactccaccttccttgcgcagctgcactggtccagcaacatctataatatgatgccctttgtggcctccatggtcattctggccttcacctccaagaacagcatggcacccaaggccgagggtatcccctacgataagggctcccgctaagcgtattcgctaaaaatccgtaaaacgaaggcatccgcagccatccatgtgctgcggatgccttttttgtacggggcagggcatattttgtccatatatttgccggcagaaaatggcatttgctgcttgtaaaatacaacaagatgtgctatcattataaaacgaatgtgtatctataggaacccggtgtacatttcttgcactgcggaaaacaagaaaggtgagtttcgctattatggacgaaaaagcaactatgggacagtcgctccggagcacggaggacgaggagaccattgatctgatggaactggcccgcctgctgtgggcgcatgccgtgcagatcgtggcagcagctgttgcggcagcgctgatctgcctgctggtgtgcgtgtttgcgcttacacccaagtaccaggcctctatcaacatgatcgtgaatacccggcaggataactcctccacctttaccagtgataacttcaattctgccaagaacctgatcagcacctatgcggtcatcatcaagggcaacaccgtgctgaacgaggtgatcgacaaactggatctggatatgacctacaccgagctgtacgacatggtggatgttgccgatgtggacgctacccagatcatgaagatcacggtcaccgatacggatgcagagcgtgcgggtgagatcgcacagaccattgccgacatcgtgcccgacgtgctggtggaaaaggtggaagccggttcctgcaaggcggtgagcgatgtgatcatcgatcccaacaaggtgttcccccagactacgaagtacgttgtgctggccggcctgctgggtgctgtgctggtgtgcggcattctggtgctggcacatctgctgcatgataccgttgtggatgacgaagatgttcagaagaagctcggcctgcccgtgctgggcctgatcccggaggtgtaagacgatgtggaatctgtttggtaaaaagaaaaaagaaggtgagcaccgcaccctgcagctgatcaccgataaaaagatgccctttggctatgtggaagcctacaagtctctgcgcaccaatctggactttatggcaggctccatggacgtgcacacgctggtcatcaccagtaccgtgccggaagagtccaagagtaacgtggcggtcaatctggcgctgacgctggccgaaagcggcaaaaaggtggctctggtggactgcgacctgcgcaagccggtgctgcaccgctatctgaaggccggtcacaacgtaaagggcgtttccaacgtgctgtccaaccagtgcacgctggacgaggcgctgcatgaactgaaggaaatgaatctgaccttcctgcccgccggtaccccgccgccgaacccctctgagatgctgagccagccgcagatgcaggccatggtggatgccctgcgggaaaagttcgattttgtcatccttgatgcacccccggtgtccgtggtcaccgatgcagccgtcatcggccgctatgtggacggcgcaatgttcgttgtgcgctcggactacgcccccgccgatgcagtgcgcggcgcagtgaaaaagctgcaggatgccggtgtccgggtgctgggcagcgtgctgacccgctacgacatgaagaaggcactcaagggctccagctacgcatacagctatgcttacaactacaactatgcctacggcaagcaggatgccactgccggtaaataataaggaagcactgctatgaccgatctgcattgtcacattctgcccggcatggatgacggcgcaaaggatacaacagtctcgctggagctgctgcgcagggaatacgaggatggtgtgcgcaatattgcgttcaccagccacttcaacagcgagcgtaccacagtggaagcctttacggcaaagcggcagactgcctttgaacagctgaccgcagcgctggaggggcagcccatgcagtttgatttcaaactgggggcggaggtgttcttctcgcccggcctgtgcgagctggacacccgggcactgtgcatgggggacaccgcttatctgctgctggaattccccaccacccacaagccgcattttatccggcagaccctgtacaatctgcagcagcagggcatcgtgccgctgatcgcgcatatcgagcgctacccctatgtgctggaggatcccaccctgctgtacgactgggtagccgccggtgcctatgcgcagatcaacgcaggagcactgctggagcctaagctctgcaaaaagttgtgtaagttcatccagtggggattggttcatgtcatctccaccgacacccattccccggacaagcgcccgccccgcatggcacagggagtgcagcggctggaagagctgctgggcaaggaaactgctgcccgcatcgtgcgcaacggcgatgaactgttccacgatcaggaactggacgctgtgaccctgcatcagcccaaaaagtttttgggcatgtgggtctgatcctaaagtaaggagaaaactgcccgggcagagaattactctgcccgggcagcggatttcagtatgaagaaaaataaggtcctgaaaatcgtgttgatcgtgctgggcgcgctggtggctctgctggcagcagctgttcttggcgtgctgttctacctccacagtatggcagccggtattcctgaaaccctgccggatgccccggcggacagcacacaggtcaccctgacggatgatgagatcgataagctgctcagtggtgagatcacgctggaggaactggcagatgaagccgccgcgtccggcagcggggaacaggagtcatccgccagcgctccgcagcaggagacaggtgcggcttcctccccggcaggttcttctgcttcttcggggagcgctgcctcccggacggagagcagcagtacagcgtcctccagcaagcaggagactgccggtacagccaattccggtacaaaaaaaccgtcgtcctcctccggcaaacaggaggccggctacgaggccgaggttaaggcgctgctgaagcagctgtacagcgtcaaagcgcgcgccgaggcagagctgaacagctgcattgccggagcaaaggcagagttcaaatcgctgccagagtctcagcagacacaggcgcgcaagatctccatcgtgctggccagaagcggcagactgtacgcgatgcaggcgtcctacgacagggaagtggagagcatcgtcagccagatgcgtgccattctgaccgccaacggccagagcactgcactggcggatcaggcgatggcctcctataaagcacaaaaaagcgccatgtactcccagctgaccgcaaaactgtactcctgacccgcaaaacgacccatgaccacccgcagcacatctcccgggcactgactgtgccggaaaggggctgcgggtggctttgttttgcctttttgctgtaatatggagaaaaatgccaaggacatggagggatgactctacggcagagacgctgccttttacgccgacaggggagggcggattgtacgcaccaacggaacaatcccccaaaaggtcggaaaagtagcacttttacctacaaatatacaggaaatttgtataaagtataagatttcactcatgctttgctataatgaagtgaattcttttcatgtaaattgacaaaaatcgtggttatccttataatagatagagtgtttctcgggtatggacgatggtgtttgtgcaaccgcaagatgccatcgttttattattcgcttttctgtccgcgtgccaaggacagacgtccgctatgtgtgaggctggcggactgcgggaaagtgtggctcggcctgagagcaaaaacagtaattcattgataggattggagtggcatcaaacgatggcaaagtacatcatcaagcgtgtcgcaatgggtatcttcagtatcttcattgtggctacggttaccttttttgtcatgaacttggtccccggtggcccgttcgtggcagaaaagtccatcagtgccgctgctcagcaggctctggccgaaaagtatggccttgataagccgctgagtgtgcagtacgtcaactacatgaagagccttttgcacggcgatctgggtctgagcctgcgtcagcgcggacgtaccgtgaaccagatcattgccagcaagctgccggtgtcctgccgtctggcaggcattgccgtggtggtggctctgtgcgtgggcatcccgctgggctgcatttccgcttacaaccgcggtaagtggctggataacgttattatcgtgtttgcaacctgtggcatcgcgatccccagctttatttccagcgtgctgctattgtaccagtttggtatgaaaatgaaggtgctgcccaccgttggcctgaacagcgccgccgcctatatcatgccggtcactgcactggccatctatccctcggcttatatcacccgtttgatgcgctccagcctgctggacgttatgggtcaggactatatgcgcactgcccgcgcaaagggcgtgtcccagttcatgatcctgttcaagcacgcactgcgcaacgccattctgcctgtcatcacctacgtcggccccatgctggccagcctgatgaccggttctttcgtggtggaaaagatcttctctgtgcccggtctgggccgcgacttcgtgtctgccattaccaaccgtgactacaccatgatcatgggcaccaccatcctgctgtccagcatggtcatcattgcaaacgtggtcgtggatatcctttataagatcattgacccgcgcatcaagctgcagtaagagaaaggagcgattttcatggaaaacatcaaaaagaatccgctcagcctgcagctcaacgcggaggattttctgcccgccagcaatgaggaaaagcagagcctggtggtcatgcgcgaaagcgtcaacttctggaaggacggtatccgccgcctgaagaagaacaagatcgccatggtcagctttgtgttcatcattgccattgccatctttgcctacctgctgcccgccgtctggccttacagctactccgagcagatgaagggcagcaacaacctgaagcctttcgagtactctgcctccgagcaggcgcgtatcgatgcaggcgaaaaggtgttcccgcacattctgggcaccgaccgcatgggacgtgacttcgctgtgcgtatcatgatgggcacccgcgtcagcctgtccgtcggtctgatcgcctctgtgctggtgctgatcatcggcgctacctatggtgcggttgcggcctttgccggcggctgggtggacaatatcatgatgcgtattacagatatcctgtacaccatccccgatattctgctgatcatcctgctgggcatggctctgaaagatccgctggatgcactggctaccaagcctggcttcaagtggatgcagacccttggccccaacatgatctccatcttcatcatctttgctctgctgtactgggtcggcatggcgcgtatcgtccgcagccagatcctgatcctgaaggagagcgagtacgttaccgctgcccgcgcactgggcgcttccagcggccgtatcatcaaaaagcatctgctcaccaactgcatcggcaccctgatcgttaccaccaccctgcagatcccggcttccatcttcaccgagagctacctgagctttatcggtctgggcgttgcagccccgctgccttctctgggttctctggctaccgatgccgtcaagggcatgaacacctacccccatctgctgatcgcccccgcactgatgatcagcgtgatgatccttgtgttcaacctgttcggcgatggcctgcgcgatgcctttgacccgaagctgaagaattgatgaggtgaacagaaatgagcgagaaaattcttgatatcaaagatgaacgcctttctttcttcacccctgcgggcgaagtaaaggcactgaacggcgtttcctttaccatgaatcagggcgatgttctgggcgttgtgggtgagtccggctccggtaagtcggtcaccgcttactccgttatgggtctgaccgcttaccccggcaagttggtgggcggcaaggtgtggttcaacggccacgagatcgagaacatgaaggagaaggacttccgcaagatccgcggcaacgaggtctccatcatctttcaggatcccatgaccagcctgaacccggtgtacaccatcggcaaccagatcgtggaggtcatccgcctgcacaccgataagaacaaggccgatgcatgggcacgtgccaaggagctgctggagctggttggcatcaatgagcctgagaagcgtctgaggcagtacccccacgagctgtccggcggtatgcgtcagcgcgtgatgatcgccattgcactggcctgtgagcccaagctgctgatcgccgacgaacccaccaccgcactggacgtgaccattcaggcacagatccttgagctgatgcaggacctgcgcaagaaactgggcatgagcatcatcatgatcacccatgatctgggcgttgtggcatccatgtgcgagaagatcgccgtcatgtacgccggccacatcgtggagtacggcaccaccgacgagatcttttaccagccgggtcacgagtacaccaagggcctgatcaactccatccccaagctgaacaccgcagagcacgagcgccttgtgcccatcgagggtacccctgtggacctgctgaatccgccggcaggctgcccctttgcgccccgctgcaagaactgcatgaagatctgtctgagcaagatgcccccgcgcaccgagctcagcgatacccattatacctactgctggctgcagcagaaggctgaatttgagaaaggggaaaaggcagaatgagtgaacacaagacgctggtcgaagtccagcacctgcagcagtatttccccgccggcggtgtgggcaaaaaccgcaagtacgttcaggctgtggatgacgtaagctttgccatccgcaagggcgagacccttggtctggtaggcgagtccggttgtggcaagaccaccaccggccgcaccctgctgcgcctgtacgagcccaccggcggcaagatctactatgacggcaacctgctgttcgataaggacaacaagatcgcagtggatatgctgccctaccgccgccggatgcagatcgtttttcaggatccctacgcaagtctggatccccgcatgaccattggcgacatcgtgggtgagggcattgatatccatcatctggctgagaatgaaaaggaccgccacgataagatcatcgctctgctggagcgcgttggcctgaacagcgagcacgcaaaccgctattgccacgagttctccggcggtcagcgtcagcgcgtgggcattgcccgtgcactggccgtgaaccccgagttcatcgtttgtgacgagcctgtctccgcactggacgtttccattcaggcacaggtcgtcaatatgttcgaggatctgcagcaggagatgggtctgacctacctgttcatcgcccatgacctgagcgttgtcaagcacatctccaaccgcatcggcgtgatgtatctgggcaagatggtggagctggccgacagctacgagctgatcacccacagcatccacccctacacccgcagcctgatttccgctattccggtggcggaccccattacggcccgccagtccaagcgtatcgtgctgcagggcgatgtgcccagccccctgaacccgccgtccggctgccgtttccgcacccgctgcccctatgcagacgagcagtgcgccaacgaggtgcctgagttcaaggaggtctccaccggccactgggcagcctgccatcaccttgaccgcgtgaagtgagaacacttcacaccagtaaaaggtgaaagcaattcaacttagcgctgaaatgttgtcacaaaatggttacagtccaagttttgggcttgtaaccggtatgagaacgcattataatcattcgtgttcctccggtgtacatttgcaccggatcgaatatagaggcggctgggggaacctggcacactcaaatttgatataagggaaggatattattatgaaacgcatttctcgtcgtaatttcctcaaggttgcaggcgtgggtgccgctgctctgggtctggcagcctgtggcggcagcaagtccggttctaccgcaacctccggttctgcttcttccgctgctggttcttctaccggcagtgtcaacaccgctggcttcaccgtccagtacggccccaaccccgagactctggatccctctttgaacagcgctgttgatggcgccaacaccatcatcaccatctttgagcccctgctgatcatcaacgagaacaacgaagttattggtggccaggctgagagctgggaagccagcgaggacggcctgacctggaccttcaccatgcgtgacggcctgaagtggagcgatggcaccgacctgaccgctaaggacttcgagtacaccttcaagcgtatggtcaaccccgacaccgcagctccctacgcagagacctgcctgggcatgatcgatggttttgacgcagctgccggcttccccgatgcagacggcaaccccactgcagagcccaaccccgatgcgctgaacgtcaaggcaagcgacgacggcaagaccctgaccatcgtgctgtcctacccctgctcctacttcgacaagatggctgcattcgcatccatgagccctgtgcagcaggctaccgttgaggccaacggcgatgcatggtgcacctccgctgagaccttcgtctccaacggcccctacatgatcaccgagtggaccccctccgagcgtatcgttctgtccaagaaccccaactacgttggcggctgggatagctctaagatcgtttccgacagcatcaccctgctgctgctggaggactcttccgcttgcttcgctgcttataacagcggcgaggctgtcctgatcaaggacgtgcccaccgacgagatccccagcctgaccaaggcagaggatggcggcgacttctatgttgaccccattctgggcacctattacgtcagcatgaacctgcagcgcgatgccttcaaggatgccaaggtccgcaaggctctggctctggctatcgaccgcgactacgttgccaacaccatcatgcagggcacctactctgctgcttccaacctggtcggccctagcatcgtggacgcgcagggctacttctacgacaacgcaaacggcggttctccctacattgcagctgactacgaggcaaatatggccgaggctaagaagctgctggaagaggctggctatcccaatggcgagggctaccccaccatcgagtacagcaccaacgattccggctaccatgtgcctctggcagagtacctgcagcagacttggggcgatctgggcatcactttgaccatcagcaagatggagtggtctgccttcaccgctgctcgccgtgccggcgagtacgatgttgcccgtaacggctgggtcatggactacaacgatccttccaacatgatcgagctgttctgctccggcaacggcaacaacgatggtaagtactccaaccctgacttcgatgctgctatggaggcttccaaggttgcagatgtcgccgagcactttgcacagctgcacaaggctgaggacatcctgatggaggatatgggctgcatccccgttgcttactacaacgaattctggctgcagagctcttctctgaagggcgtctggcacagcccctacggctactggtacttccagtacggctacatcgaggagtgatttcctccctgtgctgtgcagcgtaagctgaaccgtaaactataagcactgagcaccccgctgaccggaaacggttggcggggtgcttttttgctgttatcctgcaaaaaagacgagtgctcggttttgccgagcactcgtcttttatatgtaaaccagattgaaaaggtaccagcttacaccgtggccatggcggccagaacgctctgccagctcttgctgcgtgcggcagacacaggggcgggacgggtgcgccgtgcagccggggcagtatggcaggccgcagaggataccgtcagggcaggggaggggcaaaagaacacagcagtatcctttgccagccactgcgcagccagtgcagcggcctgcgggtcagattgcagggcacggcgctcgttcccggccaaaaaatctgccagccagtacagaattgcagccagtggcaggcagggggaagcatcctgattccagtaactccagcgtgcgccgtggccaaggtggctttccaccgtgatctgtgcgccggtgcgggcattctgcgggatggagccaacatagttggtcccggcacgctgtcccagttcctctataaggcgctgggtgcgggcagcatccagacgatcctcacggcagtaggcgcggaagtcggtctggctcagcaggctgtcggcgctggacggaaaacgcccggtcaactgcccatccgcattgtggcacagctgccagcccttgcggaacagctggaaattcaggcagcgccgccccatggtggagtagcacacaagggcgctttgctccccgggcagctgttttacttcaagataggcatcgttgccgcaggtatcctgcaaacggacggtaagcagcagctgcgcaccgacgtgctgggtggacatggcgttgtgcatggcgtcaaaataacgggaagcgtccatgattgatctccttcctatagcaattcaactttttaatgcaacagcaacaacgttgaattgcatatcgcaaatatgctgtttgactgttgcactaatttcttgccttgcgataaaagcaaacagcgaaacgttgtaaaagcgccagccgggtgatcgggccgtcaggctgcataaaacttctctgaacgtagtatagcatacttttggatgaaaaacaactgtaagtttttcaaaacaacaaatttttgcaaaaatctacagcgcattgcaaacaaaagttcaaagtatggttgtgcactgagatgtgcggttgtaaaaaatgacccctgcgggagatgccggctaaggccggaactgctcccacaggggtcgttttattttacttcaatcgccaagttcccggatctcgttctggatcagccgtccggcagcgcgggcaagctgatccatgccgcggatgcgtgccatatttttgccgtagatctgcgcggcggcaccggcgctgctgtcctcgcccataaaaacggcagacacccgcacgccctgccgctgtaaggtgcgcacctgcgcggcggtgtcggctacaccggcggcgtcctcgtaggcgcagcccagcgggttctgcgccgtgggcgggatgcggcggctgtcgttggggctggcatcggtcagcaggatcatcaggtggcgcggggcggggccgggggcgtaccggatcaggtcgcccgccgcccgcagcgccagaccgtcccggttccagcccgaggcgaagtagcggaagatattctgccggtttttgtccgcaaagcctttcagcacccgtagtaccgtatagccccgcagactgctgaaggcgcttacccgcaccggaatgccgcagttggccagactttcggccagaataacaccctgcgccgcgatcacttcctgacagtgcaggcgggaggcagaggcgtccagcagcagatccactgtaaaggcggggcagttctcctcctccgggcacaaaaacacccggtcatcgttcaggtaaggggcacgccacacccgcccggcgcacagatcaccgctgcgcgctatccgctggtcgggctgctgatgcaccagaatgcagttgcggatctgctcggtaaggcgcagcaccacgctgcggtgcagctcctgatttttggcatagtaggcgcggttgcgttcggcctgcaattcggcctgctgtgccagctgccgcgcctccggggtgggtgcctgcgccgggctgggtacaccggcgctgaaccacagatgacagcccagatgcaccccggtgcacaacttctgctcggccttgcgcagctgctccggcgggtagaaacagcgcccaaagcagctttcaatgtaggcgcgatcctgcgcggcgcgctgcctcagggtaatgtttgcccggcgcttgtccaccgccagcccgctgcctgtggcatctaccgcaccggaatgttccaccgtcacccggtcggttttgatcatctgggtgggcatggttttggtggcaagctttgcccaaaagccttgcagccgcagatgcagcgcgggcttctggcgtaccttgccgtcaaacagggcgaactttgcaaacagcgccagcagttcgtttttgagctgtgctggttccggtacggtctccggttccagcgcggcggcaaggctgctctcgtaaggggtcatgaccggggcggtgtgtcccagcaccttgcgccagcgcgcagcctgcatggtgtacaccagctggtttttcgccatccactcctgccgcgaaagcttgtactggatggcaaaaaagtagtccgcgtgggcaaaccgcagcgcctccagcaccgggcggcggggcagctccagccgataggcggcgttttctaagtacagccacgccatatcgtccagcatgggctggcgtgtgtcaccctcccaagcggaaaaaatgtcccggatcagcgcgtcaccgtagtatttatgcaccagacctacgatgcagttcatgtaaaaatcaatggtgccgtccgtgttgcgggccagaaacagcggctcaaaaccgtaggctccggcagcggcccagacctgattggccgcgcgccgctcctgcgcggtgtagctttgggcgtccatcaggcaaacagctttccggcatccagcttggccgggatgcgcgcggcgatcacgtcccggatcagcccctgctcgtaggagtcaaaggctttattggtaatgcccatatccagcgccgccccggccgggatgcccctgcggatcagccgcagcgcgtccagcataccgcgcagatccagcgctttggtggaaatctcggcactgtcgcactttttctgcaggtccagaaacagcagtgcaaactggtgcacatattttgccgaaagatccgggaactgcgcccgcagcagcttttccagattatcttgggtgatggtgggcatctgcaccactgcaaagcgggaggtaagcgcctcgttcagctcccgggtacccgcgtagccgtagttcatggtggcgataaaacgggtctcctcggccagcgggatgcgctcgtaaccgggtacgtcgatggcgcggcggaagtccagcaccgcgtgcagcaccgccagcgcctcgtttttggccatgttgatctcgtccagcacgccgaagccgccgcactgtgcgcagcggtacaccggcccgggacggaacactacctgcccgcccgcaaaggtatccatgccaatcagggaggcggcgtccatgtttacatgaaaagagatgtcccatgcggggcggccaaaggcggcggcaaggttttcggccagcacgtttttgccggtggccttgccgccggccagcagcaggttttcgccgcagaggatggccgccagcgcctgctcccacacctctttgccgtagtaggtaaaggcaggggcgggaatgcgcgggcgcagcgcctcgctgagcggatgggcggcgcggtattcctgcaccgccgcaagcagggtggggtctaccccttcctgccgtaaggtatccagaatatccgacatttgtacaaacacctcgatctctgaccgggcgggaatgaactgcccggtttcacgcttatcatagcacaatcgcggccatttgtgtagggggcgtgcggggcaaaaacacaaaaaggggcagccccaaatgggaccgcccctcttcacatgaaaaagaagaaacgcttagagtatgccggagaactgcgctttatcaggcgttctccagacctgccatctgcttgacggatttgatggcaaaggtcagggtgcggcccatagccacaccggccatcaggcaggggtagttgttggcaaagaagctgccggacatatcgccggtgatgtacagaccctccatgggctggttgttggtgtccagagcctgacccttttcgttgatggcgatgccctgctcggtggtcagcagagaagcacccagccagcagccgtagaagggcgcggtgcggatggcgctcagacggtaagcgggcttgccgaagtcctcgtcgttctgcttatcgtacagctcattgtagcgctccacggtggcaaggaaggtgtccttggcagcaccggtaaagcccatcttgtcggccagctcgtccagcgtatcgcacttgaacagtgcaccggcctcgatagcctcgtccatcttgccctgaatgtacttctcgccgccgttacgggtctgggcagagcagccgatggtgtggaagcgctttgcatcctccagaatgttagcatcgcagatctgtgcgtagacgcggcccggctggtgggcggcagcgtagacgatatcgttataggggcagctctcgttggcaaaacgctcgccgttgcggtttaccttcaggaagggctgagtaccggggttgtactggcggatcttaccggggaaagccttgccgccaaaggcggagtcgctgtccacataaccggcatccacaccgggggctacgatgccgcggtcaaacagcatgggagcggcttccttgtccagattagcacctgcccacactgcggcgcggatgccgtagcccttgtcggcgggggagtaggagcaggcagtggtcacgctggtgcccagcgggtccagctgctccatcatgtaggggttgccgggaaaaccgccgcaggccagcagcacgccctgattggcgttatagcggatgaagtggtcatcctcagtgctctgggcgatgatgccggtaatgcggccatcgctgttcttttccagcttggccagactggtcttgaagtccacatcgtagcccagctcctgaatgtactgcagcagcagctcgttgcggggcaggccggaggcactttcgctggccatatagttatgctcctgcacagggtagaggtagtcggtgttgtgctcggcattctctgcgggccatgcagcctcgctgccggaggtgaaatcgcacacccagccgtacttatcttccagaatgctgcgcataaagtcgtgcatggcagcagattcgttgatccaggttttgacaacgcgctggtcgcacttgccggaggcgtagcgggagatctcgctcagcagctttgccttatcggtggcgggttcgccagcttccttagcggcagcagaatcaacagcgccgtaccagtgacgggtgtcctgcacgttggcgttctgctcgataacacggaagttcaggccgttggcagccgcataggcggcagcgaacataccgccattgccagcgcccacgatcaggatgtcggtgtccacggtctcggtgatggcggcctcgtcgatgtcaggctctttgcccagccagtcgttctcatcgccggtgggcagctgcacgctggagaccacggcctcgcccttagcctgtgcgtagcagctcttggcagccttcatcacggcgtcggaggtgatggtagaaccggaaacaccgtcgatctcggcagaaccagcagccagcagctgctcgcgcagctcatcggcagcggcagcgccgaaggaagcggtctcgccggaggtatccaccaccacgtcggtgacagcgctgtcggagaaggtcatagtgaccttgacggtggaggaaataccctcggcagtgccctcgtaggtgccggggatgtactgaccggcagcaccggaagtggaggcagaaccggaagcggaattgcaggcagccagagcaccggcggtcacaccgctcatggcggcggcagcggcgatcttgataaagcccttacgggaaattttgttcataggtacgctctctttctttttgttcttctttgtgttccttcttatcgtgcagcaaagtaaaaggcactttgcggaatccttaacaattgtagcgtagaagggcactatttacaattcgagttttgaatattataattaaggaaaacctaatgtattgcgggagggagaaaagcatgaacgagagcgcactggagggctttgtaaaaatcgtggagctgaacagcttttctgcggcggcagaggcgctgtatctttcccagtcggcactttcgcagcagatccgcacgctggaagggcaattgcagttcgagctgttccaacatgtaccgcgccgggtggctctgaccccggcgggacaggatttttaccccaaggcaaagcagctgatagccctgtatcagcaggcagtgtgccatgcccgcgcagtgcagcagcaggaaaaaccgccggaaagacatctgatcatcgcagggtgtcatgaggcaatgcggatgttcgcatacgacctgttttccctgacaagtgacctgtgcctgcaatatacccctattctggggtggtgtgccaaccgcagcgaggtctggcgcagcctgaaaaaaggggagatggatctttccttccagctggaaagtgcagagttctacgcgcaggggcttacctttgtgccactgttctatatgccggaactttgcatccccatccacccgcccgctgatatgccggtgggcagactgaccttggaacaggcattgcaataccgctggctgcccatcaaggagatgtaccagactgtctacgaaacaagcctgctgcaggagggaatggaccgaggggtggagtttacgccggtgggcggtatccgcagtgcagcctacggcgacccggcactcaagatgatcccgcctttctactaccgcaggccggacctcagttttgtgcgggtactggactggggcagtggacaccggtttggcatcgtgctggggcaaaagcgcgaggacccggtggtaatggcttatgtccgcgcgttgcagcaacagctgccgccccttgcggaaaagctgttcggcttgaagctggaaccggtggaggaataaagaaaaaacggaaaccctctcaggcgcttccgcgccagctctcccgaagggagagctctattacagctgaccggcagatgctgaaaagctccccctttcgggggagctggcatcgcgcagcgatgactgagaggggaatgcaaagagcacctattgccctaaaaaggcaacaggtgctctttttgcagttatattgcgataacaggtgctttaatccacaacatcctcgaactggctgttgtacaggtcggcgtagaagccgccggcctcgatcagctggtcgtgggtgccctgctccacaatgtcgccgtcccgcatgacaaggatgaggtcggcatcccggatggtggaaaggcggtgggcgatgacaaagctggtgcggccctccatcaggcgatccatggcggtctggatgcgctgctcggtgcgggtatccacgctgctggtagcctcgtccagaatcaggatgcggttatctgccagaatggtgcgggcgatggtaagcagctgcttctgtccctgactgacgttggaggcatcctcgttcagctccatctggtagccgccgggcagggtgcggataaagtggtcggcgttggcagcctttgcggcggcgatcacctcttcatcggtggcgtccagtcggccgtagcggatgttctccatgatggtgcccttgaacagccatgtgtcctgcagcaccatgccaaagccctcgcgcagggcgctgcggtcaaagtcccgcacattgtggccgttcagggtgatggaaccggaatccacatcgtagaagcgcatcagcagcttgaccatggtggtcttgcccgcgccggtggggcctacgatggctaccttctggccgggctgcaccgtgcagctgaagtcgtggatgacggtcttgtccggggtgtagccgaagcgcacatggtcaaaggtgacctgtccgtcaatgtcggcggggtcggcgcggcgggcagggtctgccagctgctcttcctccggctcattcaaaaattcgaacacgcgctcggcggcagcggccatgctttgcagcatattggacacctgcgaaagctgctggatgggctgggtaaagtttttgacgtactggataaaggcctgaatatcaccaatggtgatgaccccgtttgcggcaaaaatgctgcccacgatggccactgccacatagcccagattgcccacaaagttcatgatgggcatcatcaggccggagagaaactggctcttccatgcggattcgtacagcttattgttggcggcgttgaagtctgccagcaccacggcctcccggttgaacgccttgactacgttgtgaccggcgtagatttcctcgacttgaccgttgaccacgcccagcgtggcctgctgtgccttaaagtacttctggctgaacttgaccaccaccagcaccagcgccagcgacaccggcaggatcagcagggcgatcagggtcatgcgggggctgatggaaagcatcatcaccagcacaccgatcatggtggtcacgctggtgatcagctgggtgatgctctggttcaggctttgaccaagcgtgtccacatcgttggtgatgcgggagagcacctcgcccacggtgcgcttttcaaagtacgccagcggcagacggttgatcttttcactgatctggcggcggaagtcgtagcagaccttctgggaaaggccggtcatcagccagccctgaataaagctgaaagcgctgctcagcaggtacatccccagcaaaaacagcagaatgcgggcgatatacacaaaatcaatgctgccggtgccgcgcagccgggcgatccagccggtggcaagggcggtggtggcttttgccagcaccttggggcctgcaatgttgaagatggtagaaagaattgcaaacagcatggctgccgcaaggggcagcttgtagtggctcatggtgcggatgagctgccgcagcgtgcctttaaagtccttggcgcgctcggtggtggaacgtccgggtctgggcatatcactcaccctccttttcagtattcagggtatccagcgccaattccttctggctcagctggctgcgggcgatctcctgatattccgggcaattgaccatcagctgggcatgggtgcccttgcccaccagcctgccctcgtccagtacaaggatctggtttgcgtgcagcacggtggagatgcgctgtgccacaatgatcacagtggcgttgtcggtctgcgctttcaaagcgcggcgcagcgttacatcggtcttgtagtccagcgccgagaagctgtcgtcaaacagatagaccttgggatttttggcaattgcccgggcaatggaaagccgctgcttctggccgccggatacgttggagccgccctgtgcaatggggctttggtagccctcgggctttgcctcgataaaatcagtggcctgcgcaatggcagcagccttttgcacctgtgcgtcggtgatatcctcaccgccgaatttcaggttgctctcaatggtgccgctgaacagcacacccttctggggcacatagcccagcaggtcgtgcagctgtgcctgcggcatctcgcgcacgtcaatgccgtccacggtcaccttgccgccggtcacatcgtaaaagcgggggatcaggttgagcagggtggacttgccgcagccggtggagccgatgatggcggtagtctcgccgggctttgcggtaaagctgatgtgctccagcgcgtcgctgtccgcaccggggtagcggaagctcacatcctcaaactgtaccacgccctgccagtcggtgtgcgcctgtgcggcctttgcgatggcttcgtccgggtcgtgaatggaggctttggtgcggatgacttcgtcgatacgatccgcagccacaccggcgcggggcagcatgacggccaccatggccagcatcaggaaggacatgacgatctgcatggtgtaggtgataaaggcaatcatttcgcccacctgcatagtgccggcatccatggccttgccgccgaaccagacgatgagcaggctggtgccgttcatgatcagggtcataaagggcatcatagccaccatagcgcggttggtgaacagctgggtgcccatcagctcccggttggccttgtcaaagcgctgctcctcaaacttttcgcggctgaaggcgcgcaccggcatgatgccggtcaaaatttcgcggctgaccagattcagccggtccaccagctgctgcatcaccttgaatttgggcatggcaacgctcatcaggaagagcagcagcaacaaaagcagtgccacgtccagcaccacgatccaggaaaggccggagctgctgcctacaacgtgcagcacgccgccaatgcccagaatgggcgcgtaggccaccatgcgcagcaggatgacgcagacgaactgcacctgctggatatcgttggtggtgcgggtgatgagagaggcggtggaaaaattctcaatctccgcattggagaagccgataacgctggagaaggtctcccggcgcaggtcgcggccgatggcggcggatacccgggaggcaaggaagccaacggccacagccacggctaccatcagcagggtgagcgccagcatctggccgcccacccggaagaggtaacccatctgcacatcctgcgcaacgccctgcgcctcgtattccagctgtaccagcagcaaagactggcttttcaggttttccagcagggtgctgtccagctggctcatggcaccgtccagctgcttttgcagcatactgcggtcaaagccgggcatttggctcatggcggcaaactggctgcaaacggtgtccagattcgctgccgtaggggtgacggtctcagtgtccgcgtccgcagcggcagagggcgtctcggcaaggccggtcatacccatattactttgcccggcgggggtgttggcggcctgtgtagcagccatatacagcacgatgtccggggtggtcacggcctcttccagtgcggtgcgctcgtcctcggtcaggtcggagcgcagctgcaatacgccatcgtcctgcaggtagtactggtaggcgttttgcagcttctgcgcatcctcctcgctcatcagcaggctcagcgcgtccagcgtactctggcgcaccgtctggggcaggggactttcaatgccgccctgctggatgccggtgtccacgatcttgctggtgtagtccggcagggcaaggtcgcagtacgcctgcacgaacagcagtgcgaacaccacaaggcagactgcccagtgccgggccagctgcttaaagatctttgtcatggttcgtttctcccttcgggtcaatgttgcgcgcggcattttccgcaagaatggcatccatcagcgcgccgcgcagcgcgtccatctgggctgcctgctccggctctaaccgtgccagcacgctggcaaagtagttgcgcagagcctgctcacactggtggcacagctcgtaccccttgggggtgatgcgcaccagcgttttgcggcggtcggcggggtccggttcccgcaccacagtgccgtcctgctccatgagccgcagcccgcgcgagaccgccggcagcggctgtcggatctcccgggcaaggtcggagacataaatggcaccgtcctttccgtgacagttgatggcgtgcagcaggccttccagcatattgaagtggcatttggggcaatcggccagcgccgcccgcattccggtcttggatgccttgctcagctgcccgataaagtggcacatcccctgaaagctgggggtgcttggctcggacacgacagtccctcctcgtttgcattttttggatacttaacagttgttaagtattaacgcctgataagcatattccttttgcagccggattgcaagggaatagggaaatattaaacaaaaattcacaaaaaacttgtaggttttgtcaatgcgcaaaccggctctcgctgcataaaaataaaggacaggcagaaacggagggtgcagatggagcagggattccaagtgttgttacaggtattcggcggattggcgctgtttttatacgggacggacagcctgtgtcgggcggtgcagcagggagcgggcaggcgtctgcgcagcctgctggcgcggtgcaccgcaaacccggcggcaggactgctgaccggtgctgcggtaacggcggtgctgcaaagcagctcggcggtcacggtcatggtgattgcctttctggcggcggggctgttgcagctgcggcaggcggtgccggtggtattcggggcaaatatcggcacaacggtcacggcgcagctgctggcgttccgggtggaaagctggcggtatctgctgctgtttggcggggtgctgctctgtctggcctgtaaaggctggcggggccgctgcgtgggcgaggcagtgttcggctttggactgctgttcgaaggcgtcactgtgatgcgcagcgccatggaaccgctgctgcaaagccctctgttccggctggagcttgcccgggtgcagcaaagtcccctgcatgggctgctggcgggcgtctgcatgaccttaacggtgcaaagcagctctgccacagtggcgctgctgcaaagcatggcggcgcagcccggggcagacggcgtgcacagcctgctggggctgacggcggccattcccattttgctgggggataacatcggcaccaccatcacggcggtgcttgccgccatcgggcagggaagagacgccaagcgggtggcggcagcccacgccatttttaacctgagcggagcggcggtgtgttgcgcactgctgcagccctttgcggcgctggtgcggctgtgctcgcccgcaggggcggagtgcgccgtgatcgcccggcagatcgccaacgcacacaccttattcaacgtactgtgcgcgctggtgtggctgcccctgaccgggcagatggtgcgactggtctgcgcgctgctgcccgataaaaaacgaccgcaagaacggttgtaaaccggagcggggaatggtatactgaagcagacgatactattatatataaaggacggaatgcaatgaaacggaaaatcggcaggctgtgcatggtgctgggcgcggtgctgatcttatgcgccgctgggttgctgggctacaaccggtgggatgccgcccgggcagaaaaggcttcgcaggaagtattgggcgagctggagcagaccatgcaaaagaccattacggagcaccagcaggaaaacgagactgcagccccgcagccggtgttggacccgacgcaggagatgaccaccgtggaggtggaagggcgggactacatcggggtgctttccatcccggcggtagaacgggagctgccggtgatggcgcagtggagctacgccgggctgaagatcgcccccgggcggtacagcggcaccacctatggcgatgatcttgtgatctgcggccacaactacgcaatgcacttcagccccatcaagtggctggccatcggcagctcggtctattttacggatgcggacggtctgcgctggagctatgaggtggagagcgtggagactttgcgccccacccagatcgaggagatgaccaccgataccgagacggacaactgggatctgaccctgttcacctgcacctccggcggcggttcccgctacgcggtgcgctgtgtgcggaaaggctaccccgtccgtgtgacggacgcggcagaataatgctctgcgcagcaggatgatttggaagggcttccgctttgctctagccattatcagcggaaaatttatttttaatttcgggatagcggagcgtctgcggacgctccgctatcccattttcacaggagggggtcgtgccggaaaacggcagctccggtgcttgtttcctgcggaaacgcggcgctgcggggactgccaaagacctgatctccgaggaaaatggccgtgtacagcgtgagcagactggggagcatacgctgttttttacgcaaaaagtccgcaaaaacctttgaaagtcctttttatggtatctgaattatgcgatactgtgttcaccgggaaagccccggaacaaaacagaaacacaggagggaaacaccatgaaggattttgagttgcgttatgtgggcagtcatgtggaggtatacaccggcagtggtgtgttcctgttttcggccgacacagtgcgggaggccatggaagagctggccgggtaagcggcggcatatcgcatctgggaaagctgaatgtaaaatgtatgtaaaataacggaaatctttttgtttgccgcccggaaatatgttgcggaatgtgtaaaaaaagtaactttcctgtaaaataaaccttgttgagacgccccctttgatggtataataaaaataagcggcttccggaacagggcaggcgttgcgcgtgcaaggttccggcggctgtgtgctgtaaaggattaaaagggaagtttcatattaggagtatcgttatggatatcacacacattacctctctgctgggcggcgttgcgctgttcctgtacggcatgtccatcatgggcgccggtctggaaaagctggcaggcggcaagatgcagggcgtattgcaaaagcttacctcctctaccatcaaaggcgtgatcttcggcacactgatcaccggcgtcatccagtcgtcggctggtacggtggttatttgtgtcggtctggtcaactccggtatcatgacactgacgcagtcggtaggcgtgatcatgggtgcaaatattggtactacggtaacaggtcagttgatccgcatggcggatatctcaggcgacagcctgtggctgaccttgatccagcccaagacctttgcccccgtggtggcgtttattggctgcattttttatgtgttcctgcgcaatgccaaaaagaagaatatcggccagatcatgctgggcttcggcattctgtttaccggcatgagcctgatggataccggcgttgctcccctgcgggagagcgccgtctttcagaatctgtttgtcaccatgaccaaccccattctgggcgttctggtgggcgtggtggtcaccgtgatcatccagtcctcctccgcttcggtgggtattctgcaggcactgtccagcacagggcttgtcaccttcagctctgccattcccatcattctgggtgcgcatatcggtacggcgttcaccccgctgctcaccatcggcggctcttccaaggatggtaagcgggcagcgctcatccacctgtacttcaacgtcatcggcagcgtgatcctgctggcgctgatctatgcggtgcagttcaccatcggcatccccatgtggggcgatgtgatgaacaagagctccattgcaaacatccatactttgtccagcgtatgcgccatgctgctgttcctgccttgcagcggagtgctgagccgcttggcgatgctcacggtgcccagcagcgtggaggaagcacaggagctgagcatgccggtgctggacgagcgtctgtacaagagcccagctgtggctttgcagcaggcgaagaatgcggtgatcaagatgtcccgccgcgccgcccgcaacgtgggtctggccgcgccgctgcttttgaagatggacgaggagaccgtgagcgccattaaggtgcgcgagaacctgatcgaccgcatggaggtggagatcaccaactatctgatcaagctgacagatcaggagctgggcgacgacgaaagccacgcggtgaccgagctgctgaattttgtcaccgagttcgagcgtatcggcgactatgccgtgaacatcatggaaaaggccgaggagctgtacgacaaggaagccagcttcagcgagagcgccaaaaaggaactgcaattgctggatgccgcattggagcgcattctggcgctgacggacgaggcctttgaaaacgatgatgttcagaaggctgcacaggtggagccgctggaggaaatcattgacgtgatggtggagcgtctgcgcgaccagcacatccgccgtctgaaggacgggatctgctccatcgacaccggcgtggtgttcctggatgtgctgaacaacgccgagcgtatctccgaccactgctccaacattgcggtgcgcatggtgggcatggaggccggcgatgattacgactctcacaccctgaaaaacatcatgcaccacagccccagcaaggactatatgctggagtacgagcagtgccgcaaggaataccttgtgccgctggaagaaatggaagcctgaatcatataaatgcaatgagccgctgcacatcgtgcagcggctcattgcatttattccccc

SEQ ID NO: 13790 - DNA, 86643 bp, Unknown
  gut microbiota DNA sequence
ctgttgaccacgagcccgcgcttgatgcgtaaggcgtcgttttcgggcagaagattggtgtagatgccggtcacgcggatcagggtgcccggggtgccgtcggcgcggcaggtgtacaccgccacccgcccgccgctgtcttgcaggcagtagcgggcggtgtccgtctggggcactgcctgcgcggcaaggctcaggggagaggcggggtcggtctcagacccggcggggctttgggacagcggcagctttggcagcgccatccagaacagactgaatacaatggtgaatacgcaaagcccgtagaacaggcagacagacagcttgcgcataaaaaacactcccttccccggtaagtatgccccattttggcggatggcagacaattttcacacgcagatactgtactttccacaagagagtgtgttatactatttatatctgctcagcgcgcaaagattggttcttgcccggctggggcttgcgtgctataatatggtattgcagtttgaaatttcgtgtcacaaacgttgtggataaagcccggtgcagctatgcccggcaacagtcttgaaatgtcaggaggcgatccctatctccaacaatgagatgagaaagatccaccggggcggcgaggagcagcctgcccgcccggtgggacgtaaggtcaatgtttcccagagccgccgcgaggtacactccgcagtggaaaaccgtacccgcgcgcccaaggcacccaaaagccccaagccgccaaaggaaaagagcaagcatcccattctgcggttcattggccgcaccgtcgctacggtgctctgccttggcatcatgctgggcagcgtggtggccgtgggcatggtgttctatgtggtgcaggctactgccaacgacggtgacctgctggacctggacaacattcagctgagccagtccagtatggtggtagccaccgacccggataccggcgcacaggtggagtatgccaccctgcgctcctccaacagccaccgcgtttgggcagaccttgagcagatcccctccaatttgcagtatgccttcatctgcaccgaggataaggacttctactcagagcccggcgtcaacttcaagcgcaccatcggcgcaatgatcaatgagtatctgctgcctatttacagctccaagcagggcgcatccacactggaacagcagctcatcaagaacctgaccgatgacaacagcgccagcggtatcgatggcgcattgcgcaaggtgcgcgagatctaccgcgccctctgcctgagccgcagctactccaaggagaccattctggaggcttacctgaacaccatcagctttaccggcaccattcagggtgtgcagacggcggccaacgagtacttcaacaaggacgtcagccagctgagcctgtgggagtgcgctaccattgcctctattacaaaaaaccccaccaactataacccctatacgaaccccgaaaatctgatccaccgccgcaacttcatcatgtacaatatgtggcagcagggagtgatcagcgaggaggactaccgcaacggcgctgcacagccccttgtgctggccgaagaagacagcggcaaaaagcccagcaccgtcacctcctacttcaccgatgcactgttcaatgaggtcgtgcaggacatcatgaccaaggagggcatcagcgagtccgaggcgcagaagctgctctacaccggcggctttaccatcgaagccactgtcaataccaagctgcagtcccagatggaaaacctgatgctgaacaccgacgatgcctacttcccggcgggctggcatgaggaagaggtcacctctatttcggacgatgatgtgcaggtgttcaacgaggacggcacccccaagacccgcaccggcgaggatggcaccgtctactattaccgcaacgtgcgcacgcaggctgctatggtcacgctggactatgacggcaacgtgctggccattgcgggcggcctgggcgaaaagaccaagagcctttccctgaaccgcgcctataatgtggagcggcagaccggttctaccatcaagcccatcggtgcctatgcgctgggcattgagtacggtctggtcaactggtccaccatgctcaacaactcccccctgtaccagaagcaggatatgatcatccgggacgaggactactgccgcaagaatggcctgatggggctctccgacaagcagctccgcgcttaccccaacgcatggcgcagctggccgcgcaactacggcggcaactatggcgacggcagcgatctcccgctgtggaatggccttgcccgctcgctgaataccatcgcagtccgcgtgggcgaccttgtgggcgcaagcaatatcttcaacttcgtctacaacaccctgcaactgaatacgctggaccccaccaacgacgtgggtctggcgcagatggttatgggcagccagaccaagggcgttacgcccatggcgctggccgcagccttccagatcttctatgacggcgagtacaccaccccgcacctgtacacccgtgtgctggaccgggaaggcaacatctatctggaaaacaacgccactagctatcaggcactgacccccgataccgcttatgtcatgaaccgtctgctgaagaacgttctgttctccagcgtaggtactgccagcggccgctaccccaactccaacggcatggaggcctttggtaagaccggtactgccagcgacgaaaaggatctgtggttcgtgggcggcacgccctactatgtcaccgctgtgtggtggggatatgatgcaccttacgatatgaccaagactctgtccaagcagcaggccaagacccgcacctgtgttatggcgtggaaggcactgatggagcaggcacaggcagacctgccctataaggcattccccgcctccgcaggcgtggtggaacgccgttactgcacccagagcggattgctggccggtgcaggctgcccgagcactgccgtgggctactaccgtgccgatgacctgcccgatacctgcacctattcccatgccgcaccgcaggctgctgcccctgccgagaacacagatgatgctgtgcccacccagccggtcatccccaccgataccagcgcactggacacggaataaggacaaaaatcgtactttttcacccctttgctgaaaaatccggcaaggacagggcgcacttcacaagacaaaactggacaaagtgacaaaatagcatccgggcacttgcattgcaggggttcggatgctattatattttctgcaagaacacttgtgtttgagaggtgaacaagttggaacgccgtttttatctggtggatgcgcaggtgctgccggaggtttttctcaaggtggtacgcgccaaggagctgctggccagcggcgaagcccgcagcatttcggctgcgacccgcgccgtagagctttcgcgcagtgcattttataagtataaggattgtatctttgattcagagaacggccgtgaggtcatcacggtcatggccaccctgcgggacgagaccggtgcgctgcaaagccttctggccggtatcagcgccgcaggtgccagcatcgtgaccatcaaccagtccaccccggaaaacggggctgcgctggtggcggtcaccatccgcaccgataccatgcagatgtccccggaggaactgaccgaaaagctttcgcgccagcgcatggtggtgagtgtgcgctgtgggtataacctgtaacaaaacaggaaacgagggaaagagagtatggctaaaattgcaattctgggctttggcacggtgggcagcggcgtatacgaggtgctgtgccacaatgctgcaagcgtctcccgccgggctggcgaaccggtggaggtaaaatatattctggacccgaaggattttaccggcaacccggtggagcctttggtggtcaagaatatcgacgtgatcctgcaggacccggagatccgggtggtggtggagaccatcggcggcacccgctttgcttacccctacgtcaaggcgtgtctggagagcggccgcagcgtgtgcacctccaacaaggagatggtggccacctacggtgcagagctgctggcactggccaaggagcacgactgtgctttcctgttcgaggcctctgtgggcggcggtacgcccatcatcacccccatgcaccagtgcctggcggccaacgtcatcaccgaggtggagggcatcgtgaacggtaccaccaacttcatgctcaccaagatggtgcgggagggactgggctttgaggatgcgctgcaaattgcgcaggagctgggttacgcagagaccaaggatcccagcgatgacgtggacggccgcgacgcctgccgcaagatcgccatcctgtcctccatggtgtgcggccaccagatctacccccagaacatccccacccggggcatccgcgccattaccgccgccgatgtggccagcgccgaaaagctgggctgcgttatcaagctgattgcatggatgaagcttggcaaggacggcagcgtggccgccggtgtagagccgtgtctggtgcccaaggcaaaccagctggccagcgtggacgatgtgttcaacgcggtgctggtcaagggcgatatgctgggcgatgtggtgttctacggcaagggcgcaggcaagctgcctaccgccagcgctgtggtggcagacgtggtggatgcgctgaaaaacggcgcacaggtgcacgacagcctgttctggcagcctgcggacccggtggacggcatgctcaccgacccggctcctgctgcatattatgtgcgtgtggcgggcattgcacctgctgtggtggaggccatctacggctacggcaaggtggtggatgagcggtacgagggctgcgcctactttgtgaagcgcgccgatgagcgtgcgctggcagaggccgcgcgcaaggtggaggccgtgggcggcagcgtgaagctggtgctcaagcgtctgcccgaggaagtgtaacggaaaggaactgcggcaatgaagatcaaggtttcagtccctgccaccagcgctaacgtaggctccggcttcgatgcgctgggtctggcagttacgttgtacaacacggtcacctttgaggacagcgaggtgctggagatctcggcatcggacggcacccgcatcccccggggcgagtcgaatctcgtgtaccgctccgccaagggcctgttcgaaaaggttggcaagcagatcccgccccttaagatcacccagacgaaccccatccccatggcacggggtctgggctcttcttcagcctgcatcatcgcgggtctgctgggcgcaaaccggatgctgggcgatgtgctcaacacgcaggagctgctcacgctggcaactgccattgagggacaccccgataacgtggctccggcattgctgggcggcctgaccagcagcgtgttcgaggacggcaaggtgtattcggtcaagcggaatgtggatgaaagcctctgctttgctgccatcgtgccggactacaagctgctgaccgaggcagcccgcgcagccctgcctaaagaggtatcccataaggacgcggtgtataacctgtcccgtgcggcgctggtgcccgcagccttctgcgaggggcggcacgacctgctgaccattgccaccgaggataagctgcaccagcagtatcgcatgcccctgatgcccggctcccgcgaggtattcgatatggcgcggctgtgcggcgcaaaggccgtgtatgtgtccggtgcaggcagcacggtcatggctgtggcagaaaaggccgaggccgaaaagttctattccaagctggaaaaaggtctggagctgctggaaggtctggacggatgtgaagcatttacactgttgcagctggatgccgataacaccggcgcaaccgtggaatgataaatgggtaagggaagtgcaagaacgcttccgcccggcaagccccccgcaagcgcggggcgttaaagaggagagtgacaagatatggcgttgatcgtacagaaattcggcggttcttccgtaaaggaccgtgaccgtatcttcaacgttgcgcggatcgtggccaacacccacaacgcgggcaatgacgtagtggtggtagtctccgcacagggcgacaccaccgatgacctgatcgccaaggcaggggagatcacccataacccctcggcgcgtgagatggatatgctgctggcctccggcgagcagatcagcatcgcactgctggccatggcgctgaacgagctgggctgccatgccatcagcctgaccggctggcaggcgggcttccgcaccgaccgtgcctacaccaaggcgcgcatcacccggctggagaccgagcggatttcctccgagctggagcgcaaccgcgtggtggtggtggcaggcttccagggcttgaacaagctggatgacattaccactctgggacgcggcggctccgacaccagtgctgtagcgattgccgctgccctgcacgctgaccgctgccagatctacacggatgtggagggcgtttataccgccgacccgcgcaaagtgagcaacacccgtaagctggaggagatcacctttgacgagatgctggaactggcatctctgggcgcacaggtgctgaacaaccgcagcgtggagctggctaaaaagtacaatgtggagctggaggtgctctccagcctgaaccccatcccgggtacggtggttaaggaggttacaaaggacatggaaggtatgctgatcaagggtgtcgccaaggacaccgatgttgccgttatcacgattctcaacgttcccgatgagccgggcatgagctttaggatcttcggcctgctggcacagaagaacatcaacgtggacatcattctgcagtccaccggccgcgacggcaagaaggacatcagctttacctgtgccgaaggcgaagccgagctggccatgcgtgtgctgaaggaaagtgcacacttcaacgatgtcagtgtggacaccacctgcgccaaggtctccatcgtgggtgccggtatgcagagccacagcggcgttgcctccaagatgttcgaggcaatgtccaacaacaatatcaacatcaaaatgatctccaccagcgagatcaagatctcctgcatcatcgaccgtgcagacgccgacaaggctgtcggtgccatccacgatatgctgtttgactgatctgcgtaaaatttttgattgtggcctgtctgctccctgccggggggcgggcgggtcataatttttttacacacggcggcgtttacacaaattgcaaaggggtgtataatatagtttgaatctgtgcggcgcaccggcgctgcaacaatgccgaaaaggagccccgccgcatgagtgaatccacccgtacctccagagcgcctgctgagaagcgcctgacctatcaacaatggaagcgccgcaaaatgctgcggctggcccgcaactgggtactgtttctgaccggctgcgcggcagtggtggcgctgctgaccggcggcatcctgtggctgctgcccaaggtgcatggcctgctggccgggccaaaggtatttgcagccagcgtgtacgacggcacagactatgtatttaacgccgcagatgcccggctggtactggtgaacgccaacctgccctataccgccgagcccgccccgctgctggacaccgccgacgaggtcaccggccagcagctggaggccgaagctgccatgcagtatcgcagtatggctgccgccgcgcaggcggacggcgtcagcctgacccttgtggccggttatcaggacgccgacacccgtcaggccgcctacgaggcccgggtgcagacctaccgcgataagcgcaagtccgaggaggaagccgcccgtctggcggctaccatccagcccgccgccaacgccaacgagcacggcaccggctacgcggcagatatcctcagcgcggacaatccgcagcaggacaccggttttgccgagacccgcgcctacgagtggcttacggcctacgcggcggaatacggctttatcctgcgctacccgcaggaccggcaggccgcgaccggcatcgtgttcgagccgtggcactggcgctatgtgggggtggaaaacgcccttgccatccgcgccagcggcctgagcctggaagagttcatcgccctgcagagggcagactgaatcaaatgctctgtgctgcggcacagagagaagggaactatcattggaacgtactctcattgcaccgggcgtgcatctttcctgcgacccggcttctaaattcaaccgctgccgcatcagcatccactttgcttttccggcccagcgtaaaacggccactgcccatgcgctgttgccgctggtgatggagcgcggctatgcggactgcccggatatgacccgcctcaccaaaaagctggcaaagctctacggcgcagacctgaccgtggacgcccgccctatgggctgcaaccacaacctctgcgtcagcgtgaccggcatcaaggatgcctttgcgctggagggcgaggcactgaccgccgagtataccaaaatcgcgctgggtgcggccttccatccctatcttgtggacggctgctttgacccgcaggccgtcagcattgaaaagcagatgctgaaaaagggccttgaggatgaaatcaacgataaacgcatctactgcctgcatcaggccaaccgggagttttttggcgacagcccggcgggcgtgcggcaggagggttatctggaagaggtggacagccttacccccgccatgctgaccgccgcttatcagcagatgctgcgtactgcaaacatcgagctgttggtgctgggctgcgacgccgcccagaccgccgccatccgggatgctttgctggcagagcttgtctgcatcgaccgcgccccgctgccgctggtggaaaacatggccatgcctgccattgcgccggtgcataagaccgaaaactacgatatggtgcaggcaaagctgtgtatgctgttcacactggggcagcccatgcagccgcagcagctggcagcggtgcgccttgccatggcgctgtacggcggcagtgtgaccagccgcctgttcctcaatgtgcgggagcgggaccatctgtgctactactgctcctcctccttccaaagctttactggcagcatggcggtgaacagcggtgtggagcacgctgatgccgcccgcgcagagcaggcaattttgaaggaacttgccgacctgtgcaccggccccattaccgacgaggaattcgaggactgccgccgggggctgctcagcggcatgaacggggtagaggacagccttggcggcatcgagagctggtactacatcgaggtgctgcgtgccggtgccaacagcgctgcgcttatccaaagcccggaacaggcacgcagcgccctgcgcgccgtgaccaaggacgaggtgcgggacatcctgcgccgcctgaccctctcggtcagctatctgcttacaaaggaggatactgcccatgccgcagaataaccagaccctgctggaaaagaccgtggccgaccagtggcagaccctgccctccggcctgacggtgctggtgcgccccatgccgggctattccagcacccatgtgatctatgctacaaagttcggctccatcgaccgagatttctgcctgaacgggcaaacggtgcatctgccggcgggtgtggcgcattttctggagcacaaaatgttcgaggacgaggacggcgatgcctttgccaagtacgcaaagaccggtgccaacgccaacgcctttaccagctttgaccgcacctgctacctgttcaccgctacccagcagttggacgaaagcttggacgtgctgctgggcatggtaggccacccctactttaccgagcagaccatcgccaaggagcagggcatcatcggacaggaaatcaaaatgtacgatgacagcccggactggcggctcatcaccggcctgttcgagtgcctgtaccacagccaccccatccgcagcgacatcgcgggcacggtggagagcattgccgagatcacgccagccatgctgtacgacagctgcaaggccttttatgccccgggcaatatggtactggctgctgccggtaacaccaccatggaacagatccttgccgcctgcaagcggcacggcctgatggagccccgcccggcagaaaaggtgcagcggctgtgggccacggagcctatgacccttgccgctacggaaaaaacgctgaccatgccggtttccaagccctgcttcggcgtaggctttaaggaagagccgctgtctgcggacgatctgcgcaccgaggcgctgtacgaccttgtgctcagctgcatcgtgggcgggatgtcgccgctgtaccgccgcctgtatgacgaaggccttgtgaatcccggctttggcggcgaggtgctgcgggtggacggctgctgctgcatcctgttcaccggagagagcgatgtaccggatactgtgcggcagctgctgctggacgagatcgcccgggtacgcgccgccggtgtggacagggaagtgtttaccctgtgcaagaacgaaaaatacggccagctgatcgaaaatctggaaaacgtggaagactcggccagccagatggcagactttgccctcagcggccagacggtggcgcagcagatctccatgctggccgggctgaccgcagaggatgcagacgctgccctgcagcacatcctgtgcaccgaccgcatggctaccatgtacatcctgccggatggcacggcgcaggcggcagaagaggacgaggaggaagaagaatgacaaatctggtacagtttccgggtctgggactgagttttcagctgaaccgcgtggcctttaccatcggcggggtcagcatctactggtacggcgtgtgcatcgcagtgggtctgtgtctggcgctggtctttgccttccggcacagtctggaatttggcgtagacccggacagcatggtggacgtcatccttattggcgtagtgctgggcatcatcagcgcccgcgcctactatgtagctatggcaccttttaaatacgagagtatctgggagatgatcgccatccgggatggcggccttgccatctacggcggcatcatcggcggctttctgttcggcggtctggcctgcaagtggcggggcgtgccggtgctgcccatgttcgacctgactgctatgggctttctcatcgggcagggctgcggccgctggggcaactttttcaatcaggaggcctttggctgcaacaccaccctgccgtggggaatgtacagcgaggctacccgtgcttacctgatgagcagcacggtcacggtgcccaagggtgtggtcatcgaccccaacctgccggtgcaccccacttttttgtatgagagcatctggtgctttgtaggctttttcctgctgttccgctacatcaaaaaacgcaagttcaacggcgatatcaccctgcggtatctggtgtggtacggcgcaggccgtttctggatcgagggtctgcgcactgacagcctgatgctggtgccctccatcgggctgcgggcatcccagctggtggcaggcgtcgccgtggtggcgggcattgcggcagaggtgtattttacccgcaagttcaagggcaagcctttgcttgtgccgctggcgctgaacgcagagaacaaggcggctcaaaagaagctggacggtcccatctcctttgcagggaaggacacccagctgctggcctccagcccgtgcaagctgtttttggaaaagaccgaggcctataatgcgcaggtaaaggccgccatagaacaggccgggcagaaaaaagcgtaaaaaatttgcgcaaaaggggaaatttcctcttgcaatccggtttggtttttgctataatattctagccgcatggtgtgggcgcctgaaatggcccgcagtaagggtctgcctttacgaccagcgagtacaacgaaaaggaatgaacaaaatgtacgcaatcattgttaccggcggtaagcagtaccgcgtggagcagggcgacatcgtctacatcgaaaagctggacgttgaggccgactccgaagtgaagtttgatcaggttctcgctattggcgaggagggttctgtgaaggttggcgctcctgttgttgagggtgctaccgtttctgccaaggtcatcaagaatggcaagggcaagaagctgaacatcatcacctatcgcgcaaagaagcacagtgctcgccgtatgggccatcgtcagccctacaccaaggttgagatcactgcgatcaacggctaaggaggtaaattacaatggcacataaaaagggcgtaggcagcaccaagaacggccgcgattccgcagcacagcgtctgggcaccaagcgtgcagacggtcagttcgttctggccggcaacatcctggttcgtcagcgtggcacccacatcatgccgggtgagaacgttggcaagggcagcgatgataccctgtttgctctggtggacggcaccgtccgtttcgagcgcgtgggcaagagcggcaagaagtgcagcgttaagcagtaacttctttctgaataactgcaatcgtagagccggaccctcgtggcccggctctttttgatgaaataaggctatgcgttcgtgtagcgctgtttgcaagccttcccccggtcgggggaaggtggcacgaagtgccggatgagggcgctgaaacgcaaaggcatataaagctaaggaggggctgtatggcagcacagactaactttatcgacatcgccacgatatggctccatgcgggcaagggcggcgatggtgcggtgagcttccaccgcgaaaaattcgtggccgcaggcggcccggacggcggcgacggcggccggggcggcgacatcatctttgtggcggacgatcatctgtccaccctgatggatttccgctataaacgcaagtatgtggccccggagggcggcaagggcggcgcaagcctgtgccacggcaaaaatgccgagaatctggtcatcaaggtgccgctgggcaccgtgatcaaggatgcagagagcggccttgtcatcgcagatctgtccgaccacaccccggtcaccattgctaagggcggccgcggcggctacggcaacgcacactttgccacccccacccgccagatccccaagtttgcaaagcccggtatgcccggcgaggatctgcaggtgaccttggagctgaagttgatcgcagacgtgggtctgatcggcttccccaacgtgggtaagtccacccttatctccaccatcagcgccgccaagcccaagatcgcaaactaccactttaccacccttgtgcccacgctgggcgttgtgtcggtgggcgagggcgcaagctttgtctgcgccgacattcccggcctgatcgagggtgccagtgaaggcgttggtctgggccacgatttcctgcgccatgtggagcgctgccgcctgctgctgcacgtcgttgacgtttccggcagcgagtgccgcgaccccatcgaggactttgaaaagatcaacgaggagctggcaaagttcagccccgtgctggccgagcgcccgcagatcgtggtgggcaacaagtgcgaccttgccaccgaagagcagatcgagaccttccgccagtatgtggagggcaagggtctgacctttgtgcccatctctgccgccaccatgcagggcgtaaagcagctgccggggctcgtgtacaaccgcctcaaggatatcccgcaggtgccggtgttcacccccgagtacaaaaagccggagcccaagaagaatggccgcgatttcaccatccagcgcatggaagcccatgtgtggagcgtggatgccccgtggctggagtatattctggccggcagcaacgtggacgactacgagagcctgcagttcttccagcgtcagctgggcgagagcggcattctggacgcgctggtgcagaagggcgtggaagagaacgataccatcctcatcggcgattatcagttcgactatatcttctaaggataaagcatcatgaacgaatcagaaaagatcgacccgcgggagctcagcccgctggcgctggcctttgtgggggacagcgtgctggagctgctggtgcgtcagcgtctggtggagcaccaccgcctttcagccggaaagctgaatgccgaaaaggtcaagtatgtctctgccaaggcgcagttcagagaggaacagctgctggagccgctgttcaccgaggacgagctggctgtgttcaagcgcggccgcaacgccagcaaggccagcgttgccaagcacgcctccccggaggaataccgtgcctccaccggcttcgagtgcctgttgggatggctgtacctgaacggacaactggagcgtgtgcaccagctgtttgaggtgctgtggcaacagtttgaccctgaccagaaataagaatgcgaaagcccgctgctttccacactggaaaccagtggtggagggcagcgggctttgcttgttggtatctgcggtccgtcagatgccgcttacgccatcagcggctgttttttgcgttgctggaacggctgttggtggagttcttggcgctctcgtcatcggcacccttggtgtactggttggggtgcttgtgctcgttggttgcgctgttggtggtcttgctgctggtacggttagaggtctggttcttgcaattggtactgcggttctcactgcggttttccatgatgtgaatgctcctttcggtcgttgctgtgggggcggggccgccctcacagtccatagtgtggccgcagccggcggctttatacatcccatgggaggaaaagaatatgcctacggaatattttgagcagcgggagcgtgccctgctgggccagcggtacgagcagctgtatgccgccccgcagcagacggcagagcgcggggtcaccgtgtcggcgctgcgcaccacaccggagcagtttgcgcagagggcagatttcccgctggaaccctcgcccttctgcaaggcggcttttgtggtgcatcagccggattttaagcccggacggcatccgtaccaccatgcgggtgtgttctattcgcaggagccctcggcttcttcagcagcgccgctgctgggagtacagccggggatgcgggtgctggatctgtgcgccgcgcccggcggcaaaagcagccagctggcggcggcattgcaggggcgcggtgtgctggtgagcaacgagtatgtggctgcgcgtgccgaaattttaaaaagcaaccttgagcgcatgggcgtttccaacgccgtggtgctcaacgagactcccgcccgcattgccgaggcgctgccggagtttttcgaccgggtgctggtggacgcgccttgctccggtgagggaatgttccgcaaggagccggtagcgctgcagcagcactgcgaggcactggtaaagcagtgcgcagagctgggcgcacagatactggactgcgccgcagcagcactggctcccggcgggcagctggtgtactccacctgcacctttgcgccggaggaggacgagggacaggtggcggcgtttttgcagcgccacccggagtttgtactggcagatgtgctgggcaacgtggattacacctttggcagcgcaggcgaagagaaccgcaccggcggtctgccgctggatgtgagcaaggtgcgccgcatctggccctgccagggcggcgaagggcactttatggcccggctggtcaaggccggtacgccccgcaccctgccgccggagggagaatacaccccggaggagcagctctggcttgccgccgctgccgaggcgggcaaaaagggcaagggcaaggcgaagcctgccaaggccgcagatgcccgcagcgcccgccgcgcagacagtcgcgcctgccgggacgccgtgcagggcacgagccgccgcacccgggataccggggcaggggaggccaccccggcgcagagccttgccgcatggcaggagtttgcccggcagtatttccccgcgctggcgcagcgcccggccgtggtgcacggcggtggtgtgttgttgccggtggcctttccgcagacgggacttcatgtgctgcgggcgggggtgtttgtgggcagcgtgcagaagggccgctttgtgccggagcatcatctgtttacggcctttggaggcctctgcacgaactgcgagcagctgactcttgccgactgccgttgcaccgagtacctctccggccgcgaagtggaagcccgcacagcagcggacggctggtgctgcgtgaccgtggacggctggccgctgggtggcggcaaggtgtccggcgggagagtgaaaaaccactatcccaaggcgctgcggctgctgtaaaccgcagatttacacgcatccgggcgaaaatcgggcttttcaggcttgaacgcgccggtggattgtgataaaataatagagttagattttgtgtgctgccacaagcgggcgaccacagcccgtctgcccgcaggcggagataccgataaatttaggaggctctttcccatgtctggacatagcaaatggaacaacattaagcgcaagaaggaaaagactgacggcgcccgcgccaaggtctttaccaagatcggccgcgagatcagcgttgccgtccgtgacggcggccccaacccggcttccaacagcaagctggcagatctgatcgccaaggcaaagcgcatgagcgtgcccaacgataacatccagcgtatcatcaagaaggccgagggcggcgacaagaccgagttcgaggccatcacctacgagggctacggccccggcggcgtggcagtcatggttgagaccctgaccgacaaccgcaaccgtaccgctgccgacctgcgccactacttcgataagaacggcggcaatctgggcgctatgggctgcgtggccttcctgttcaaccagaagggcgtcatcgacatctctctggaggataaggacgccgacgaggccatgatggacgctttggatgccggtgccgaggactttgatgccagcgaggacgcagccgaggtcaccaccgaccccgagaactactccgctgtggtcaaggctctggaggagaagggctacgagatcctgtccgacgatctggccatggtgcccatgaccaccacccgcctgaccgatcccgatcagctgaagcagatgggcaagctgctggattctctggaagataacgatgacgtccagaacgtctggcactctctcgagaacgaagaggacctgccggaataagcttccgcaaggctctttgctcctgaaataaaacgataaaaagccgctttttgtgctgtttggcacgaaaggcggcttttgcttgttatttttgtatgtcgtgcggataagggttccttctggcatcagaaaaatcgtactctgcacgcatatcctcatcgtatgatggattttccgaagaagtgctattagatttatcgttcatagtgcgtccacagactgaggatcttaacggtctgctctttttcatagacctgataaacaaggcggtgctggatgttgatgcggcggctgtatgcaccgttcagatcacccaccagcttttcgtacgggggcgggttttggaaaggatcaacacggatgatttcaatgagtgcctttgccttttcgtccagatgggcagacttcagttttggtacgtcctttgcagcggttttggtgtaaacgaccttgtacatttaccactccaccgccgtttcgtccacacagtcctcaagcgacgtggcgattccgtccatgatcttttcgcgcatacccggtgcagagaccagatacagcgtttccatgatgccgctgtaatcttcttcagacagcagcacggcattgccgtccttggtggtgatgttgatgggctggttgtatttaatggtctgctctacatagtcgaaggcattcttacggaaattcgtgatatttgtagtggtcatcgtagaatcactcctttcgtgtacagtatagcgtacgcttgtaaaaatgtcaatatgcgaccggcaatcgaaacatgacacacggtcacccctgtgccagcgccctgccttttgcgtagtagcgctgcatttcttcccggggaaccatattcccgccggtagcccagaccagatgggtggcgtttgccagcgcaccggcgggcagagcggcttcggtgtaagcgccaagcagctgcccgggctgggtgagcaccgggccgtacattcccgccagagcgctgggttcaaggtaaagatcttcggcgtctgccagctgcgccagaagggtgtacatccgctcgtcctgcagggtgtagcagccgctcataaagggacgcatcagcccgcccacaaagccggaggcgcgccccacggcaagaccatcggcggcggtgcggttatcgatgccaaagtcctgcacgcaaatgctgttgttttcgccggtggccatgcccagcatcatgcagggggagtgggttggctcggcgaagaagcagtgtgcggcatcgccgaacagcatcttcaggccaaaggccacgccgccggggccgccgcccacgccgcagggcagataggcgaagagaggatgctccgcatccacggtgacgccctgcgcgtccagctgctttttcagccgcagtgcagccacagcatagcccagaaagagggtcttggagttttcgtcatccacaaagtggcagtgggggtcacccgccgccagcttacgaccctcggtcacggcgatgctgtaatcagaggcgtactccaccaccttgacgccccggctgcggagcaggtcttttttccattgccgcgcgtcagcggacatatgcacagtgacctgaaagcccagcttcgcgctcatgatgccgatggaaagccccagattgccggtggagcccaccgcgatggaatactgcgagaacagcttgcggaagcgctcttctgccagaacggcgtagttgtcggtaaggtgcagcattccgctgtgcagggcaatgtcctcggcggttttcagcacctcgtaaatgccacctcgcgccttgatggagccggaaatgggcagatgactgtccaacttgacccatacctgcccggcgatatgagtgccgctgcgctccttcagcaccttctgcatccgggggatgggctgaacaggggactcgatgatgccgcccgccgcagcggtctcgggaaagacggcggcaagatagggcgcaaaccgctccagccgtgcggcggcgtcctcaatgtcggccaaagtcagcgggcaggcagccgcagcctgtgcaaagggcagcttgtccgggtttacccatgcagtctccttcagggcgcagaggtcagagaccacgggatatgccgcgatccaatcggcaacagaacgcccggagatgcacttggcaggtgaaaccatagtggatcctcctttatatataaaagtaaaagcagatggcgcgcccggcggtttttgcggagcgctgcgtgtcttgaatataaaggtttttacaggaattgtcaaccggctgctcgccgggcggatcagagcgccacgatctcggtggtcaccagctgctgctctgcgccgtagttcagcttcatggcgtagtcggtcagggcacagaattcttcagcctccttccgggtggcaaaatagttttcggtaagtacctcggagctgccgcgggcgtggaagatggtctttaccacaaagttgttttcgtccatagtatgcctctcttttccagttgatgcgggagacgccgccgtccctcggtgtaattgcagtataacaggacaaatgtcccacagaacggacttttaacggaagcaggacatatttttgcgcaaaccggtcaaaaagccgcaccagccggaggaacaggagaagattggaaggagagcagcacactgcccaaaaaccttgttaaaaaactggcattttgccatttttgtgtaaagtatacaagaataaacacaaaaaaatggcattgtgcgtattgctattttataactgatatattagaatataagcaagaagagcgtgcaggcgtactgcgcgtgccataagataaataacgacaggaggaacttctctatgcctatgaaaatgggttggcgctggtatggcgagggcaacgaccccgtcaccctgagcgacatcaagcagatccccggcgtgaccagcatcgtctgggcactgcacaacaaaatgcccggcgagatctgggaaatcgacgagatccagaaggttgcagaccagatccacgcctacggctttgacatggatgttgtcgagtccgtcaatgtgcacgacgatatcaagatcggtctgcccacccgcgaccagtatatcgagaactacaagcagtgcatccgcaacctgtccaagttcggcgtcaaggtcatctgctacaactttatgcccatcttcgactggacccgtaccgacctgttccatccggtaggcgatggttccaccgcactgttctacgagaaggacaagatcaagggcgattacaaggcgatggccgagtatatcatgtccttcaccgagaagtacaacatgaccttccccggctgggagccggagcgcatggcaaagctggacgagctgttcaaggcctacgcccctgtcaccaaggagaagctgtgggagaacctgaagtacttcctggaagctctgatgcccacctgccacgagtgcgacatcaagatggccatccacatggacgatcctccttgggatatcttcggcctgccccgcctgctggtggacgagcccagcatcgaccgcttcctgaagatggtggacgatccgtacaactgcctgaccctgtgcaccggcagcctgaacgcaaaccccaacaataactgtgccgagatcatccgcaagcactgcgaccgcattgccttcggccacgtccgcaatatccaccacttccccaacggcgacttctctgaggctgcgcaccgcgactgctgcggcgagaccggcatcattgaggtgatgcgcgcttaccatgactgcggctttgagggctacatccgtcctgaccacggccgtcagctgtgggaggaaggccccggcgtctgccgccccggctatggcaagtatgaccgcgctctgggcatccagtatatgctgggtatctgggatctgctggatcgtctggatgaagaaaagaagggctgatgattatgaagctgtctgatatcaaaaacggcaatctgtccgccgagtgggcagaaaagggctacgagctgcccaaattcgacatcgaggctgtcaaggccaagacccacgccgagcccacttgggtgcactttggcgcaggcaacatcttccgcgctttccccgctgccgtgctgaacgatgcactgaacagcggcaagtacgaccgcggcgtcatcgtggctgaaagcttcgactacgagatcatcgacaaggcttaccagccctacgataacctgagcctgctggtctgcctgaagtccaccggcgagatcgagaagaaggtcatcgcttccgttaccgagagcctgaaggctgattactccttcggtgccgactgggcacgtctggtggagatcttccagaaccccagcctgcagatgatctccttcaccatcaccgagaagggctacggcgttgctcccgctgatctggagcgcggcctgacccccgtgctggccatgggcaaggtcaccgctctgctgtacgagcgcttcaaggccggcaagctgcccctgaccgtgcagagcatggataactgctctcacaacggcgataaggtcaagactgccgtccacgcctacgctgcaaagtgggtggagcagggtttggtgcccgccgagttcctggcctatgtgcaggacgagaccaagatcaccttcccctggagcatgatcgataagatcaccccgcgcccggacgcaaaggtgcaggaaatgctggcaaaggacggctttgaggacaactacaccatcgtgaccgagaagcacaccttcaccgctcccttcgtcaacgccgaggagacccagtacctgtgcattgaggatcactacaccaacggccgtcctccgctggagctgggcggtgtgctgtactgcgaccgcgagaccgtggataagatcgagaagatgaaggtctgcacctgcctgaaccccctgcacactgccatgtccatctatggttgcatgctgggctacaacctcatctctgctgagatggcagacgaggatctgcgctcctttatccagaagatcggctatatcgaggctatgcctgttgtggtcgatcccggcgtgctgaacccctacgagttcatcggcgctgtcatcaaccgccgtctgcccaacccctttatgcccgatgctccgcagcgtatcgctaccgatacctcccagaagctggctatccgcttcggcgagaccatcaaggcttacgaggagcgcggtctggacaagtccaacctcgtgctgatcccgctggtgctggcaggctatgcccgctacctgaagggcatcgacgacaacggccagcccttcgagatctctcccgatccgctgctggctgagctgcaggccatcgtcaaccccttggaggtcaaggaaggcgagcaggacttcagctgcctgaaagctctgtacagccgtgccgacgtgttcggcgtggatctgtatgccgtcggtctgggcgaaaagatcgagggcatggtcaaggagctgtacgctggtaacggcgcagtgcgcaagaccctgcacaagtacactctggcccgctaaaactttataacgctatttccgtgacccacgctgcgcttttgctttgccgcagcgtgggtttttgttttgtgaaaattgttatgtaaaaacagactcccggagcgtccgcagacgctccgggagttcgaaagaaaaatagattttccgctgcccttatttccggcagtcgtgcaggctggcagcgggcagggcgctgcccagcaggctccatgcggcatccatgctctcgttcagcagataggcctgattcttctggacgtagatgtacaccgcctctttggtgcggtaggcgcagtacacggtgttccaggtgtagcggttggtgggctcggtcttgttctgctcaccggccatccagaccgaaagcccggcggcgtccagttccagccggtagaagggacggggcagacccagctttttgatctgcttggagaggttggcaaagaaggtaccgaagtatacggcgggcagaccgatggctacgatggccagcacggcggtcagcagcccggcaccctcccgcttgccgatctggctcaggcagatgccggcacacaccagcagaatggcggtgaacaccgccggacgctgccagcccttgttgtggcgcagcaggtcaaaagatgcaaaatcgtgaaagcttttttcgtccatctgaacggaaacgcaaatattctgggtcataaagttaccctcctttttgggcatagtaccacatttaccggcaagaagcaagcaaaagatgcatcggcggcggtgcatccggcttgcaaaccgcccgcaaggcgtggtaaaataagatattatctggggtgtatctgaaaagtcgaaaatttagtctatttctacaagcacagctggcttttgcgtgaatcagccttgaaatccacaaaggattcctgcggctatttgccttaaatcccgcttgtgcttgcgaaatattcgtcattttctttgttttcagatacaccttacgaaaaagggggaagccttgcatggaaaagcgcaactggaagcacatcgttacgctcaagcagcgcatggtgctgtgtctggcagcattttttgcggcctttgcattgcagcttgccctgaacggctatcaggcgcgggcggtgcagcaggtgcaggacgaccagatgggcaactttaacgccatcagccgctttcagggcggtgtggaaagctccatcagcattctggaagcgtaccgctgggagaacggcgagactgaggaaatgctggaaaagcttcaggcggcctgctccaccagcaacgcatggctgtggcgcatccgatccaatatggacggcttgcagaacgtcagcgatgagcagtgggtgctgtacggtgcggtggaaaccacctacggcagctacaacaccctgctggaagagctggagagctatctttccagtgggcaggaagcaaaggcttcccagctgtactacaacaaggtttcggtctgcggcgggtatctgagccagtacaccatgcagctgctgaaagcctcgattctggatgcccagactacttacaccgagatctcggagctgggcgagcggatcgccctgatgcagaccgtggtggtggcactgtgcgtggcgctgggctgtgcctccggtctgatggtcatgcggctgctgactccggtgtctcagatgatcgtggcctcccgcgctatcagccgcagccagttcgataccccggacatcccgctgcccaagcagccggagatcggccagctggcggagtccttcaaccgcatgaagcactctatggcgcagcaggtgagcaccttacaggagaaaaatgagatcgagcgggagttgcatcgccaaaagaccgaggcgctggaactgcagaaccgcatggagcgcagtcggttacagcagctgcgcagccagatcgacccgcattttttgttcaacaccctgaacgtcatccagcagatggcgggcacagagtccgcctaccgcacgcaggcgctcatcatggcgctttcccatctgctgcgttacagcctgatgagcaacgatgagcaggtgcccctctcccgggaggtgcgcgttgtggacgagtactactccatctaccatgtgcgctttggcgaccgggtgcagatggagtgggcattctcggattcgctggacctgactgagacgatggtgccgtcctttatcttgcagcctatcgtggaaaacgctttcaagcacggcatctgccccaaggaagagggcggcgtggtgcgcatccgcatgatccccctgcgggaaaaaggtctgctgtgcatccgggtgctggacaacggcgtgggcattgagccggagcagctgcagcagctgcgcacggcattggagcagcccgcaccccgctgggaacatatcggtatttataacgtggccgcccgcctgcggttgctggatgcccgctgccgggtggtggtgcgctcccggccggggcggggaactgcggtgatcctgtatctgccgctggtggagaatgaggaggaatttgaggaatgattcgtctgttgatcgcggatgacgagaggatggagcgggaggcgctggcggatatcgtcatgcgccggttcgagcatgaggtgacggtggagatggcggaaaatggccgcaaagccgccgataccgccgtgctctgggaagcagacctgattttgatggacattgagatgccgggcatgaacggcctggatgccgcccgcgcggtgctggagcagcggccggagtgcaaggtgatcttcatcacggcgtacagcctgttccagtacgcccacgaggcggtgcatctgggtgcctgcgactatctgctgaagccggtggacccggacgagaccgaggccgccatccgccgcgctatccggcagatcgaagccgggcgccgtctggccgaactggctgcggaagccccggagccggaaaccgccccggagcaggagaccgagcccgccggggaaggggagagcgaccgcaacgcactggtgatggaccatgtgcgcaagtatatggaagataactatatggccgacctctcgctggacagcgtgagcgaaattttgcacatcagcccggcgtacctttcggcgcagttcaaaaaataccagaagatgaattttctggactgtctgaccgagctgcgcatcaacgcagctaaagaactgctggccgaccccttccgctccgcagcggaggtggcctccatggtgggctacgaggacgccagctactttgcccgcgcctttaaaaagcgcaccggcatgacccccacccagtaccggaaggaagcggcaaaggcagcccgggaggtgcggctgtgacccgccgtcagctgctgcgtctgcttgcggcagccccggcgctggcagttacaggctgtacggcgcagtctgcttcttcgcaacaggagaagccgctcatcctgcgctatgcggagaaccagccggaggactaccctaccagcaaggcggcaaaggcctttgccgagcttgtggcgcagcgcacgggcggccgggtgaaggtgctggtttacagcggggcagagctgggcgcagagcagagcgtcatccagcagatgcagttcggcggggtggatttttcccgcgtgtccctgagccagctggcagagtacgagccggaactcagcgtattgcagttgccctacctgtacagcgatgcccagcagatgtggcgggtgctggacggcgacatcggcgatgagtttctggccatgctggacgggatggacttagtggggctttcgtggttcgatgccggtgtgcgcagcttctacacccgggaaaaggtgaccgggctggatgatttgcaggggctgaccatccgggtgcaggagtcggacatgatgagcgacatgatcaccgcgttgggcgcaaagccggcgcaggtggtgtacagcaaggtgtatgccgccctgcataatgccgagatcgacggggcagagaacaactggcccagctacgaagtgatgggacactacgaggtggcaccctttttcctgaaggacgagcacacccgggtgccggaggtgcagctggccagcccggcggtgatggaaaagcttgccgcgctggacgagagcttcccggaggtgatccgtgcctgcgcccgggagagcgcacagacagagcgggagctctgggcacggcgggaggcgaacgcagagcagaatatgcgcaagcggggcatctgcgtcaccgaactggacgaggccgaaaaagcccgcttccgcgcagcggtacagcccatgtacgatggcttctctgcccagcaggaactgatcgaccggatacagaaaagctgaaaaagacaccccgagaagtgcccggatggacatttttcggggtgttgttttttgctatgaatgcaggaatgtatccaactggtcagtagtgttgcacaaacaagacggaaagcgattgtgcaatgtgccaaaaacaatcttgacattctttcgaaaaataggacatttttcgaaagctcttgtttcatttcggaaaatttgctaaagtgtgtacagtcaatgaacgaaagctccggcacctgtgcgcccggagaatttcacaattatttaaggaggacgattcctatgaaaatgatctctcgtcgtagctttatggccgttgccggtgcagctaccgctgctgttgctctgaccgcctgcggtggttccaagagcggctctacttctaccgctgcttccacctctaccgcagcttctgcttctgctgctgccggtgatgcagctgctgctgccaacgatcccaaggtgactctggtctacgccgaggtcaacccgctggataccatcgttggccagaccggttctcacttcaaggagaaggtcgaggagctgagcggcggttctgtggtcgtcgatgtgcaggcttccggtgttctgggctctgagaacgacgttctggatgctattctgggcggctctacctccatcgatatcagccgtatctctgctttcgctctgaccagctacggctgcaacaagtctaagctcctgtccatccccttcaccttcaacaaccgcgctcacttctggaacttcgccaacagcgatctggctcctgagttcctgaacgagccccaggagctgggtctgcccgttcgcggcctgttctacggcgaggagggcttccgtcacttcttcaccgtcaagcccgttgcaaccatcgatgatctgaagggcatgaagctgcgtgtgtccaacgaccctgttatgaacggcatggtcgagggtctgggcgctaaccccaccgtcgtcgctttcggcgagctgtacagcgcactgcagaccggcgttgtggatggcgctgagcagcccatcgcaaactacaagtccaacgctttccccgaggttgctaacaacctgatcttggacggccacactctgggcgctgtgcaggctgttatcaccgacaacgcatggggcaagctgaccgctaaccagcaggctgctgttatggctgctgctgccgacacccagaagttcaacgctgatctgtctgagaccgctgagaacaaggttctggaagagctgcgctcctccggctgcaacgttgtggatgtggacgacaagactccttggcaggaagcttgcgctaaggtcatcaaggacaacacctctgatcaggctgagctgtaccagaagctgctggacatgaaggcataagctggttttccatccaatctaagtagtacattgcccggcgggggcccacgggaatacgcccgcaggcttcgccgggtttttatatggaggaatttctatgccgaaaatctttaccactctggataagatcagaccggcgtacgactttacctacaaggtggttctgttcatctgcaagatcctgctgatcgcagatatcctcattaccacgatgtcggtcattggccgttacgtcccctttattccggacccctcttggtctgaggaggtcgttttgacctgcatgagctacatggctgtgctgagcgctgcgctggccatccgccgcggcgcacacatccgcatgactgcctttgatatgtacctgcccaagaaagtggtcaaggcgctggacatcctgtctgacgtggccgtgatgatccttggtgtggtgatgatggcggtcggctggaactacgccaccacgctgggcggccgtggcttctatgtttccatgccttggctgagccgcttctggatgtacttcccggtgccgctggccggtgttgccatgatcatcttcgagatcgagtcgctgtataaccatatcaagagcttttttgtaaaggaggaaatgtaatatgacagttcagacactggcaatcattgtccttcttgtcagcttctttgttatgatcttcctgcgcttccccattgcatacgccgttggtctgtccagcgtgctgtgcatgctggtgcagggtcaggcactgaccgacgtctgccgcctgatggtcaagggcatttcttccttcagcctgatggctgtgccgttctttatcaccatgggtgtgctcatgggctccggcggcatctctgaaaagctgatcgcactggctgacgcctgcgtgggctggatgcgcggcggcatggccatggtcaacatcgtggcttcctacttcttcggcggaatttccggttccgcttccgccgataccgcttccatcggctctatcatgatccccatgatggtggatcagggctacggtgcagacttctccaccgctgttaccatcacctcctcctgcgagggtctgctggttcctcccagccataacatggtcatctacgctaccaccgccggtggtatctccgtgggcagcctgttcttggccggttacctgcccggcgctctgctggctatcgtgctgatgatcggctcctatatcatctcggtcaagcgcaactaccccaagggtgatcccttcagcatcaaggcttttgtcaagcagctgggcacttccatctgggcactggccgctgtcatcatcgtggtgttcggcgttgtcggcggtgtgtttaccgctaccgagtccgctgctatcgccgttatctactctctgctcgtttccgtgttcgtctataagggtctggactggaagggcgtgtggcacgctctggacgagtgcgtcaacaccctgtccatcgtgctgatcctgatcgctacctctgcagtgttcggcaactgcctgaccatgctgcatgtgcctgatctggcagcaaccgccatcaccgacctcaccgataacccctacatcattgcactgctcatcgacctgatcctgctggtgctgggcatgatcatggatatggctcccatcatcctgatcgctacccccatcctgctgcccatcgccacctccatcggcatcgatcccatccagttcggtatcatcgtggttctgaactgcggcatcggtctgctgactcctcccgttggctccgttctgttcatcggctctgccgttgcaaagcgtcccatggagaaggtagtcaaggcgaccctgccgttctacctgtgcatgttcattgcactgctgctgctgacctacatccccgacatcagccttgctatccccaagctgctgggcggctatgtaagtcccattgcaaacccgctgggccctgtgttcatccactaagcgcagcataagggaaaccccttgcatctttaagaccggagcctgtcagccctttgggctgcgggccccggtcttttttgcgtgtgcaccaaaatgcggacagcttgcacggcggggaacactatgatacaataaaatgtatagaagtttggaaggggagagaacactatggagcaaaaacgcctgtgtccgttctgcatgggggaactgccgcctgcggcgaccgtctgcccccattgtgggaagatcttagagggatgcaacccggcgggctgcctgccggtgggcacggtgctggccgggcgctacaccgtgggcgagatgcgcagtctggacggcgaaggcgtgctgtacagcggcgtggagaatctgggtggcttccgagtgaccatcaaggagtacctgccggtcaccctgtctgccgagcgcggggcggactgcgtcctgcgccccaagcagggcagcgaagtactgttcaagaccacccgcatggactttgcagacctgtaccgcgccgtccagcgcattacccccgccagcggtctggaggccgtgctggacgtggtggaggccaacaacaccgtgtatgcggtgctggaaaacttaggcggcaccccgctggagcaatggctggaaaatcgtcccgctccggtgcaggcagaggaggcctgcgccatgctgcggccggtgtttgagggcgtggcggccatgcacaaggcagggctggtgcaccgcggcatctgcccggagaatatccgggtgatgtcggatggccgctgccgtctggccgggtacgccaccgtgggtctgcgcaccgcaggcagcggtctgcacgagcagctgtacgagggttactctgcgccggagcagtacaccaccgccgagtttgaggggcgctacaccgacgaatacagccttgccgccgtcttttaccgcatggtatgcgggcaggcgcccatgcccgctgcccagcgtgtggtgtcggactctaacccccgggcacgcaccgtagagcctgccgtaccggcctatgtttccgatgtattgcagctggggctgcggctcaaggtcatggagcgcatccagaccgtgccgcagctgtatcaggcgctttcttccaaggaatataccgccgagctgacccgcaccatgaagccggagaccccgatgcatccggcgcggacagagcagagcgggcagggcagggaacacctgctcagtttgaaagggctgctggcgggcattctgatcctgctttccgttctgatcttgctcaccctgtggggcatcgtgagcagcaaggaggaacaaactccctcttcggagccgagctcggaagctgccagcagcgaggaaatgaagccccagaaccttgtgcccaactttgtgggcatcgactacgaacaaatcaagaataaccgcgagtacaccagtatgtacctgttccgggcggtgctggagtacagcgataccgtgccttccgggcagatcatccggcaggagccggaggccggcgaggtgatggagaacggcgaggtgatccagatcgtggtcagtcagggcccggagaaggtggagatgcccaagatcgtcggtgcatcgcaggataaggctattgagatcctgagcagccgggggcttgtggccagctgctttatggtggtgaatgatggctcctacgctacgggctgtgtggtctctgccagcgaggaagagggcgccatggtcacggtgggcacggtgatcactgtgtatatcgccgcagaccccagtgtgcagatcactgccaccccggaggagcctgccgctaccgagcctaccaccccggaaacgcccccggagggcagtacagagccggaatacgataccaattaaacagcatacaacaaaagcagaagcgggagccttgaacgggctcccgcttctgcttgtttaggataggaaagagaatggcaaattaaaggttcgagtagcccattaggcagcggtccacctcggcggcgcaatcgcggccctcgcgcagaccccacaccacaaggctctggccgcggcgcatatcgccgcagacgaacaccttgtccacgttggtcttaaagctgtggtcggctacattgccccgggcggtcagctccaccccaaaggcatcggctgtgtagttttcgcagccggtaaagcctgcggcgataaacgccagctggcagtcgtaggtaaattccttgccggtgggcaccatgctggtgcggccggtctcggggtcgcgctccggcttcaggcagctgatgacggcaccggtcaggttaccggcctcgtccttcaaaaactccttgacggtggtctggtacacgcgcgggtccttgccgaacttggcaatgcactcggtctggccgtagtccaccttcagcacccggggccactccggccacgggtttgcggcggtgcgctcgacagggggctgcggcatcatttccagtgccatcaggtcggtgcagccctgccgcagagcagtgccctgacagtcgttgccggtgtcgccgccgccgatgaccagcacatttttgccggctgcgttgatggccttgccgtctgcaaaacccgagtccagcaggctcttggtcacgctggtcaggtagtccaccgcaaagtgcacgcccttggcgtcccggccgggcacgttcaggtcgcggggcttttttgcgccgcagcacagcactacggcatcaaaatctgccagcagctgctcggcgggcacggcaccgcccacatccatgccggtgcggaacacaacaccttcggcctgcatcagcttgacccggcgctcgatgactgccttgtccagcttcatgttggggatgccgtacatcaaaaggcctcccacgcggtcggcgcgttcaaacaccgtgacggcgtggccgcgcttattcaggtactcggccactgaaagccccgcagggccgctgcccaccacggcaacgctcttgccggtgcgggtcggcggcggggtggcggtcagccagtttttggcgtaggccgtctcgatgatggcgtgctcgttttcgcgcacggtgacgctgctgccggtcacatccccgcaggtgcaggcggcctcacacagggcggggcacacccggctggtaaactccgggaagcggttggtggccatcaggcggtggagcgccagttcccacttgccgtggtacaccagatcgttccactccgggatgagattgttcagcggacagccggaggccatgccgccgatcatcatgcctgcctgacagaagggcacgccgcagtccatgcagcgggcggcctgcgtctgctgctgctcccgcgagagccagatgtggaactcgttgaaattttcaaggcgctccagcggcgcaacgtccgtgctggtcttgcgcgcataatccataaatcctgttgtcttacccatgctgctgcccctccttacttatgcttctgcactgcataaaatgcttcgatctgtgcctgctcgccgtccagaccacgctcctctaccgaggcgatgacccgcagcatgcggtcgtaatcgtaaggcagcacctttttgaatttgggcaggaacgcactgaaattgtccagaatttccttgccgcgcggagagccggtggcctccacatgggcgcggatcagctccttcagggtggcaacatcgtacttgtgctccaccggctccaggctgacggtctccttgttcacccgctggtagaagtcccagttttcgtctagcacataggcaatgccgccggtcataccggctgcaaagtttttgccggtctggcccagtaccaccacggtgccgccggtcatgtactcgcagccgtggtcgcccacgccctctacaacggcggtcgcgccgctgttgcgcacgcagaagcgctcgccggccacgccggagatgaacgccttgccgctggtagcgccgtacagcgccacgttgccggtgatgatgttctcctcgggcttgaagtcgatgccctgcggcgggcgcacgatgatcttgccgccggaaaggcccttgcccatgtagtcgttgcagtcgcccaccagctccagcgtcaggccattggggataaaggcaccaaagctctggccgcctgcaccggtgcagtgcacggtgtacacatcgtccggcaggtcgttgccgtatttgcgggtgatctcgctgccaaagatggcaccaaaggcgcgatccacgttggaaacattcaggctgacgctctggggagccttgctgcccagcttgaacttcttcatcagcaccttcatgtccagcgtgttttccagatggaagtcgtagctgtcctccttgataaagtggacgttgctgtttgcaatggcggggttgtgcaggatgcagtccagatccagctttgcggcgcggctgcccggggcagcgggcttgacccgcagcaggtcggtgcggcccaccagctcgtccacggtgcgcacgcctagctttgccatgtactctcgcagctcctctgccacaaaggtgaggtagttgatgatgtactccggcttgcccttgaagttcttgcgcagctcggggttctgggtgcagatgcccatggggcaggtgtccagattgcacacacgcatcatcacgcagccctctgccatcagcagggtagtgccgaagccgaactcctcggcgcccagcatgcagctgatggctacatcccggccggacagcagcttggagtcgctctcaatgcgcacacgggtgcgcagaccgttcaggatcagggtctggtgggtctcggcgatgcccagctcccaaggcagacctgcgtgcttgatggaggtgcggggtgcagcaccggtgccgccgtcatagccggacaccagaatgacctgtgcgccgcccttggcaacaccggcggcaatggtgccgacaccggcctcgctgaccagcttgacgttgatgttggcattgcggttggcgtttttcaaatcgtagatcagctctgccagatcctcgatggagtagatatcgtggtggggcgggggagagatcaggcccacgccggtggtgctgtggcgggtcttggcgatccacggatacaccttggcaccgggcagattgccgccctcaccgggctttgcgccctgtgccagcttgatctggatctcctcggcgctgaccagatacttgctggtcacgccaaagcgggcagaggccacctgcttgatcttggaattgctctcgctgtggtaacgctcttcgggctcgccgccctcgccggtattgctgcgcccgcccagacggttcagggcaatggcaatggtctcgtgtgcctcactgctcagtgcgccgtagctcatggcagcgcccttgaaccgcttgacgatgctggagaccggctctacttcttccagcgggatgccgccgtctgcggcgtagttgaagtccagcagactgcgcagatgcacaccctcggcacccatgttgtccaccgtctgggtgaactgcttgaaggtgtcgtaatcgccggtgcggcaggctttctggaacagatggatggtctgggggttgaacaggtgctcttccttgccgctgcggaacttgtgggcaccgctgtcggccagctccatgttgatatccagccccagcgggtcaaaggcggcgttatgcagcgcttccacatcggcctgaatgtctgccatgctgatgccgcccacgcggctcaccgtgccggtgaagtatttgtcgatgacctccttcgagatgcccacagcctcgaagatctggctgctctggtagctctggatggtggaaatgcccatcttggaggcgatcttcacgatgccgttgaggatggcgttgtcgtagtcctgcacggcggcgtaatagtccttgtccagcagaccctcgtcgatcagctgcccgatggtctcgtgtgccagataggggttgatggcgcaggcaccgtagcccagcagggtagcaaagtggtgcacctcccggggctcggcgctttccaaaatcagcgccagtgcggtgctctttttggtgcggatgaggtactgcgacaccgccgaaacagccagcaggctgggaatggtcacatggtattcatccacgtcccggtcggacaggatgatgatgtttgcaccctccttgtaggcgcggtctacctccagaaatacccggtcgatggccttttccagactggtgttcttgtagtagttgatggataccgtagccaccttgaagcccggcacgttcatgtacttgatcttcaacaggtcggtgttggtcaggatagggttgtgcaccttgagcaccttgcagttctcgggcttatcctccagcagattgccgtgggcaccgatgtaaacgctggtggaggtgaccaccttttcccggatggcgtcaatgggcgggttcgtcacctgtgcgaaccgctgcttaaagtagttgaacagcgggggatgctggctgctgagcacggccagcggggtgtcggtacccatggcaccggagggctctgcgcccgcccgcgccatggcaaggatcatggtgttcacgtcctcgtacttgtagccgaacaccttctgcagccgggtcagctgctcgccggtgtagctttccaccttcacgttggggatcttcagcccgctcagctgcaccagattgcggtcgatccactcgccgtagggctcgcggctggcgtaaagctccttcagcttttcatcgtccaccacctcgcccttgacggtatccaccagcagcatcttgccgggacgcaggcgctccttgaccagaatgttctccgggtcgcattccagcacgcccacttcagaggacaggatcatgcgaccgtccttggtgatgtagtagcggctggggcgtagaccgttgcggtccagtactgcgcccatcacatcgccgtccgagaacaggatggcggcggggccgtcccacggctccagcatggtggcgtagtactggtagaaatcccgctttttctggctgatgttcttgttgttctcccacggctcggggatggtgatcatcacagccagcggcaggtccatgccgttcatcaccataaactccagagtgttatccagcatggcggagtccgaaccggaggtgttgatgatgggcaggatcttgttcatatcgtcctgcaaaatggggctggagatgctctcctcacgcgccagcatggcgtcggtgttgcccttgatggtgttgatctcgccgttgtgcaggataaagcggttggggtgtgcacgcatccagctggggttggtgttggtagaaaagcggctgtgcaccatgccgatggcggattcataatccgggtcctgcagatcagcgtagaagcggcgcaggtcgtgcacgaggaacatacccttatacacgatggtgcggctggacaggctgggcacataggtgccgttgctggcctgctcgaacacgcggcgcacgatgtacaggcggcggtcaaactcaatgcccttgcttaccttggcgggctttttgatgaagcactgccagatggcgggcatgcagtcccgcgccttctgacccacggcatcggggtctacgggcacttcgcgccatgccagaaactccagtccctccttgcgggtgaccacctcgaacagcttcatggcctgtgcccgcaggtgctcgttctgggggaagaagaacatacccacgccgtactcccgctcgttgcccagccggatgttcagctcctcggccaccttggagaagaacttgtggctgatctgcagcaggatgcccacgccgtcgccggtcttgccctcggcgtccttaccggcgcggtgctccagccgctccacgatggacagtgcatcgtccaccgtctggtggcttttacgtcccttgatgtccaccacagcgccgatgccgcaggcatcgtgctcgaactgtgggtcgtacagaccaagggtggttttctgctctgtaaagttttccatagtctttcccatcctttttacttgtttaccgggggctgcggcaccctccgcagctttttatcccctgcaaaaagaaaaaagcgccccgcaagggcataggatgcccctgcggaacgcctttgttccgatacctgatattatacagattcctgaaaaatcttcaagtgacagctgcaccaaatatgctacacacattgcgccgcatcttgtgcgaaacgccgcgagcccccgcagctgtgcgcggtatacaagcaaaaccgccgcacccggcgttgtgcacgcgggtacggcggtttggaggaatttgccctgagtgatgcggaacactcaggactcaggaatgctttgatttgcgggtttgttgcaaaataaccaaacgaaacctcacccgcccagaatggcctgcaggtcggcttccggggtggcaatgggcttgaggccgtaccgttcctgcagggtgcgcaccacccccggcgagaggaacgggggcagggtaggccccagccggatgttccggatgcccagcgccagcagcgcgatgaggatgcacacggccttctgctcaaaccagcacagcaccagcgagaggggcaggtcgttgacgccgcagccaaaggcgtcggccagcgccaatgcgatgcggatggcgctgtaggcgtcattgcactggcccacgtccaggatgcggggcaggccggtgcccggcacggtgccaaggggcaggtcgttcaggcggaacttgccgcaggccagggtcagcaggatggtgtcgggcggggtaaggcgggcaaactcggtgtagtagcggcggctgggccgggtaccgtcgcagccgcccaccagaaagaagtgccgcagcttaccgtcccgcaccgcctgcacgatctcgtccgcgtgctgcagcacggcggtgcgggcaaaaccggtggtcaccgtggagccgccgttcaggccgggtagcagggtgtcctgcgcgtagccgcccagctccagcgccttttcgatcaccggggaaaagtcgcgcccttcgtcgatgtggggcacgccggggtaagccaccaccgaggtggtgaacacccggtcggcgtagctggcgcgcaggggcatgatgcagttggtggtgaacaggatgggcgcggggatgtcctcgaactcccgctgctggttctgccatgcggtgccaaagttgcccttgaggtgggggtagcggcgcttcagctccgggtagccgtgggcgggcagcatctccgagtgggtgtagacgttgacgccccggcctgcagtctgttccagcagctgctgtgcgtcgtagaggtcgtggccggaaatcacgatgaacggccccttttcaatggtcaggggcacctgcaccggttccggatcgccaaacgcgccggtgttggccgcgtccagcagctccatgcagcggtagctggcttctcctgtggcctgcaccagctgccacagggcgtcggtggtctggccggggtcgcccacggcctgcagggcggtacagaagaaccggtccagctccgggtcgatgcggcccagcacccgggcgtggtagttgtaggcggccatgccccgcaggctgaacagcacaaagcatttcaggctgcgccggtcggcatccggttcccgccagagggcctgcatgtcgtagtccgggccggtgccggggctggcgtcgtgcacccggcgggtcagcgcgtccacggcggcggggtcaaagttcacgttggtaatggtggtgaacagcccctgcatcagcagccgggcctgttccggggccgggccgcgccccgccgcgatgagctgcccggcaaacgcgatgagcgccccggtgagccggtcctgtgcggcggctgtctcggccgacttgccgcacacccccgctgcgccggtgcaggcggtgcagcccgccgcctgctcacactgaaaacaaaacatctgctcgtccatacaaaactccctttctgccataagatactgccagtgtgggcagagcggggcggggttataccaaaaaagagccgcacccctgcgggcgcggctcttggacgatgcagtatgacttagtaggtgatgccctgtgccatcatggcggtagcgaccttcaggaagccggcgcagtttgcaccgaccatcaggttaccctcagaaccggcagccacagaagcgtcgtaggaagcgtggaagatgccctccatgatgcccttcagcttggcatccacttcctcaaagctccagctcaggcgctcggagttctggctcatctccagaccggaggtagccacgccgcctgcattggaagccttggcgggtccgtacaggatgccgttggacaggtagacctcgatagcctccggggtgctgggcatgttagcgccctcgcagaccacggtgcagccgccctttaccagagcctcggcagactccttgttgatctcgttctgggtagcgcagggcagggcgatgtcgcaggggacagtccaaacctgggtgcaatcagccacataggtagcaccggcgtgggtctcggcgtactccttgatgcggccacggcgcacttccttcaggtccttcacataggccaggtcgatgccgttggggtcgtagacgtagccgttggagtcggacatggtaaccaccttggcgcccatctgggtcgccttttcgcaggcgtagatggccacgttgccggagccggagatgactacggtcttgccctggaggctgtcgttccgcatgcacttcagggcctcagcggtgaagtagcacaggccgtagccggtagcctgggtacgggccagagaaccaccaaaggtcaggcccttgccggtgagcataccgccctggaagctgttggtcaggcgcttgtactggccgaacagatagccgacctcgcggccgccgacaccgatatcaccggcggggcagtccacgaactggccgatgtggcggtacagctcggtcataaagctctggcagaagcgcatcacttccatgtcgctcttgccgtgggggtcaaagtcagagccgcccttgccgccgcccatgggcagggtggtcaggctgttcttgaaggtctgctcgaagcccaggaatttcaggatgccctgattgacagagggatggaagcgcaggccgcccttgtaggggccgatggcgctgttgaactgcacgcggtagccgcggttcacctgcaccttaccggcatcgtccacccaaggcacacggaaggtgatgatgcgctccggctccaccaggcgctcgatcagaccggccttctcgtactcggggtgcttttccacaacgggctggatgctctccagcacctcgcgcacagcctgcaaaaactcgggctcgttggcgttgcgcttttccagaccctcgtaaacacgcttcaggtattcattcgtcagcataatagaatactccttttcccaattactctataaatttgaaaaagcggaaatgcccctgcccgccgcacagcgggtatatccttgcagatgccgggcgcttccggttctccatgcttgcacggcacgcccgcaatggcgggcaatgcttactttattattataaagctttgcggtgggttttacaatagcaaaaagcagaatttgtttaaaaaaacagataaaaagtcacagctgcttcacaaaacgaaaattaaaagccggaatgtgccgcgaaccttgttttttaaagtgcgctgccgctccaaagccgcacggaaaagaatgtcttttgcacggcagcgggcttatctaagcaaaaagccctgtgtcgcaacgggcacagggtggggtgcagttacttcttcagcagcttttcgcaggcgtctgcggcaccttccaaaaattcgccgccataggtctcgatcatgccggcatcggaaagctctgccagtttggggtcgatggggcacttggccagcacaggcagatgatgctttgcggccacctcgtccacatggctgttgccaaacacattgatgtgcttgccgcagtccgggcagacgatgtagctcatgttttctacgatgcccagcatgggcaccttcatcatctcagccatgttcacggcctttgccacgatcatgcttaccagctcctgcgggcttgccaccacaacgatgccatccaccggcaggctctggaacacggtcaggggcacatcaccggtgcccgggggcatatccacgaacaggaaatccacgtccttccagaccacatcggtccagaactgcttgaccgcaccggcaatgaccgggccgcgccacacaacggggtcttcctcgttctccaccagcagattgatgctcattacatcaatgcccatgcggctctggatgggccagcagcccttgtcgtccgccatggcacggccatgaatgccgaacagcttggggatggacgggccggtgatatcggcatccaaaatgccacaatggtagccacggcgggccatggcacaggccagcagagcgctggtcatgctcttgcccacgccgcccttgccggaaacaacgccgatgacctttttcacactgctgttagggttgggggcatcgtgctgcggagcggcatcgcgggaagaacaggctgcactgcaattagagcagtcatgggtacattcttcgctcattctctttgtcgcgcacggcaggggcaggacccgggcggtgcgcttcctccttgctcaaaatacaggcgggggcttacgccctgcctgaccactgttaactataccataaaaagtgcgcagaaacaacccatagcgccgctcatgttttgcaaagccgctgcataggctgaaccgtgaacgcccgttccggggcagggggaggtgcagggtgcggcagagttattttaaaaacgcggcgctgcttaccggctcggacgtggtgctgcggctggcaggcatggggctgcgcatctggctggccaacgccttgggcggggtgggtatggggctgtatcagctggtgctggcagtgtacgggctgttcgtcacgctggccacggcgggcatctcggtggccgctgcccggctgctgaccgaggagctcagccgggataaagccgctgcgcgcgggatgctggtgcggctggtgctggcagggcttacgctgggcgggcttgccatggtcgctcagcttgccaccgcaggccttgcggcaaaatggtggctgggggatgtccgtgccgctgccgcgctgcgcacctcggcgctgggactgccatggatggctgtctcggcagtgctgcgcggcttttttctggcgcggcggcgggtggaacccaacgtgctcagccagctggcagagcagacagtgcgtattgccgcggtggtgtgggcgctttcccgcacgcagggctggccggacggcagccgctgtgcactggtgctggctgctaccgccctgagcgaggccgtatccaccgccctgatgacactgttttaccggcgggaggcggcacgctgcttcggcagcacagcgccgcgcccgccaagggaggcgtcccggcggctgtgggacatcctgtggccggtagagggcggcagggtgctttccagcgcgctgcacaccgccgagaatatgctggtgcccgcctgccttgcggtgtatctgggggcttccggcgggcgcaccgccgcgctggagcagtacggcaccttaaagggcatggcgctgccgctgctcaatttcccctttgggctgctgggcagtctggctgttttgctgatgccggagatcacgcaggcgcatatcgaggggcagaccgcccggctgaacgccctgctggaccggatgctgcggcttacgggatacttctccatgctggcgggcacgctgttctgggtgtggggcaggccgctggcgcagctgctctaccatagcccggaggccgggttctatctggagacccttgccccggccatgccgctgatgtatctggaaagcatggtggacggcgccatgaagggcatcggggagcagaaggccgctttccggtacagcgtgtgggacgcggtgctgcgcattggtggggtggcggtgctgctgccccggtacgggatgcggggctttctgacggtgatcttactttccagcttttacacctgcgcagccaacaccgggcggctgctgctttccagcggtacagggcacgctttccgccgctggctgggtgcgccgctgctggctgctgccgctgccggtgcggcagggcggggtgtgcgccgggcgctggctggctttccggctcaagggttgccggggcagctggcagtgctgacagtgggcggtacggtgacggtcctcgtgtttttactggcggcgttgccgctggggctttgggaggagctgcgggcggtgctgcggcaggcaaagaccgggaaaaacaggggaaagtgataaaaacgtaaattttctggacacaggcggggattgtgagtataatacaaacgtgtagttgtatccttccggcattgccgggggagaacactgccgaaaaagcagcgcagggcaaacccttggcgctgagagggaaaaagaggatcgtaagtgaaagatagaaccaagaataccccgcaggtgctgctgcgccgtgcgctgctggtgctgctggatgcagccattgtggcattcagcttttattttgccctgctgctgcgggcagacggtgccgtggaggccgggtggtggccccacaaccgtgccctgctgtacgaaaacctgccgtggatcgtggcggtgtatattgtctgctttctggcaggcgggctgtactcggtgctgtggaagtacgccggcgagcgggatctgatccgccttgccggaatgatcgccgtgcccaccgctgtggtgtatgtggtgaaccgccgctttatccacggtgtgctgttcaattccgccaactgcatggcctcggtgctcatctttttgttcatcggcggcagccgcttggcatggcggctgtttttgaaccatccgctgggtgagcggatgcgcaaagtgcccgccaaggaccccaaccgcccggtgttgatcgtgggtgcgggcgaagccggtgcatgggccatcaatgtgtgcaaatccaacaaggaatacggccacgccgtggtggcggtggacgatgaccccgcaaagctgaaccagaccatccacggcgtgccggtcaagggcacgctggaggatatcccggagctgtgcacgcgctacggcatccacagcatcatcattgccatcccaaccttaaagggcagcaagctgagccacgttatcgacctgtgcgtcagcacccactgcgcggtgcagctgctcagtgacccgcagctggtgggcagcggcgcaccccagcaggaggtgttccgcgagctgaaccccgccgacttcctctcccgcgaggaggtcacgctggataccgacaaaatttccggctacctcaccggcaaaacggtgctggtaacaggcggcggcggctccatcggcagcgagctgtgccgtcaggtcatgcgcttcaagcccggcaagctgctcatctttgatatctacgaaaactgcgcctacgagctgcagatggaactgcagcagaagtacggccgcgatatcccggtcacggtgctcatcggctccatccgggataaaaaacgtctggacgaggtttttgatacctaccaccccactgtggtgttccatgcagcggcgcacaagcacgttccgctgatggaggtaagccccgccgaggccgtaaagaacaatgtgctgggcaccaaaaacctgctggtcagtgccagcgagcacggggtggagcgctttgtgcagctttccaccgataaggccgtgaaccccaccagtgtcatgggctgcaccaagcgcatctgcgagatgctcatccagacctttgcgggcaacacggatatgaagtgtgtggcagtgcggttcggcaacgtgctgggcagccacggcagcgttatcccgctgtttgaagcgcagatcaaaaagggcgggccggtcactctgaccgaccccaacatcgtgcgctactttatgaccatcccggaagcagcccagctggtgctgcaggcgggcgcactggccgagagcggcaatatctatgtgctggatatgggcgagccggtgcgcattatggatctggccaagcagctcatccgcttttacggctacgagccgggcgtgaatatggagataaaaatcgtgggtctgcgccccggcgaaaagctttacgaagagctgatgatggacgaggagcaggacaagatgcgccgcacccagcacaacaagatctttgtggcaagcccccgcaccattgatctggccgagttctacgagcagctgcaggcgctggaagccgctgccgcccacaacgacgagggcgtggtgcgccagctggcggccatgatccccacctttacccccacccgggagaacctgaaactgtaactggttgaactgcggcactgggccgcataggatagatcgcaggccggaatatgccgggctgcgcaaaacgagagggatgttattatggaaaagaaaccgtttctgaccgaggcgatggcacagcagatcatcgaggatgtgcccacgccgttccacgtctacgacgagaagggcatccgggagaatgtccgccgcatcaacaaggccttcagctggaacaagggcttcaaggagtactttgcggtcaaggcactgccgaaccccgttatcctgcagatcctcaaggaggagggctgtggcgtggactgctcctccctgaccgagctgatgctcagcgaggcctgcggctttaccgaccacgagatcatgttctcctccaaccagacccccgtggaggatatgcagaaggcctacgagttgggtgcttatatcaatctggatgacgccaccatggtggagtttctggagcgggtggccggggtgccgcaggaaatcttctgccgctataaccccggcggaaccttccagctgggcgagagcgaagagggttttcaggtcatggacaagcccggcgatgccaagtacggcatgaccgagcagcagatgatcgacagctacaaaaagctgatgcagaagggcgcaaagcagttcggcatccatgctttcttggcctccaacaccatctcggacgcctactacccggagctggcaggcatcctgttccagctggctgtccgggtgcagcaggctaccggtgcgcacatcagctacattaacctgtccggcggtgtgggcatcccgtaccgcccggagcagaccgagaacgacatcatggccattggcgagggtgtgcgcaaaaagtttgaggagatccttgtgcctgccggtatgggcgatgtggccatcttcagcgagatgggccgctttaccaccggcccctacggcgcactggtgtccaccgtcatccacgaaaagcacatctataaggagtacatcggtctggatgcctgcgccgcaaacctgatgcgccccgccatgtacggcgcttaccaccacatcaccgtgctgggcaaggagaacgagccctgcgaccacaagtacgacgtggtgggcggcctgtgcgagaacaacgacaagtttgccgttgaccggatgctgcccaagatcgacatcggggatatcctttacatccacgataccggtgcccacggctccgctatgggctacaactacaacggcaagctgcactgtgccgaggtgctgctgtgcgaggacggctctcaccggctgatccgccgcgcccagaccccccgcgattactttgcaacgctggactttctgcccttcctcaagcccctgttcgaggactgatccgctttttgtatcctgataaaaaagaggtgtgacccatgttttttggctttcagcttacccttggcctgatgatggccttttacggtttttcggtgatgaaaaatccccgcgtgtggggcgatcaggggcgcagggcggtcaaggccgaaaactttgaggaatactgccgccagaacggccagttctttttaaaggcaggctgcgttgtggcggtgatcggtgcactggatgccctgatcacgctggatgccctgttgtacgctctgctgtacatttttggcttggcctttgccttctacccccttacccgctggtgcaagcagaacgaaggcttttcctggccatggccccacgtccagagcgagaaaaagcgcatcaaggaactgcgccgcgaacagcaggcacaggagaacgaggaaaaaggggagaagtgatccccccggataaagcatagacagcaaaagaacaactcccggtcacgctgcaaccgcaacgtgaccgggagttgttttcgtttactgcttgtggagaagcgggtgcttactcggcgtccttcgggtcggtcatcagttccttgatgctgggcacaacgccgcccagattctgcagctcagaggggatgatgatcttggtggccttgccgttggcaaccttcgccagcgcctcaaggctgcggatggccagcaccttgtcgctgggcatggcctcgttcagcaggcggatggcatcggcgttggccttctgcacagccagaatggcctgtgcctcgccctcggcctccagaatgcgctgctgctttacggcatcggcgcgcaggatggcggattccttttcgccttcggcggcggtaatggcagcctgcttttcaccgtctgccttcaggatgacggcgcgcttctcacgctcagccttcatctgcttctccatggcctcctgaatttcccgcggcgggatgatgttcttcacctccacgcggttcaccttgatgccccacttgtcggtggcttcgtcaaggatggcggtgatcttgccgttgatgacatcgcggctggtcagggtatgatccagctccatctcaccgatgatgttgcgcagggtggtggcagaaaggctctcgatggcggcaatgggctggttgacaccgtaggtgtacagctttgcgtccatgacctgaaagaacaccaccgtgtcgatctgcatggtcacgttatcgcgggtgatcacgggctgagggggaaagtctgccacctgctccttcaggcttacctttttggcaatgcgctcaataaagggaatcttgacgtgcaggccggcaggccatgtttcggagtagctgcccagccgctcaatgacatacaccttggactgcggcacgatgacgatgttggaaacaatgaccagcaccagaacaaaaacaagcgcaaggatgacaaaaaacagaaccataatacatctcctttgtcaggttgttgtgtgggggttgcggctttcggtcagaacaggctctacgatgagcagggtgctgtggatctcggtaacgcggcaaagcgcaccgggtgtgagggtgtcgccgggggtggcgcagcgggcgttccagtccacgccgtccagccgcacccggccggggacctcggcagtgacaggggaaagcacgatggcctcccgtcccagattgcggtcgccgttggtggcggtatgcttgagccgcagctttgccgccagcgggcggaaggctgccagacacaggatgcttaccaccagaaagaccaccgcctgcacccggaacgacccggtgaacacgcagcacagcaatgcggcggcagagccgatggcaaaccagatggaggtcatattaaaggtactggcctccagtgccagaaagcccacggctgcagccagccagagaatgggggagatctgcatggtatgttacctccttatgctgctattatacggcatccccttgggggaaggtcaagagctttttactggaacgttgcacagaaaacaaaatatagacaaaaatgggaaaaaagcccgtaaatcactgcgtcccaccctgtgaaaaaagtaagtcgggaggctccgcagagcctcccgacttacaaataaagaatagcatcccgctatggatgctcagagcgcaagcggagagcattttaaatggttacagcctcgcaggcatcactggatatcgtagtagctgtggttggggttatggccgttttcctccaccacgatggtgaagcccatggggtttacctcagtgtgcttgccggatgccagcggctccacgatgatgtgctcagagcggttcacaatgatttccgcagtctcggtcttaccgatgcgctggtagtgcaaaatgccgtcctcggcccgcagcacccgcagctcaccggtgcggaaggcttcgcagctgtggcgcagctgcgccagctgtgccagcaccgggcgcagacgctcctcgtggctgtcccagcagaagaaggcgcggttgaaggggtcgcggtagccctgcatcccgatctcgtcgccgtagtacaggcagggtacgccgggcagggtgtagatgatggcatacgccatgcgcaggcgcagcatcccttcctcgtaggcttcgccggtcacgctgcggccgctctgccactcccggccgcgtccgttggcgggctcgtccgcaatcacggtcaaagcgcgctcggtgtcgtgagtggacaaaaagttcagtgccgtgttgatggcaggggcagggtagtgctcgcagatggaaaggatctcgttggcggcctgctgggcgggcttgccttttacaaaatccagcacggagttcttgaaggggtagttcatcacgctgtccagccccttgcccagcaggtaggtgcggcggtggtcaaagccgaacttggtggtggcgtcctcccacacctcgcccagcaaaaacttttccgggcttacccgcttgacggcggtgcggatcttctcgataaacgcgtccggcagctcatcggccacatccagacggaagccggcagcaccacggcgcagccatgtgtcgatcacgccgccctcgccggtgatgaactccacaaaggagggggtctcctcgttgacctccggcagggtctcaaagccccaccagctgcggtagccgcccttgtacttggggtcaaaatcataccagctgcggtaaggggagttggggtcgcggtaagcgccgccctcgccgtagcgtccctcgcggttgaagtaccggctgtcggagccggtgtggctgaatacaccgtccagcacgatgccgatgccgtacttggcggcctcgcggcagagtacctcaaactcctcgttggtgcccagcagcgggtccacgttcaggtagtcggcggtgttgtagcggtggttggagtgcgcctcaaagatggggttcaggtacaaataatccacgcccatctcccgcagataggggagcttgatgcggatgccctctaaatcgccgccgaagtagtcctcgttcaggtggccgccggtctcgttgggctgccagaagggctcggcgtgcttatcggcctgatacagccggtccgggaagggcatgggcttgttctcaatgccctcgcagaaccggtccgggaaaatctggtagaacaccttgcccttgatgcactccggcgtctggaaatccggctcgtagaccgtgatctgccagctttcaccctcctgccagctgaccacgccgcagttatcggccccgcgcacgatgcggcggaagtcagtatacaggtcaaagtaatagaagtataagcccgggtcgcccagcacaacatccaccgaaaagtggttctgatggggggtctggccgtcaaatttcatgcggtagtgcacgggcacatcgtatttgccctccttttgcagcacaaggtgcgggtccacatagcccagttcctcggggatgcacagggacaggtgcacggtctgcccggcgcgcacggcaccaaagggctgcttaaagtaggggtcgtagctgttgaacagacaagacaaaaaagatcgtcctttctcaaaaaagccccggcgggcgaaatgccaccggggctttgcggttttacaggggaaaattacttgcccatgggcacgggggaagcgtaccagatatcgcgggcgtagtccagcacggcgcggtctgcgctgaagatgccgctgttggcaatgttcttcaggctcatgcgggcccaggtctcgcggtcagcatacagcttctgcaggtcggcctgtgcacggcggtagtccttgaagtcggccatgaccatgtacgggtcgctgctgcgcaggttctcggtgacctcgtggaagttctcgccgttccagccgcgctccaggaagttcagggcgctgttggcaacgtcgtcgcccatgataaaggcgttggggtggtagcccacccgcttcaggttgttcacctcgggggtcagcataccgaagatcagctcgttctccttgccggcagcatcggcgatctccacgtttgcaccgtccagagtgcccagcgtgatcgcaccgttcagcatgaacttcatgttgccggtaccggaagcctcggtgcctgccagagagatctgctcagaaacctcggcagcgggcatcaggtgctcgctcagggagacgcagtactcttccagatagaccacgcgcagcttgtcgcgcacggcggggtcgttgttgatcagatcgcccagcttgcagatcatgcggatcatctgttttgccatgtagtagccgggagcagcctttgcgccgaagatgtaggtcttggggataaagtcagcgttggggttctccttcaggtacaggtactgtgcagcgatgttcagcgcattcaggtgctggcgcttgtactcgtgcatacgcttgacctggcagtcaaagatggaattggggtcgatgacctgaccggtgctctttgccagatagcttgcaaagtccttcttgttggccagcttgatctcgttcagcttcttcagcacggtcttgtcgtcggcgtacttgttcagcttggtcagatcagaagcatcgtgcttgtagccgtcgccgatggtctcgtccagcagcttgcacaggccggggttagaggccaacagccagcggcggtatgcaatgccgttggtcacgttcttaaaggcgttgggcttgaacaggtagtaatcgtggaaaacgctctccttgatgatctcactgtgcagcttggaaacgccgttgatgctgttggcggtgtaggcgcagatattggccatgcgcacctgattgtcgccgatcagtgccatgtagtcgatcttgccctgatcgccggggaaggcctttgccagctcctcgcgggcgcggcggtccatctccaccacgatctggtagatgcggggcagggtcatcttgaagatgtccacgttccacttctccagagcttcggccataacggtgtggttggtgtaggagaacaccttctggcagatgctgaaggccttgtcccagtcaaagccgcactcatccagcaggatgcgcatcatctcggggatggccagggtggggtgggtgtcgttcagctgaatggcgaccttgtcgggcaggttctccagcgtagcgtagctggacaggtggttctgcacgatatcgccgatagaagcagcggacaggaagtactgctgacgcaggcgcaggatcttgccctcaacgtggttgtcgttggggtacagcaccttggagatgagctcagcgttggcgttcttgctcatagcagtgttgtagttgcccagagagaagctggacatatcaaagtccggggcctttgcctgccacagacgcagctttgcaacgccctttccatcgtagccctgcacatacatatcggagggaatggccatgacgctgttgtagttggtgtgctggatgtagtggaagccgttgtcccagttctcgtggatctcgccgtcaaagcggatctccacagcctgatccgggtggctcttcagccacacctgaccgccgggcagccagttgtcggcgcgctcctgctgccagccgtccacgatcttctgcttgaagatgccgtactcgtacaggatggagtagccggtgccgcagatatcggtggtggccatgccgtccagatagcaggcagccagacggcccagaccgccgttgcccaggcctgcatcgggctcttcctcaaaaatgctgtccagattgatgtcggcgtcggccagtgccttcttggcaacctcgtccagacccagattgaacaggctcatcttcaggctgcggcccatcaaaaactccatgcagaggtagtagacctgcttggtgccggtgccgatagccttggactggaactttttgtggttctcgctcatcatctgacggcagatcagagccagagaacggtagatctgctggttggaggcaacattcagctccacaccgtactcactggtgagcttgtcctgaagaattttgccaaattcttttgatgtcatagtgtgctcctatccgcataagcgtttgctttgctaaaataattgagtagataatagcagcagaaacgttccctctttcgtccggctgccaacataacaaagttattataatatgaacgatttataaatgcaaggaaacaggcgctttttttccgtaactgctattttttcaggccactttctgacaaatatgccgaaatttcaaaaattccactttttcttgcggcgtatttatattataatagaaggtagaactgagccgcgaaacgtttttcggggagtaattccggcagtaatggggcgggaaactccatcgaaacgttttcaaatgccgaaacgttaccgggaacgataccaaatcccggcaagatgcagaacaaacggccttgcgccgtacagatacaggaaaaaaggggaaaacaccatggtaaacaaggtaagggtcaacattgcaggcacaccgtatgctatcgcaactacagattcggaaaagtacatcctgggtcttgccaaaaagctggacgaggacatcacaaagctgctggacaccaacgataacctctcggtgaccaaggcggcggtgttctgcgcgatggattatctggacgaataccgcaagagcaccggcagcgccgagaatatgcgcagccagattcaggactacattgcagatgcagcccgggcaaagctggctgaggacaaggcactggcggaaaacgccgtgctgcgccgggaagctgccgccctgcgggagcagctggccaaggagcgccagcgcgagacccgccgggaggagcgcgccgcccgcgctgcggcagagactgcacaggagcagcccgccccggaagccccggcggcagacagtgcgcagacagacgagaccaactgaacgtaccttatataaatagaagtcagaaggagaactatggcaaggatcgagatcttagccccggtgggcagtgaagaaatgctccgcgctgcggtgttcagcggcgcagacgcagtatatctgggcttttcgggcttcaacgcccgcacgggtgccggcaactttgacgcagacagtctgcaggaagccgtgcgcttctgccacgcccggggcgtggcggtgcacgttgcgctgaatacgaccgtgtacggcaccgagctgcctgcgctggagcaggctatccgcgcagtagcagccagcggcgcggatgcagtcatctgtcaggatctggcagtggctactttaattggtaaaattgccccgcagctgccccggcacggctccactcagatgagcgtccacaccctgcagggtgcactggaactgaaggagctgggctttacccgggtggtgctggcgcgtgagctgagcctgcccgaggtggagcacattacaaagcactgcggcatcgagaccgagtgcttcatccacggtgcgctgtgcatgagcgtgagcggccagtgctatatgtccgcctttctgggcgggcgcagcggcaaccggggctcctgtgcgggcccctgccgtctgccctttgaggccaacgccctgccggagggcaagcccgggcggctgcatcacctctccctcaaggataactccgccatcgacaagctggacaagctgcaggcgcttggcgtagcatcggcaaaaatcgagggccgtctccgcacgccggagtatgtggcagcggctgtcagtgcctgtctggcaggccgcgagggccgcgcctacgaccgcgacctgctgaagaacgccttcagccgctccggtttcacctccggctatctggacggaaaaatcgacggcaccatgttcggtgtgcgcagcgaagctgacgccgagctgaccaaaaagaccctgcccatgctgcgtgagctttaccgccgcgagcgctcccgcgtgccggtgcagatgaagctggagatcgaagagggcggcgaaaagctgaccgttaccgatgctgacggcaacaaggcctttgcctatggggatgccgagccgcagcccgcccgcaccgaccctaccgagagcctgaaccgcagtttggcaaagaccggcggcaccccctttacggcagagaagatcactgtggaaatggacggcgggccgtggttcatccccggaagtgccgtgaacgagctgcgtcgggaagcgctggatgccctgctcaaaaaacgggaggcgctgcgcccctggcccaccaccgaggagcacgtcgccgccctgccgcagcgcaccctgccgccccgccgcaccctgcgtgtccggttcgagcgctgggaacaggtgccggagcgggcacttgacggggtggaatatctcattctgcccattgcgcaggccgaccgtgtgccccgggagtggcgggcaaagacccttttggagctgccccgggtcatgttcggtgtgctggagcaggacactgcccgccgcattgcagccacgcaggatgcgggctttgccgggtacgaggtcagcaacatcgcccatctgcgcctgtgtcgtggcttgcccatgaccggcggtttcgggctgaacatcaccaacaatgtggcggcacagttctatgcagagcaggaactttccagtttgctcatcctgccggaggtaaaagacagcgatattgcgtccattgcgcccacccggaacggtaagcctgtgcccaccggcgtgatgatctacggtcatatgccgctgatgctcacccgcgcttgcccgctgcaaaatatccatgactgtgcccactgcgataagaccggcgtgctgaccgaccgcaaggccaaaaagttcccggtgcggtgcggccttggagtgcgcaccatctataacccggtgcccatctacatgggtgataagcccggcgcactggcggtggactatggcgtggcctactttacgctggaatcccgcgaggaagcggcgcagatcttggacagcatccgcacccacgccccctttgagggcgattttacccgcggtctgtattttaagggtacaaactgacaaaacaccggaagtgccccaagctttgcctgtgaaaaaagaaaaacgaaacgaggttatacgatggaacccatcactgtaaaatataaggtactggatgcccgggcaaaagtgcccgcctacgccacccccggcgcagctgccgctgacctgtgcgctgtgctggacgcaccactgaccgttgcccccatgcagcgggtgctggtgcccaccggccttgccatcgagctgcccggcgcccatagtgtggcgctggtgtatgcccgcagcggcttgtccatcaagcacggcctgtgcatggccaacggcgtgggtgtggtggacagcgactaccgcggcgagctgaaggtgcccatggtcaatctgggtgccgaggcttataccattcagcccggcgagcgggtagcgcagctgtgcatcgccccggtgtacaccgccgcctttgtgcccgccgaggaactgggcgacacccagcgcggtgtgggcggctttggctctaccggaaaataaccctcttcgtcaatgcttcgcattgacacccgagaggggagaatttaaaagagtaaaccgattgatgaaaaaagctctccccttcgggagagcggtcaccgcaggtgactgagagggttttatgaatcatttgatcttagcctctggcagcccccgcagacgggagctgctttccctgtacaccaccgatttcacggtctgtgtcagcgattttgatgagagcgccgtcactgcccccactccggcgcagctggtggagcagctggccatcggcaagtgccttgcagtggcaaaacagcacccagatgctgtggtcatcggctgcgacaccgtggtggacgtggacggcgctgtgttcggcaagccccacgatgccgaggatgccaagcggatgctgcgcgccctctccggtaagacccatcaggtgcacaccggcgtgtgcattgcaaaaggggacagggcagagcattttgtggacagctgcaaggtgacctttttccagctgggggaggaagaaatcgcgttctacgctgctaccccggagccctacgataaggccggtgcctatgccattcaggggcgcgcggccctgtggctggaccgcatcgagggcgactattacaccattatggggctgccggtcagccgcaccgtacagacgctggcgcattttttgtgagaaaaatggaaaaatgatagaaaacttgccgaaacgcttgagaaatggagcacttgcggctataatagaaccgtgttattctgcgcaggagggactgtttgcagcaggccgtccggcattctgggatagatttaaggaacgatcgtaaggagatttggaacaatgagttttctgtcaaaggacgttggcattgatttgggtactgccaatactctggtctacatgaagggcaagggcatcatcatgcgcgagccctcggtcgtggcggtggacaccaagaccgacgaggtgcgctgcgtgggcggcgaggcaaaggctgtcatcggccgtacccccggcagcatcgtggcggtgcgtcccctgaaggacggcgttatcgccgatttcgacatcacggccaatatgctggagaacttcctcaaaaaggcctgcggcaacagcatgttctcccgtccccgggtggtcatctgcattccctccggcgttaccgaggtggagcgccgcgctgtgcgcgaggctaccctgaaggccggcgcccgtcaggtgtctgtcattgaggagcccatggcagctgccatcggtgcaggcctgcccatcagcgagcccaccggcagcatgatcgtggatatcggcggcggcacggcggagatcgccgtcatctctctgggcggcatcgtggcttcccgcagcgtgcgcatggccggcgatatgttcgatcaggccatcattgccttcatcaagcgcaagtacaacctgctcatcggtgagcggactgccgagcagatcaagatcgagatcggctctgcctatgcactggacccggagctgaccatggagatcaagggccgcaaccttgtagacggtctgcccaagaacatcgtggtgcactctgaggatgtgcgcggcgcgctgctggagtgtctggtcaagatcaccaccgccatcaaggagacgctggagcgcaccccgccggaactgagcgcagatatcatcgaccgcggcatcaccctgaccggcggcggcgctttgctgcgcggcttggatcagctgatccagagcgagaccggcattgatgtgcatattgcggaggatccgctggactgcgtggccaagggtgccggtgcggtgctggatcatgtggatgtgctgcatgacgtgctggacaccgatggaggacatatgtaagagcggctctctgcggagagtgctgctcagaatgcggaaaagtttcagacacagcagctgtgcgtttttccgctgcaaacactgcatcttgcgcggatggcacggctgtccgcgcttttttcatgcaaaggcctgcggtagggcgcgggcatcccgacaggagggaagcaccctttgaaagatttttttgatacctggaaattcaagattctcgtggccgtggcggtgtttctggtgggcatcatggcctatgccggtgccaacggacgcctgaccgctgccccgcaggaactgctgggcgtgatcctgacccccttccagaaggcgggggctgtggtcagcggcggtgtgggcgcgatgtgggaaaaatatgccagcatcgacaaggtcatggaacagaacgagcagctgacggcggaaaacgccgagctgcgtcagcagatggtggattatgaccgcatcaaggctgaaaacgaggcctacaaggcactggccaacattcaggaaaagaacagcaatgccacctatgtgtccggctttgtcattggccgcgacccgctggacgagttcggcggcttcacgctggacaagggcaccgcagacggcgtagcggtgaacgatgcggtcatcagtgaccggggctatctgctgggcatggtggtagaggctgatccgaccagctgcaaggtgatgaccattctgcaccccagcttcaacgcggcgggcgtggtatcccgcacccgggaaaacggcattctgaacggcaataccacctatgcagcggacggcctgtgcaccctgaccaatctggagcgcagcaccgagacccatgcgggggatcaggtcatcaccaccggtctgggcggggtgttccccccggatcttctggtgggtacggtgcaggacgtggtgccggagaccagcggcaaatcctccattgcggtggtgcgccccggtgccgacccccgcaccgccaagcacgtttttatcgttactgcgtactaaggaggacacactgctatggaatctcgccgcaggcgcagccgcagccagctgctgaagtggggctgttatgtgctggcgctgtttgtgtgcgccgctttgcagaccacgcccgggctgtttcagctgggggaggcaaagccgctgctggtgctgccgctgtgtctggcggtggcggtatttgaaggagaatttgccggagcactgctgggcacggtgggcggccttttgtgggattgcacggccggacgcacggtaggtatgctggcgctggagctgctgctgctctgctttgcggtatcggtgctggtgcagttgtatctgcaggtgaaccccggcaattttgccgcagtaagcaccgcaacggcgctggtggtactctcgctggactggctgtttttctactatatgccgggttataccggcgcagcgctgcggtatgtcacctttgtactgcccggcgcggtgctgaccatcccggcagcgctgctggccttctggctggtgcagcacatccatgacgggttcaggatcgacaacggtgtggtctagcccgtaaaaggagaaccagatgaacgaaaatgaacgcaaggtcgtggtgcggcggatgctgctgctcatcgcagtggcctgcatcatcatggggctgtacaccttccggctgatctttttgcagctggtcaacggggacgactttaaggcaaaagccaccaacaccacggattataagtttacggtcaccgctgcgcgcggcgatatcgtggacagcaccggcaagcacatcgctaccaccagcaccggttataatgtggtgctgaacaagctgcagatgggagatcaggatctggacaccatgctgcagcagatcgtggagcttttgcgcaagaacgatgaaaaatggctggacaccctgctcatcagcgagccggatgccgccggaaactatacctttacggacagcgccgacagtgccagcgaccagaaaacgctggcagacatgaaggagacgctgggtctgcagcagtacgccaccgccaacgatgtgatggagatgctggtggagaaaaaccagctggaaagtttctcactgccgtggcagcgggtgctggcgggcatccattacgagatggaccgacaggctttttccaacgtaaataactttgttatggctgaaaacgtcagtcaggcgacggtggcgaccatcaaggagcattccctcacgctgccgggcgtggagatcgtggagaccagcacccgcagctatgagcagggcgatatcctgcccgctgtgctggggcgcgtgggcaagatcaccgccgaaaagtggaaggtgaccgacgaaaacggtcaggtgacctatccgctcaaggaaaaaggctataacatgaacgatgtgatcggcatctccggccttgagtctgtgtacgaggacgagctgcgcggcaaggatggtgtggagaccatcacccgtaattcggacggcgtgatcgtggacaccaagatcaccaccgtgccggagccggggcataccgtgcagctgaccatcaacagcgactttcagcgggcggtggacaaggcccttgccaataacatcgatatgatcaaccgggtgtacaacaccggcgatatgaaagccgctgccggtgctgcggtggtgctgaatgtgaaggacggcagcgtgctggcggcctccaactaccccagctttgaccagaacctgtacgccaccaactattcggagtacaacgccgaccccagcctgcccctgttcaaccgggcgctgcagggcctgtacaccccgggttctacctttaaacccgcggtggcagtggcggcgctggacagcggcctcatcaaccagtactctaccgtcaactgcaccggcgtgtatacctattataaggactaccgcccccgctgcacccgccacggccacagcggcaacattgatgtggtcaccgccatcaagtggagctgcaacatcttcttctacgatgtgggacgccgtctgaccagtgacgtctacgatgcctacgcctacaagctggggcttggtcagcgcaccggcgtggaggtaaacgaggctctgggacgcctgaccaaaaaaacagataaaaactacacctcctcgctggatattcaggctgctatcgggcagggcaacacggtggtaagccccatccagctggctacctacgccgccacactggccaacaacggcgtgcgctaccgcacccacttcgtcaaggccattctggataccaacaccggcgaggtgctcagcgagacccagccggaggtgatggatatcatcgagggcaacggcaacacctttgagctggtgcggcagggcatgaaacaggtgcccagcaccatcagcggtaagatctccagctaccccattgccatcgcctgcaagaccggcaccccccagcgcagcgagacttatgcctcgggcaagcactacctgaacgccatgatgatcgcttacctcccggcagacgacccggagatcgccatcggcatcacggtggaatacggcggctacggtgcccgcaccggtgatctggtggtggatatcgccaacgcctactttgccatgaaggacggcacgctggaggtggacccctatgtggacccgcgcaccgtggcacaggaggacgccgcagcatcggataccgccgcccagaccgctccggatgctgcaaatgatgcacagaccgataccacagccgcagaaccgcagcagacgaccgcgcccgtaggggtgacagaggaagaaaacaacgatgcaatgcttgcgcagtaaggcgcagctgcgtgcaaagcagtgaacttgaacgaaaatttgaatattgtgtccaaaaacctgttgtaaatgagttgcatttgtgatatcatgtatagcaaaggaaatttagcaagtgttttatatacaaatgtttcaatagaggagagatctacagatgacgattgccctgatcgcgcatgactccaaaaaggagctgatggttcagttctgcacggcgtactgccgcattctgagccagcataaattggtggcgaccggcactaccggtaaactgatttccgaggccaccggcctgcaggtacagcgttttctggccggggtgcagggcggcgaccagcagatcgcgtcccgcattgcctgcaacgagattgacctgctgctgttcttccgcgaccccatcaatgcaaagcccagcgagccgaatgagatgactctgctgcgcctgtgcgatgtgcacaacatccccatggccaccaacatcgccaccgccgaggtgctgatccacggccttgagcgcggagatctggactggcgcgatatcgtgcacccccagaactaaagtatgtaaaaaagaagcgctgcatcgtacagatgcggcgcttctttttgcgtagaaagcggttggctcagactgttccgttcactttaaaatcctgtgccatctcctgaacatcagcggcggtaaactcgcccaagggcagcagcagccgggcaagggtgtcctgcggcagcgctgccagtgcagcgctctcgtccagtgcagtatccacagcagggcagacggtgtgcacaccatcgctgcccagctccacccgggcgtggtgcccggtggcaatgtactggatgcccagcttgtcggcagcggtcagcaaggcggcaaaccgggcgtcgttgccgctgcccagcacctcggcgggctggtctgccagtgcctccgccttcagcacgatgcactcaatgccaagagcctcggcagcctgccgtgcggctgcggcccacgcgctttggtcagcggccagctgcaccacagccccggccacgccgaagccctgctgctgcaaaatgcgcaccgcaacgccgcaatctacggagccgtccatgctgacaagcaccttgtcctgtgtttcgtaggtgtcgaacccgttgccgggcaaaaatgcgtcgctcatgttccttgcctcccgccatgtgctttgctttgtgctacggccagctggtcgcagcgttcgttttccgggtggcctgcatggccctttacccagacataggtgatcttgtgccgtgcctcctgctccagtgcctgtgcccataagtccgggttcagggcaggggagccgtcggcttttttccagccccggcgcttccagcccttggcccagcctttttccagcccgttgatgacatactggctgtcggagcacagccgcacctcgcagggctccttgagctggcgcagcgcctcgataaaggccgtcagctccatgcggttgttggtggtgctggcgtcgccgccgctcagttccttttcgtacaccttgccgtcaaagcggtagcgcagcaccgcaccccagccgcccgggccggggttgccgctgcaagcgccgtctgtgtacacctctacctgtttcatggggttctccttatagaatagaatacctttatttagcgctattttgcccgggatgtcaagagccaatgtatacgccggcccagttttgccaaaccttggaattgacaaaaccggtgcgagatactatacttagcgtaacaaaatgcgtataggggtgcaccaaaggtgtgcgcccggctgttccggcagaaacgccacggtcgcatcgaacagatggacttacctggccaagaacctcttgcggaaccaacagcgctgctgcaaaaagcacgctgaacgataaattctatacgatgcatcaaccggaagccgatgcagtttcaggtgcttcccctgtgcaaggtacggctgctctccccggtgggggcgcggcctggcctgcaattgaatctggaggtaaagaatggctcaagcaaaagaaaataaccccgctccccgcgcaaaagccccggcagcgcccaaggcagccgccgcaaacggcactgctcccgcaggggaaaaacgcacccgtcccaccacccgccgcccctactacaaccgccgcccgcgccgtgcgcagcagcccaaggaggcagcgacccccatccatatctacccgctgggtggtctgggcgaggtcggcaagaacatgaccgtctacgagtgcaacggcgatatgatcatcgtggactgcggcctggtgttcccggacagcgagatgttcggcgtggacatggtcatcccggacttcacctttgtggtgcagaacaaggataagatcaagggtctgctcatcacccacggccacgaggatcacattggcagcattccctatctgctgcaaaagatcagcctgccggtgtacggcacccgcctgacctgtggcctgatcaaaaacaagctggaggagttcggacttgccggcaagaccaagtttgtggagatcgtgccccgtcagaagatcaaactgggctgctttaccgtggagcccatccatgtcaaccactccatcccggatgccgtggcttttgctatcgacagccctgccggtaccatcatccagaccggcgactttaaaattgattacaccccgctggcctgcggtgtgaccgacctgtccactctgtccgagtacgggcagcgcggtgtgctggccctgctgagcgactccaccaacgcggagcgcccgggctttaccgctaccgagcagaaggtggctgccggtgtgcgcagcctgtttgcccgcgcccgcaataagcgcattatcattgcgacttttgcctccaacatctaccgcgtgcagcagatcattgatctggctgtggaggatggccgcaaggtggccttcagcggccgcagcatggtcaacaacaccgccatggcgcaggaactgggctatatgcacatcccggagggcaccctgatcagcgtagacgagctgaaccagtacccgccggagcaggtagtgctggtgaccaccggcagtcagggcgagcccctgagcgcgctgagccgtatggcttcctgcagccaccgtcaggtgcgggtaggccccggcgacttcatcatcatctccgcaaaccccatccccggcaacgaaaagagcgtgaccaagatcgtcaacggtctgctgctgctgggcgcagaggtcatctacgagagcatgtacgatgtgcacgtttccggccacgcctgtcaggaggagcagaagctgatgctcaccctgaccaagcccaagtacttcctgcctgtgcacggcgagtataagcagctgaaaaagcacgcccttaccgctgcaagtctgggcattcccaccagcaacatcctcattgcggaaaacggctccaacgttatcctctcgcaggacgagatgaagctgggcgagccggtgaccgccggtgccgtcatggtggacggccttggcgtgggcgatgtgggcaacgtggtgctgcgggaccgcaagcacctctccgaggacggtcttgtcatcatcgtggctaccgtggacagcaagaccggcaaggtgctggccggaccggatctggtaagccggggcttcgtgtatgtgcgcgagaacgagagcctgatggacggtgcccagagcattgtggaaaatgcgctggagcgctgtgtggacgagcacgtccgggactggaacagcgtaaagacccgtgtgcgtgaggcactgagcagctatatctaccgacgcaccaagcgcagcccgatgatcctgcccatcctgatggaggtctgatccgggcgcaccgcaaggcggtgcagcgtctgaggaggcaaaaaaccaatgaaacgtaaaccgagatggacactggaaatgctcacggccagtctggcggtgctgtgcggccttttgctgctggtactgctggtgcagcgccccacggcatggctgctgctggccgtgctggtggtgctgtggggcataggggcaaccttgttccgctgcaagctgcgccgctgggtggtgcgctggacaagcggcaccacgtttgaaaaatccaaggtgcagttcagtctggagcccctttcccagccggcggcgctgctctccggcgagacggtgctgtggtacaacagccagttccgcacccgcctgctgggcgggcaggatgtgctggccagccgggtgcagaagctgctgcccgggctggatctgcagctgtgccgcaagcgcgagggacagctgctgacccttgccgacggctactggagcgtgcacagctccaccgtgcccggcgaagccgaaagcgtgaccctgctggtgctgaacgaggagaccgagctgcgccgcattgaggcagagtacaaggccagccgtccggggtatcttgccttccagctggacggctacgatgatgtgttcggggatctgatggacagcgagcgcgcccgcctgctggagggcgtcaaccgcattctggaggatatgatcgggcgcggcagcggctttctgcgccgggtaggcagtggcggccgctacatcgcagtggtggaggaacgccagctggagcagtttgccaaccgcggctacgacgtgctggataagatccgcgcactggaccccagtgtgagcctttcaatgtccattggtatcggacgcggcgcgcgcaccctgcgggaagcgcaggatatggccgagcacgcgttggatatggcgcagggacgcggcggcgatcaggctgctgagatgacgctggacggctttaccttctatggcggcgtgagccacggcgtggaaaagcgcagtaaggtgcgcagccgccttgtggccgaccagctggtcaagctgatcaaggaggccgaccatgtggtcatcatgggtcaccgcatgagcgatctggatgccatcggcgcagccgagggtgtgctgcgcatttgtaagatctgcgatgtgccggcggtcatcgccgtccggcgggacgctacgctggcggccagcctgatcgatgcgctgtgcaaggcggggcagaaggatgacttcatcgaccccaaggacgccctgcctatcatttccaagcgtaccctgtgtatcgtggtggatacatatcaggcgggtcttgtggaaagcaaggacattctggaaaaatgcggcaaggtggccgtcatcgaccaccaccgcaagggcgtgggctacatcgaaaacccggcgctggtctgccacgaaccctattcctcctcggccagcgagctggtcaccgagctgttgcagtacgtgggcgagcgggacgacaagcccaaccgcgtggaggccgaaggtctgcttgccggcattttgctggatacgcaggactttaccctgcacaccggtgtgcgtacttttgaagccgctgctgccctgcgccgctacggcgcagagaccgagcgggtgcgcaggctgttcgatgtgaccatggtggagtacaacgccaaggccgatctggtggaaaaggcacagatgtacaaaaattgtgccatctccattggcggcgaggtcgccccggaagcccgggtcgccattgcgcaggctgccaacgacctattgcgcattcagggcgtggacgccagctttgtggcagtgcaggtgggcaacggcgtaaacgtctctgcccgcagcatgggtgccgtgaatgtgcaggtgatcatggagtcgctgggcggcggcggccatcagaccatggcagcagcccagttaaagcatatcaccccgcaggcggcacgcagccgcattcaggatgccatcgaccaatattatctctcccagaaaaagactacgccggaagcacgaccggcaaaaggggaataaaagcatgaaacagtatgattatcttatcgttggtgccggtctgttcggtgccgtgtttgcccacgaggccaaaaaggcaggcaaaaagtgtctggtcatcgataagcgcgaccatatcgcgggcaacatctacaccgagaatgtggagggcatcaatgtgcaccgctacggcgcgcatatcttccacaccaacaacaaggctgtgtggcagtatgtaaaccagtttgcagagttcaaccgctacaccaacagcccggtggccaactaccacggccagatttacaatctgcccttcaacatgaacaccttcaacaagatgtggggtgttgtgactcctgccgaagccaaggccaagatcgaagagcagaaagccgctgcgggcattaccgacccgcagaacctggaagagcaggccatcagccttgtgggcaccgatatctacgaaaagctcatcaagggctacaccggcaagcagtggggacgcccctgcaccgagctgcctgcctttatcatcaagcgcctgccggtgcgctttacctacgacgacaactacttcaacgccctgtatcagggcatccccaatggcggctacaccgctatggtggaaaagatgctggccggtaccgaggtgcgtctgaacgtggattatctggccgaaaaggccgcgctggacacactggctgaaaaggtggtctataccggcccggtggacgcctacttcggctaccgtctgggtgctttgcagtaccgcagcgtccgctttgagaccgaggtgctggacaccgacaactatcagggcaacgcggtggtcaactacaccgacgccgagaccccctatacccgcattatcgagcacaagcacttcgagttcggcacccagcccaagaccgtcatcagccgggagtacagcgccgagtggaaaaagggcgatgaaccctactatcccgtcaacgatgagaagaacggcgctctgtatgcgcagtataaggcactggccgatgccgagccgggcgtgatcttcggcggccgtctgggcgagtacaagtactacgatatggataaggtcatcgaggtagcgctggacgtggccgcaaaggagctggcgtaaatgccccgcttcctcttgcccaaaaacgacaaatgcgctatactattaccataagactgcaccggttttccggtgagaagtgagggatactatcatgaaagtgattctgaagcaggatatcaagggtattggcaagaaggacgagatccacgaggtctccgacggctacgcccgcaactacctgttcccgcgcaagctggccgctgtggcggatgccagcgctgtgaacatggcccgcggcaaggaggccgcagccgatttccacgaggctgagaacgtggcagccgccaaggctctggctgccaagatcgaaggcaagaccgtgaccatcaaggccaagggcggcgcatccggccgtctgcacggcaaggtgaccggcaaggaagttgccgaggaactggctgcgctggcaggtgcacccatcgacaaaaagaagatcgagctggagaccaaggacatcaaggatgccggtgtgttcaacggcaaagtccgtctgtacgttggcgtcgtggcttccttcaagatccaggtggaagtggaacaggcctgatctgtgtgccgtttgcgccccctcacagcagggggcgctttttggctttacaggatgctttggattttggataaggacaaactactatgccgaacgaacgacgttattccaatgaactgaatctggagagcgtgggcatcaatctgccctacaatatgcaggcagagcagagcgtgctgggtgcggtgctgctcaagcccgacaccctgaccgatcttgtggagatcctcaagccggaaatgttctacacccggcagaacgcccagatctggaccgagatgctgcgcctgtttaccaacgaccagaccatcgattttgtcaccctgctggatgcagtggtgtccgatggcgtgttccccagcgcagacgaggccaagatctacctgaccggtctggcagaaacggtgcccagcatctccaatgtaaaggcctacgcccagatcgtgcaggaaaaatatctggtgcgccagctgatgggcgttgccaaggacatcttgcaggacgccggagacgagccggacgccgaccttctgctggaaaacgccgagcagcgcatctacgagattcgctccggccgcgattccagcgccctgaccccgctttcgtccagcatggtggaaacgctgaccaacctgcaaaagatcagcggcccggatgcggataagtacaagggcatccccaccggtttccgcctgctggacaccgtgcttaccggccttggccgcggcgatctggtcattctggcagctcgtcccggtatgggcaaaaccagttttgcactgaacatcgccacccgcgtggccatgcagcaaaaggtgccggtggccatcttcagtctggaaatgaccaaggagcagctgaccaaccgtatcctctcgtcggaggccggtatcgacagtcaggctttccgtaccggtgcgctgcgcgccgaggactgggagtatctggcgctggccaccgaaaagctgcacgatgcaccgatctatatggacgacacctccggcatcaccatcaccgagatgaaggcaaagatccgccgggtgaatcaggaccctgcccgccccaacgtgggcctgatcgttatcgactatttacagctgatgaccaccggccagcgcagcgagaaccgtgtgcaggagatcagctccatcacccgaaacctgaagatcatggctaaggagctgaacgtgcccatcatcgcgctgagccagctgtcccgtgcagtggaaaagcagggcaacaactccagccaccgcccgcagctttcggacctgcgcgactccggttccatcgagcaggacgcagactgcgttctgttcttgtaccgcgattcctactacgccagccagaacccggatggtgccgaggtggatgccgataccgccgagtgtatcgtggcaaagaaccgtcacggcgagaccagcaccgtgccgctgggctgggatggtgcccacacccgctttatggatgtggacttcaagcgctgatggataccgcgattcttgcccgggtggaggatttctgcatccgggaggggcttttgcagcccggcgcaccgcagcatctggcggcggcagtctccggcggcgcggacagcatggcgctgctgctcttgctgcagcaattgcagccgaggttcggctatacgctttctgcctgccatgtgaaccacggtttgcgcgggcagagcgccgaccgggacgaggcctttgtgcgggcggaatgcgcccgcttgggcgtgccgctgcgggtgttccatgcggcagagctggcctcgcccccggcacacgccggggaggactgggcgcgccgtctgcgttacacggcctttgcgcagctgcaagggcaggggatagatgccatcgctacggcccatactgcaaatgaccaagccgaaacgctgctgctgcggctggcgcgcggcaccggtctgcacggtgcgggcggcatccggccaaggcgcgggtgctacctgcgtccgctgctctgcctgagccgcgccgagaccgaggccgtctgccgggcagcaggacagccgtgggtcactgacgagaccaacgacaccgacgcctacgcccgcaaccggctgcgccacaacgctctgcctgcgctggaaagcaccaacgcggcagcggtgcagaatctggcgcggttctgtgaaaaggccgcacgggtggatgcctatcttgccgccggggctgcaaagcttctggcggcggcacgcctgcccggtgcagaaccggcgtggcagctgacacccttgcaggcagcagacccgctgctgctggaaactgcgctgcacagccttgtggctccggtgcgggacgcagaggaaaaatatgtgcagctgctgtgcgccgtggtgcggcagggcagcggcgcagtacagctgaccggacaggtacgcttttgcgcagggaatggctgtctgcggcaggaaatgctgccggacgtgctgccccggcagctggagagcgcgccgcagcaagtgccccttttgctcgaaaaacagccggaattccggctgcgcgggggctggaaggggaaagcggagctgttaacagccgattttgagaaaaaaatacaagtcgttcataaaaaagacttaaaaaatcgggcggattatgctagaataactacgttgtacactggccttgtgctgcgtgcccgacagccgggagaccgcttccggcctgcggggcggggtttgagcaagccgctgcgtaagtggatgaacgaggccggtgtcccgaacgaactgcgggatacgctgccgctgcttgccagcggaagcgaaattttatgggtgtgtggagaaggctttgccgatggccttgcaccggacacggaaagcagatggatcctgcacttggatgcagagatcgaaacacaggaggaaaaaacaaatgagtatgcacgatgatatcaagaccgttctggtcagcgaagagcagctgaaggccaaggtggcagagctgggcgctcagatcagccgggattatgccggtaaaaatctggtgctggtgtccatcctcaagggctcggtggtctttatggccgacctgatgcgggctgtgagcatcccctgcaatatcgactttatggtggtctccagctacggcggcagcaacaccaccaccagcggtctggtcaagatcatcaaggatctggacggtgatctgtccggcaaggacgtgctgatcgtggaggacattctggacaccggcgtcaccctgtccaaccttgtgcccatgctcaagatgcgcaacccgaactccgttaagatctgcactatccttgataagcccagccgccgcaaggccgacatccagccggattacgagggctttcaggtgccggacgagttcgtggtgggttatggtctggactacgatgaaaaataccgcaacctgtcctatgtcggtgtgctgaagcccgaggtctacacgaagtaacgtgtccattataaaaatccagaactggagttgatttttttgcaaccgaagaaaccccgtttcaatccgctggtgatcgccattgtgctggcagccgtgctgatggtgtggtcggtgctgggcggcaccggcggcaacgctaacggctcctccatggcttattccacggtggtacactattttgagagcaatcaggtcaccaaattctcgctggatctgaataccggcgtgatcaccatgaccctgaaggagggcgcacaggagctgcccaacgctgccgagcagagcaccacccagtccacgggcgggctgctttccggcctgctgtcctcctcttccgctgcccccaccggggtgaagaagaacgatgacggcaccgagacagtcagctataagctgccctatgcccggatgttcgtggaccatgtgtcggactacatcgcccagtatgatgcagccaaccccgatgcacccatggtgtacgattatgtgcccgccaaggagaccattccctggatggagatcctgttctatctggctatgttgggctgcaccggttttttgctgttctccatgatgcgcggcggcgccggtggcggcggcatcatgaacgtgggcaaggccaaggtaaaggacgagcacgagaacaaaaagactgccacctttgccgatgtggccggtgaggacgaggaaaaagaggagctcaaggaagttgtggagttcctcaagagccccgataagttcaatacgctgggtgcccgcatcccccacggtgtgctgctggtgggccctccgggtaccggtaagaccctgctggcccgcgcctgtgcaggcgaggcaggggtgcccttctactccatctccggctctgactttgtggagatgtacgtcggcgtgggcgcatcccgcgtgcgtgacctgttcgataaggccaaaaagaccatgccctgcatcatctttatcgacgagatcgatgccgtgggtcgtcagcgcggcgcaggtctgggcggcggtcacgatgagcgcgagcagactttgaaccagctgctggtggagatggatggctttgaggccaacgacggcatcatcgtcatggcagccaccaaccgtgccgacattctggataaggcgctgctgcgtcccggccgttttgaccgtcaggtctatgtgggtctcccggatgtcaagggccgcgaggagatcctgaaggtgcatacccgcaacaagccccttgcaccggacgtctccctgaaggttattgcccagcgcaccgccggttttgccggtgcagaccttgagaaccttgtcaacgaggccgcgctgctggcagcccgccgcaaccgcaaggccattaccatggaggatatcgaggaagcctccatgaaggtgatggctggccccgagaagaagagccgtgtggtcaccccggaggagaaaaaactcaccgcctaccacgaggccggtcacgcagtggcaggcttctactgcaagcatcatccccgcgtgcacgagatcaccatcatcccgcgcggtcaggccggcggttacaccatgtatctgcctgagaaggatcgcagctatgtgaccaagggcgagatgtttgaggacatcgtgtccagcctgggcggccgcgtggccgagcagctgattctggaggacatctccaccggtgcttccaacgacctgcagcaggccaccaatatcgcccgccagatgatcacccgctacggcttctccgagcgtctgggccccgtggtttacggcacctcgcaggaggagaccttccttggccgcgactttggtcagggcaagggttacagcgagaccaccgctgccgagatcgacagcgagacccgcgatatcattgacgaggcctacgagacctgccgccgcaccctgacggagcacatcgaccagctccatgcgctggccaaggctctgatggagcgcgaaaagctcaacgaggagcagttcaacaccattatggccggcggcaccctgcctccctgcgaggatgcaaagcccgagcaggcacagcccgaccagaccgtgcagcctgccccggtgcagcccgcagagcctgcggagactgccgagcgtgcagaacccgccgagcaggccgagcctgcccagccggaaatgccgcagccggatgccccggagcagcaggactaagcttttttaggaaaggagcgagcatcgtggaggaaaattttaacccggtcgcacagacccgcgcaaactactatacccctggcagtccggtgcagtttgtctgcgtggagctgctcaagggagacgtcagcggcgagcacgctgtctgcctgaccttcaagaatatttcccgcgtgaccctgaccgcactggaaatccacttcaagtgcaagggcgtggatggcgtgatcctgtgcgaggataagttcgagtaccgggatctgcaggtaaaacccggcgagctgtttgggcaggatgatgccgtgttcatcacggccaaggccatcaccagcgtagatgttaccctgtgcaatgtatacaacggcaagcgcgtggtgcatctggacggcatcaagcgtgtgcgtctgcccgcaccccgccgtctggctccggagctgcaaaaggcgctggaggcccgcatgaaccgcaccgggctcaagtatcagccgcaggtgttcgagaacggctggtactgcgcctgcggtgccttccaccccaccgaggaggacacggtttactgctcggagtgcggctgcgaccgtatcctgttgcagaacgcgctgaacactctgctgcagcccgctgccccggcagacgagatggaaatgcccctcaacgccccggctgctcccgcagcgcccgctgcggtggaggagcctacccgcatcgtgggcgcagcccctgctgctccggcggctcccgtagaagagcccacccgggtcgtgggagcaccggtctacgagccaaaggctgaccccatccagcctgtctcggagcctacccgggtgctggatgcctctgtacgcacaccgctttccggcgctgctgcggcagacgagggtacccgcgtgatccccgcccgccgtccggctccggtgcgtcagcccgcgcctgtggaggaggacgaagagtacgaggataaccgggacagcgtggcagaagcgctgatccgctgggtgccgcctattacggccatcctgtgtgcagccatcgcgctgtgcggctttgtgtactaccagttcgtgctgtaaaataagattcatcccggcggagggggcagcgtgccttctccgccttttgtgtgcactgcacagaaaggaaataccatgccggaacaagccttacaggtggcttttgagatcaagaccgcctgcgatgagatcagccgccgcctgctgcgctggcactgggaacgcaagcccggggcgcacagtctggatgcgctgctggagcatattgctgcccgcaagcaggaaagcccggattactacgaccgtatgccggaccttaccggcaagaccagctggcagcagttggacaccactctgtgtatgcgggtgctgctggacccggagaccgatgccgcccgcccgctggacctgctgggcaacacggcacacccctctgccgcccgccatgcctgcaacgccatccgtaccgcccgcaatgaggcagcccatgcggcagttgctgcggacggcgcacaggcagccctgctgttcaacgaagccattgaggcgctggaggagggctacgccggtactgcctttaaggaaaacgagctggcgcagtattaccgtgaggcagaagactacctgaaccggtgcagtgagggcaaacctcttaaagcgcgccagagcagcccgcagaacacacagcagggaaaagccgccgcccgcacaaagccccgcaacccccagactgtccgcagcaccaaaagcactgccgggcggcagaatacctctgcccgcagccgcagcaccggtacaaagcagagccgcggcacagcctcccgcagcaaaaagcagcagaccggcggcgagagcagggtggcacttggcattattctggcagcgctggtgctgggacttatcgcacgcgccatcagcatgggacttgtataagcgcaagggttttcgcaattctggcggtaaatcagaaagcaagattgtttggattgtgtaaaatcaccaaaaaagcaacgggcagccccacagaaaaacggtcattgcacctcttgcgggaaatatgaaacggatttataataagcatgaaaacgtttacacattaccaccggagagggaacggagaataaccccatgaccatcagtgatattgcaaagatggcaggcgtttccagcgctgcggtcagccgctatttgaacggcggccccctcagcgagcagaagcgcgccgtgatacaagccgtagtggaaaagaccggctacagcccggatactgcggcgcagaccctgcgcaccggcaaggtgcgtcaggtgggggtcattgtgcccagcatcagctcccagtcggtggggcagatcaccagcggcattgcagccgagctgggggccagccgctacctgatgctgctggcagacaccgagctggacgggcagatggagctggaatatcttacagcgctgcaacgcaaccatgtggccggtatcatcctgctgggctatgattccagcccgcagctgtgcaaggcgctgaaagactgccgtgtgcctgtggtggtaacggggcagcgttttgcagacctgccctgcgtttataacgacgaccgctctgctgcctgcgacttgacccggaagatgctggagcatggccgcaaaaatatcgtgtatatcggcggtagcgagcaggacgccgccaccggcatagcccgccgtcagggtgtgcaggatgcactgcgggaggccggactgaacgcagatggtctgccccgcgcttactgcgccgccttttccatggaagaagggcaccgctgcatggaagagctgctggcacgctgcccgcagttggacggtgtggtctgcgtgacagacaccgtggcctttggcgctttgcgggtgctgcgcgacgccgggcgcaaagtagggcaggatgtcggccttgccggcatcggagacaactgggcaggcaaggtggtggaacccggcctgaccaccatccgcttctatcagcggcaggtcgggcaggaggctgcccggatgctgctgcaaagcttggagcacaccggagcggacgctgcaccggtacgccagaccacgctgggctatacgctggtagagcgcggctcactgtaaaaaaagaggaacgaatgaaacagaaactgatctttttagatatcgatggcactctgctgcccccgggcgagatgctgatcccccaaagcacggtggaggcgctgcacaaggcgcacgccaacggccacaagctgtttttgtgcaccgggcgcaatctgcgcatgacccagccgctgctggactacggctttgacggcgcggtatgcagcgccggcggctatgtgttctgcggggataaggtgctggttgatctgcccatggagccgcagctggcacagggtgtgcgcagcgccatggagcgccacggcgtggagtgcacgctggaagcgcgggatgccacctacggcagcctgaaaatgatcgagcgttggagttttacccaccgggatgcaggcaatctgaacagcgaagccgcccgttggcgcaaggccatggaggacggtatgaccatcagcccgttggccgattacaagggcgagccgctgtataagatcgtgtatatcgcagagcacagcgaggacttggacgaagcaaagcagctgtatgaggacagattcgtgttctgcgagagcaagctggacggtctggacggcggctatgtgaatggcgagctcatcaaccgcaaatttgataaggggcgcggcatcaaggcagtctgcgactatttgaacgtgcccctgcaggacagcatcggctttggcgacagcgacaatgacctgcaaatgaccgatgtggtcggcatcagcgtctgtatggccaatggctctgcaagcctgaagcagcgctgcgaccgcattgccccctcggtgtacgaggacggcattgctaaggaatttgcagctttcgggctgatttgagatttcttttggtaaaaacagggcaggggaacatccgcagacgttcccctgccctgaaattataaataatactttcgcatcattttgtaataaaaaagcgctgcacggtattttgtgcggcgctctctttatattgacagatcagtagtgcagatcctctgcggtcaggctttccagcacgggcagcatggcagcggcttcagccttggcggcgggcagatccatatcgcggtagttgccgcactccacctcgctggcaccgggcacagcgccctcaaaatcggccataaagcggtaggcgtccaccgtcagctgcaatgcctgcgcaggggtcagcccccgggtgagcaggtaaaagccggtgcggcagcccatggggccaacatagatcaccccgtccttcacggcgctgttgcgcgcgtaggtggcaaacagatgctccagcgtgtgagcggcagcagtggtcaggtaatcgccctgattgggctttttcatgcggatgtcccaggtgagcacatcgccgtcctgacggctcaggtacatcccgcgctccagccgggtgtgatccacgcaaaagcttgcgatacgttccatactacagctctcctttatcagccctgcaggcgctgcacactgccgtgtgcgcagtccacagccaccatcaggccatcgcggatgtggctggtagcaccggcggcaccaacaacggtgggcttcagcagtgccttaccggcaatggcggcgtggctgttcaggccaggctcctctaccaccagagcggcagcgtcgcgcacaaagctcagcatctcattgctggtggaaggaactaccagcaccatgccgggcttgaacttggcgcgcacctcgtccatggtgcggcagacgcaggccttgccgctggcaacatcgttgttctcagggccgacacccacgccggtagccagacagttgcccaccatgtggatcttgatcatgttggtggtgccggaaacgcccacgggcacgcctgcggtcacaacagccagctcgccgttgtgcaggtagccattttccttagccagagcagtggacatctcgatcagctcatcggtgctgtgtgccagagacatcatcagcggggtgatgccccagctcagggacagctgacgctgcacctgctcgcgcatgacgcaggcaatgatgggctgctgcgggcggtacttgctcagcaggcgggcggtggtgccggactcagacacggtaacgatggcagcggcgttcacgtcccgtgcggtcaggcaggcagcatgggcggtagcgtcggatacgctgatcttgccggggttggaatccatctggcggccgcgcagatggaagccttcctgctcggtgcgctcagcgatggcggacatggtcttgagcgcctccacggggtaggcaccggcagcggtctcaccggacagcataatggcagaggtaccgtcgtagatggcgtttgccacgtccgaaatctcggcgcgggtggggcgggggttcactatcatgctgtccagcatctgggtagcggtgacgatgggcttgccgaaggagaaggagcggtcgatgatggttttctgaatgccgggcagctcggtgaagtcgatctccacgcccagatcgccacgggccaccatcacggcgtcggcagcagccagaatgctgtcgatgttgttcacgccctcgcggttctcgatctttgcaatgatgcggatgttggaatcgtactggttcagcaggttgcggatatcgtacacgtcctgtgcggtgcgcacaaaggaagcggcgatgaaatcatagccctgctggatgccgaagatgatatcgtccttatcgcgctggctcatatacggcatggacaggtgtacgccgggcacgttgacgcccttcttgttcttgatcttgccgttgttcagcacggtgcagacgatgtcggtgtcgttcacggtctggatctgcagcttgatcaggccgtcgtccagcatgatggtgccgttcggctccacgtccatgggcagatccttataggtgatggagcagatctcgttggtgccctccacatcgcgggtggtcagggtaaaggtctggcctgcaaccagattctcaacgccgttcttgaagtccttcaggcggatctcggggcccttggtgtccagcagtgcggccacgggcttgcccagctcctcgcgcagagccttcagcttttcaaggcgtcccagatgctcctcgtgggaaccgtgggaaaaattgaaacgagctacgttcatgccgttggcgatcagctcgcgcagaacgccttccttatcggtggaagggccaagggtgcaaataattttcgtctttctcatgcaatatacctccgtcaactctctcttacctatatccggcacagcatccctgcaggctgctgtgtatgaccaatgggagtaaaagctcccggtacagcgggtcggtttatatggcagagcgggaaaacccaaaactctaccacctattattataatcattccggcgcaagagagcaagaggaatttttgcttgaatacaagtttttgcatctgttgatgcccaaaggaaagattgcaaaacttttaacgatgcgccgcagctttctgcgtgctgtctgacaggggaaaactgctgcaaaacgtgaaaactgataagaacatacaagactgcttcctcttgcatcggagggggtttttgcttataataggggtaataaagtagtactgttccggggaacgcccggagaatggagtgaccattatggaaaaacgcgtttttctgatcgtgctggacagctttggcatcggcgcagagccggacgccgctgcctttggcgatgcaggcaccaacaccctgggtgccattgcgaaccaccccaatttcaattgccccaacctgcgcaagctgggcttgttcaacattgacggcgtgaccgcaggggagaaaacggatgccccggcggctgcctttgcccgcctgcaggagcagagcatgggcaaggataccaccatcggccactgggagatcgccggtgtggtcagcccggagccgctgcccaccttccccgagggcttcccggaggaactgatccgggaatatgagcaaaagaccggccacaaggtgctgtgcaacaagccctattccggtacgcaggtgctgaaggactacggcgagcaggccatgcgggaaaacgccctcatcgtctataccagtgccgacagcgtttttcaggtggccgccaacgaggagcttgtgccggtgcaggagctgtaccgctactgcgagatcgcccgggaaatgctcaagggcaagtacggcgtgggccgcgtgatcgcccgccccttcctgggcaacagcgcggataccttctaccgcaccaccaaccgccacgacctgagcctgaagccgccccgcgccaccatgctggatctgctgaaggatgccggtaaggacgtgatcgccgtgggcaagatctacgatatctttgacggcgagggcgtgaccgaaaagatcaagaccaccggtaacaccaacggcatcgcctttaccaaggctctgcagacccgggattttgaaggccttgccttcgtgaatctggtagactttgatatgctctacggccaccgccgcgatgtggcaggctacgctgccgccgctacggagttcgaccgttttctggccgatttcctgccggggatgcgggagggcgacctgctcatgatcaccgccgaccacggctgtgatccctcctacaccaagaccaccgaccatacccgcgagtatgtgccgtatctggtctgcggcaagggtgtgaaggcggggacggatctgggcaccaagctgtgcttcggcaccatcgcccagaccatctgcgaatatctggaagtggacgcctccacgctggacggcaagagcgtatggcaggagatccgggcataaaacgccacagaagtaagaagaacaggagcgtgaaacgatgcgtatttatgatctgatcgcaaaaaagcgggatggcggcacccacacccgggaggagctggaggccattgtcaacggctttgtcagcggggaagtggccgactatcagatggctgcatggatgatggcggtgtatctgcgcggcatgaccaatgaggagaccgccgaactgactgatgtgatggcgcacagcggcgtgatggtagatctttcgcccattccgggcatcaaggtggacaagcactccaccggcggcgtgggcgataagaccacgctggtcatcgcacccatcgtggcagcctgcggggtgaagatcgccaaaatgagcggccggggtctcggccacaccggcggcaccattgataaaatggaaagcgtgcccggcacaaaaactgccctctcgcaggaggagttttttgcacaggtgaaccagatcggtctgtcggtcatcggccagagcgagggcattgccgtggcagataaaaagatgtacgccctgcgggacgttaccgccaccgtcagctgcatcccgctgattgcgtccagcatcatgtccaaaaagctggcctccggctcggacgccatcctgctggacgtcaccaccggcaccggtgcttttatgaaaactgttgaccagagcattgagctggcgcagctgatggtcgccatcggcacccaccatggccgccgggtagccgccatgatcaccgatatggacaccccgctggggcacaacatcggcaacagtctggaagtcatggagagcatggacgtgctcaaaggccatgggccggcagacctgaccgaggtgtgcctgcaattggcggccaacatgctggtactggcaggcaagggcgatgccgcccactgccgcgctatggccgaggctgtcattgcggacggctctgcctttgccaagtgcaaggaaatgtttgccgcacagggcggcgacatccgggtgctggacgattacagtctgtttgcacagcccgccgccagctatgaactgctggctgagcaggacggctacattgtggccaacgatgcggaaaagatcggctctgccagtgtgctgctgggcgcaggccgccagaaaaagggcgacccgctggactttgccgccggtatcaccctgcacaaaaagcgcggtgactacgtccataagggcgaaagccttgccaccttctacggcgctgcggacaagtttgaagctgccgcagccgagtaccgcagcggccttgtgtacggcgctgaaaagccggaggaagctccgctggtgtatgcccttgtcaccaaggacggcgtagagcggtactgaatcttatagaacctcaaaagggactgctgc

SEQ ID NO: 13791 - DNA, 15329 bp, Unknown
  gut microbiota DNA sequence
gaacaggccatcttgcacaaaagaactgtcgctttttaagcaattcgctgtatttgcgagacaaacggtagaactttgcatcgggatatggtatactatgctgtacttgtatgccccggaaaaaggggctgccaaaggagaaaggacttgttatgaagatcattctggtgggcggcggcaaggtcggcacggctctggcgcgccagctcagcgaggaaggccacaacgtgactgtggtggacaccaacaaagcgcgcgtggagcacctgaccgaaagctacgacgtgctgggcattgtaggcaatggctcgtccatcaccaccctgtctgaggcgggcattgaggatgcggacgtgttcattgcggtcaccggctcggacgaactgaacctgctttgctgcatgttcgccaaaaaggcgggccactgccacggcattgcccgcgtgcgcaacccgtcttacagccacgagctggactttatcaaaaagcagatcggcatttccgccattatcaacccggaaatggcagcggcaaaagagatctctcatctgctgcgtttccccggtgccagcaagatcgatacctttgcggacggccgtgtgcggctgatcaagtttgcgctgcccgatgcactggatggcgtggccatccgcgagatccctacccggctcaagagcgatattctggtgtgcgcggtggagcgtgagggcggggtcatcatccccaacggtaactttgtgctgcaaaagggtgatcaggtcaccttccttgctacgcaggaaaaagctcacgccttcttccagcagctgcatctgccggtgcagccggtacgcaacgccctcatcgtgggcggcggtgccattgcttactacctcagtcaggaactgctggaaaaccatgtgcgggtgcgcattgtggagcgggacgctgcccgctgcgtagaactggccgagcagctgcccggcgcacagatcctgaacgaggacggctccaaccgcgagtttctgctttccgagggtctggaatccaccgaggctttcgtggcactgaccaacatcgacgaggagaacgtgctgctgaccctgtttgccaaaaagcactccaacggcaagctggtgaccaaggtcaaccgtctggaatttgacgatattctggccgggctggatctgggcagtgtggtctaccccaagtacatgacctgtgactacatcgtgcagtacgtccgcgccctgcaaaacgaggcgggcaacaacatcaagactctgtaccgcatactggacgaccgcgtggaggcgctggagtttacagtgcacgaggagagcgccgctaccggtgtgcccctgagccagctgcacctgaaaaagaacctgctgctgtgctgcattacccgcggcagcaagatcctgattccccgcggcggcgaccagatccaagtgggcgataacgtcatcgtggtcacgctggagcatggtctgcacgatctgcgcgatatcgtggagcactgacggaggcggactatgaattatgcgatcgttttccgtctgctgggctatgtgctgatgatcgagggcgcgttgctgctgctgcccgccgccgccagcttagtgtatggcgagtggatggtgctgggcgtgtttctgctcacagctgccgtcagcgctggcatcggctacgccctgcacaccatcaaaccccgcagtaaggtgttctatatgcgcgaaggctttgcggctacctcgctgtgctgggtgttcatctcggtgatgggcgcggtgccctttgtgctcaccggctgcatcccgaaccccgtggatgccctgtttgagacggtctccggctttaccaccaccggtgccagcatcctgcccgccgtggaggggctgcccaacggtattctgttctggcgcagcttcacccactggattggcggcatgggtgttctggtgtttctgctctcgctgctgccgctgactggcggctctcacgtcaacctgatgaaagccgaaagccccggcccgcaggtggacaagcttgtgcctaaggtgcagtccaccgctaagatcctgtacggcatctactttgcccttaccgtgctggagctggtgttcctgctgattggccgaatgcccctgttcgaagccatgctcactgcctttggtacggcgggtaccggcggcttcggcttccgcaacgacagctttgccagcttttcgccctacatccagtgggtcgtgaccattttcatgatcctgttcggcgtcaacttcaacgcctacttcctgctgctcatgcgcaagttccgccgcgctgccgccagcgaggaggtgcggggctactttgtggtcatcgtagtggcagtgggcatcatcactgccaatatttatagtatgtacaacagctttggcgaggcgctgcggcaggccgcttttcaggtgggctccatcatcaccaccaccggcttttccagctgcgattttgacctgtggccgaccctctccaaggagatcttggtcatgctcatgttcattggcgcctgcgccggcagtaccggcggcggcatcaaggtgagccgtttcctcattctgggtaagaccctggccaaggagctcaagaccgccctgcacccgcaggtggtagcgcccgcccgcatggacggcaagctactgaaccacgagaccatccgcaccaccaacgtgtttgtggcggcgtatatctttatctttgcggcctccttcttcctcatcagcctgaacggctttgatatggtgacgaactttaccgccgtggctgctaccctgaacaacatcggcccgggcttggaaatggcaggcccaatgcagaacttcggctgctttgcagaccccgcaaagctggtgctcatcttcgatatgctggccggccgtttggaaatcttccccatgctggtgctgtttatgccggatacatggcggcggttctaagccttttggggcacgggacaagcataaaaatattatttcggaacaccggagtctctatggaggctctggtgttcttttttgtgaaagaagtcggaaaggcagatggcaacggttagaaatgccttgcgttcagcgccgcattgcagtatgatatataatatcaattatctgacccttacccctgagcaggcagaacctttttacaaacgaaatcgttctgcatgataaagaagagagcaaaaacaataaaacatacaggaggaaattattatgggtttgatcaaagcaggtatgggcgcactgggcggaactcttgcagaccagtggaaggaatttttctactgcgattctctggataaggatgtgctgatggtcaagggccagaagcgcacttcccgccgcagctccaaccacggcgaggataatatcatcaccaacggcagcggcattgccgtggcagacggacagtgcatgctcatcgtggagcagggccgcgtggtggaggtgtgcgccgaaccgggcgagtataccttcaattcctccaccgagcccagcgtgttcaccggcaacttcggcgacagtctggcagccactttccaaaccgtagccaagcgctttacctacggcggcgacaccggcaaggatcagcgggtgtactacatcaacaccaaggagctgggcgagatcctgtacggcaccgcaacgcccatccccttccgcgtagtggtcagcgaggagcggggctacaagctctcggtgaacatccgctgcaacggcagctttacttaccgcatctgcgacccgctgctgttctacaccaacgtgtgcagcaacgtctccacccagtacgatgcctcggagctggctccccgcctgaagagtgagctgatgaacgctttgcagccggcgctggccaccctttctgccaacaaggtgcaatattacgagatccctgcccacacgctggagatctccgaggcgctcaacgagcagctgtccaatatctggcgcaaaaagcgcggcattgaggtgttctccttcaacatcaactctctgtccatcccggaggagcaacagaagaagatcacagagtgggaagaaaacgccatgaccaccgaccccaccaccgctgccgcccgtctggtgggtggtcagatcgacgccatgaagaccgccgccggcaacaccgccggtgccatgaccggctttatgggtatgggcatggcagccggtgcaaacggcatgaacgctcagaacctgttcgccatgggacagcagcccgccgcaccccagcagccttctgccgccgacagctggaagtgcagctgcggcgctaccgttaccggcaagttctgcccggaatgcggcagcaaaaagccggaaccgaagcccgctgctgacagctggacttgcagctgcggtgccaccgtcaccggcaaattctgcccggagtgcggcaagccccgcccggcagcagcagagggctggacttgcagctgcggcgcggtgaacaagggcaagttctgctccgagtgcggcaaacccaagcctgctggtacccccaagtataagtgcgacaagtgcggctgggaaccggcagaccccgctcacccgcccaagttctgcccggagtgcggcgacccctttgacgaaaacgaccgcagctgaacccggcacacaataaccgatcacactgcggggcagggaaggaaagtcaataagtccctgccccgcagattataataggaggaaacgctatggcaggaatgctggaatataagtgcccctgctgcgatggtgcgatcaaatttgacagcaccacccagaagatgaaatgcccctactgtgacaccgagtttgaggtggacgcactgaagggctacgatgaggacctgaaagaccaaaagcccagcgagatgaactgggccacccccggcggcagctgggcagagggcgagaccgccggtctgcatacttatgtctgcaagagctgcggcggcgagatcgtgggcgacgacaccatggcagcctcggcctgccccttctgcggcaaccccatcgttctgaccggacagtttgccggagacctgcgccccgacctcatcatccccttcaagctggataaaaaagcggcgaaggaaaagctgcaggagcacctcaagggcaagaccctgctgcccaaggtgttccgcagccagaaccacatcgacgagatcaagggcgtgtatgtgcccttctggctgtacgacagtgatgccgacgcccagctgcgctttaccgccacccgcacccgcttttggtcggatgacgactacgattataccgagaccagctactattccgtgcgccgggacggcgtgctgggctttgacgcggttccggtggacggctcctccaagatggcagacgacctgatggaatccatcgagccgtttaccatgcaggatgccgtgcccttcaagacagcgtatctggcgggctatgtggccgataagtacgatgtggacgcccaaaagagcatccagcgcgccaacgagcgtatccgtcagtccaccgaggacgcctttacccagaccgttaccggctacgactccgtgaaaatggagaacagcagcattcagctgcacggcggcaaggcaaagtatgccctgttcccggtgtgggtgctgagcaccagctggcagggcaacaactacatttttgccatgaacggccagaccggcaagtttgtgggcaacctgccggtggataaggtcgccgcccgcaagtggacgctgggacttacggcagccgtcggtgcagcatcctatgcgatgatgtggctgctgtggctggccgggattctgtaaaggagggacggaagatgaaaaagactgttaccccactgcgctccctctgtgccgcgctggcagcactggtgctgctggtcgcgctggccgcaccggcctttgccgcagacggctttgccgacctgtattaccgcatgaacgacagcgcagaagttctgaccgaggacgaggacggcgagctggaagcttcactggaggaactgagcgtccgtcagagctttgatgtgatcattgctaccatcgactcgctggaaagcgagggctgcaccagcatggaggaatatgccgatgacctgtatgattactgccagttcggctacggcgaaaaccgggacggcgtgctgctggtggtgagcataggcgaccgcaaatggcatatctccacctgcggctacggcattaccgcctttacggatgccggcatccagtaccttggcgagcagatgacccccgatatggcagacggtgattacgccgccgccttccgcacctttatccagtggacggacgcatatgtcaccgccgcccgcgaaggccacccctacgatgtggacaacatgcccaaggagccgttctcgatcgtgtatctgggcgtggcgctggtcattggcctgatcacggcactgatcgtgaccggcgtgatgaagagccggctcaagagcgtggcaccgcagcgggacgcaactagctatgtgcggcagggcagcatgaagctgaccaaccagcgggatctgtatctgtaccgtgagatccaccgcaccgagcggccgaaggagactgactccggcagttccggcggcagctccacccatacctcctccagcggctccacccacggcggcggaggcggttcgttctgaaaacgttccccgcaagataaaatctcaaaaaccgatccgcagcagccggacgcacccgcgccccggcaaccgctgcggatcggtttttacttttctgccgcccgacacaaacgactgattttttctgcgcctttggggctatacttccagtgcagacgattttatatgcagcaaggagcagacacatgggcatttgggaaaatctgggcatgggcggttaccggggcttttcgcgtccggcggcgcggctgttgcagcaggcggtgcagctggcgggagatctgggctgtgaacaggcggataccagccatcttttgctggcaatgctgcagcagcagggcgctgcggcgcagttcctcacccggaaaaacattaccgagccggaggtgcgccgccagctggcgcagcagcgcagcggcccggcacagcggctggaccggcagtccatggcaccggacctgcgccgcaccatggactatgcgctcattggggcgcagaacgcccacgtcagccgggcagagccggagcatctgctctgcgccatgctggaagatgacggctgcgccgccgggctgctgctggcggagatggggctttcgctcaccgaggcggtgcgggagtgccgccagctgagcggacagtttgtgctgcccgcccagccccgggtgtcggccagcatcccccggggcagccgcgccagcgataaatactgccgcgatttgacccgccgtgccgccgaaggggagctggacccggtgttctgccgggaagccgagcttgaccgcatggtggaaatcttgtgccgccgccagaaaaacgatccctgtctgatcggcgagccgggcgtgggcaaaacagcgctggctgagggtctggcgctgcgcattgccgccgggcaggtgcccagagcgctgcaagggcggcggctgctggcactggatatggccagcttggtggcgggcaccaagtaccggggcgattttgaggagcggctgaaaaacctgctggaagagctggtgcgggacggcactgccatcctgttcatcgacgagttccacaccatcgtgggagccggtgccgccgagggtgccatcgacgccgccagcatcctgaaaccggtgcttgcccggggcgagttgcagctcatcggcgccaccaccaatcaggagttccgcacccacatccagaaggacgccgcgctggaacgccgctttggccgggtgcaggtggaggagcctacccccgcacaggcggtggagatcctcaacggtcttgcgccccgctacgagcgataccataacgtgcgactgccgccgcagaccttgcaggcggcggtggagctttcggtgcggtatctgcccgggcgctgtctgccggataaggctatcgaccttgtggacgaagcctgtgcggcggcgcgcatccttgccgaaaaggagcagcgcacccagccggtgctcaccccggaggatatcgcccgggtggtggcggccgccagcggcgtgcccgcccagcgggtgggcgagcaggagcgggagcgtctggacaagctggaaagccgtctgaatgcggaaattgttggccagcagcgggcagtggcggccgtggcaggggctatccggcgcagccgcaccggtttgggcgagccgggacgtcccatcggtgctatgctgtttttagggcctaccggcgtgggcaagaccgcactggcgcgtgcgcttgcggtcagctggtttggcagcgagaaagcgctgctcaaatttgatatgtcagagtatcaggagcagcacaccgccgcccggcttctgggtgcgccgccgggctacctcggccatgacgagggcgggcagctgaccgaagccgtgcgccgccgcccgtacagcgtggtgctgtttgacgagatcgaaaaggcacacccggatatccagaatatcttgttgcaaatcttggaggacggtcagctgaccgatgccatgggccgcaaggcagatttccgcaacaccatcgtgctgctcacctccaacttgggcgcacggttcctggcggggcagaacgcgccgctgggctttgccgccggggcagaagccgtgtttgaaaagcagtccgcgcaggctgtggaggaagctaaaaagtggttccggctggagctgcttgggcggctggatgaagtgatcgtgttccgcccgctggcggaagaaaacctctgcgccattgcagaaaaaatgctctgtcagctggagcagcgcgccgcccgcagcggctaccggctgcgccacaccccgcaggtgggggcggcactggctgcccgggcgcaatcggcctatggtgcgcgggaactgcgccgtcaggtggacagggcggtggagcaggcacttgcgaaccgcattgccgccgggacggcctgcgtagggcagcactggacggcagactgcgccgccgatggcagcatcattttgcgggaggatgaaaccataaccctataaaaaatagcaaaatagcgcttttgcttgcaaccggcgcggttttcgactattatagaggaaatagagttacaacagggaggaccccgatgcacacgctgtttcttctgaaccccgcagccggaaaggccgactgtacccgcaccctgccgcagcagatcgcggcggctgctgccggtgccgggcttgccccggaggactacaccatccgcgtcaccacccacgcaggccatgcccgggagctgtcccgcgcagccgccgctgccgcccagaaggccggggtggagcttcacatttttaccgccggcggcgacggcaccttcaacgaggcgctcaccggtgcccacggctttgataagaccgccgtgggctgcctgccctatggcagcggcaacgactttctgcgcacctacggtacaaaggaggagtttctggatctggacgctcagctggccggtggggcagtgcccatcgacctgatgcgcaccagtctggggctttctgccaccatctgcgccgccggtctggacgcacaggtggcctacggcatccccaagttccggcgcatcccgctgtgcggcggcgaggcagcctatgcgctgtctattgttcagcagctgtgcgggcatatcggccgcagggtggagtacgtcattgacggcgaggtgctgaccgtggactgtctgatgtgcgcagtgtgcaatggccgcgcctacggcggcggttttatggccgggccggaggcacagccggatgacggctggctggatgtgttcatcgtgcgcaaggtcagccgccgggtcattgcaaaactgctgatgttgtacaaaaacggccagcactttcaaaacggccagctgaccgaggccgcaaagccctactttatctaccgccgcgcaaaatcggtcagtctgcgggcagcagatggccgcggacccatcattgccacagtggacggcgagtgcgccccctgcaagcaggtgtcggtgcaggtgcagccgctggcaggccgcgtgctgctgccgctgcccgcctaccagcgctttaccaccaaaaaggcgggtgtgaagtaaaaaataaatcatcagacccaaacaaggccgctgcacattgttccgtgcagcggccttgtgctttactgttatgtgccggtttgggtatggcgctgccgcacccggcgttccagcgccttgtaaaagctactcaggcagagcgtgagcaaatatacagtcagggtccagaccacaggctgcaccgtgaggttaagcttgtccgctgtccactccatataccggatcagcacctgatggatcagaaaaccgtaaggggacagccccgccagccacaaaaacggctttgcggaaagcagccgggaaatgattcccttacccacggcaagcagccagaccagcagcaccgcagagggggtaaacagcacattgtaccggaaggccaccgcgcccagaacccccacctgcttggcggcgataaacaggcagccgcccgcaagcagcacagcagcaagctccagcagggagaaagcaccgcccggcaggccgctctcctgtttgcggctgtggtaaaggcaccccatacagcagctgatggtaaaatctcccgcccggaacagcgggcacagataggtcaggtaaaaggcgacctttccgctgagcccgactttccagaaaacaaaggacgcaagacactgcacgcagaagattacggcggcaatgcaacgcagcctgcgggtatcggcctttttcagtacggcgagaagcgggggaaagatggcatacagaaaagcctgtaccgaaagataccacgccactcagttcaggcagaaccagaaacggctggagggaatccatgtttgcagcagaaaaatgcttacaacaagctgcgctgcacaggagagcaccccgcgggcagagggctgcgccagaagccccttcagcacaaataacaacgcggcagccatcattataaggtgcagcgggtacagctttcgtatttttttaagagagaaagctatggcagaccgcagtcccggtgctgtgcgcgggcggtcgtaatagttgcaggtcatcagaaaaccggacagcgccacgaataccgtgatcgcccacggccccagccacggtgccccgcaatgggagagcaccacgctcaaaaatgcgactgcccgcagcccctgcaaagatgagatcagctttttgtctgtcaaagtatcctccgttctgccgcaaagcgcgtcagctgtgtttttgtaatgcgctataagtataaaaaagacggcgcgtcctgtcaagaacacaccacttttttgcgtagcagggtgcgatttttgggcgtcataaattcttaacaaagaaaaattgcaaaaccccttgatttttcagagcaagatgagtacaatacaattagcactcagagaaaaggagtgctaaaccgctgcggagcacacacgaagcccccgcaggacgcaacaaagtttcaaataaattcaatataattggagggcaagaattatgaagatcattcctcttgcagaccgtgttgtcattaagactgttgaagttgaggagaccaccaagggcggcctgatcctgaccggcagcgcaaaagagaagccgcaggtggcacaggtcatcgcagttggccccggcggtgtcgtggatggcaaggaagtcaagatgaccgtcaaggtcggcgacaaggtcctcaccagcaagtactctggcactgaggtcaaggtggacggcgaagagtgcaccatcgtgcgtcagagtgatattctggctgttgtggaagactgaaactgaattttcccttttcaattgagcttgtattataaaggagcgatgtattatggcaaagcagatcaagcagggcgaggacgcccgcaaggcactgtgtgccggtattgataccctggctaacaccgttaagattaccctcggccccaagggccgcaatgtggtgctgggcaagaagttcggcgcaccggtcatcaccaacgatggcgtgaccatcgcaaaagagatcgagctgaaggacgagttcgagaacatgggcgcacagttggtgcgtgaagtcgcaaccaagaccaacgatgccgcaggcgatggcaccaccactgctaccgtgctggcacaggccatggtcaacgagggcatgaagaacgttaccgccggcgcaaatcccatggatatccgccgcggcatgagcaaggccgttaccaccgctgtggagaccatcaaggcacacagccagaaggtgaaggacagcaacgatatcgcccgcgtcggcaccatctctgccggcgaccccgagatcggccgtctgatcgccgaggctatggagaaggtcacctctgacggcgttatcaccatcgaggagaacaagaccaccgccgagacctacaacgagatcgtggaaggtatgcagtttgaccgcggctacctgaccccctatatggtcaccgataccgacaagatggtggccgatctggacaacgctgctatcctgatcaccgataagaagatcagcgtcattcaggatctggttcccctgctggagcaggtgatgcagaacggcatgaagctgctgatcgtggctgaggatatcgagggcgaggctctgtccaccctgatcgtcaaccgtctgcgcggtaccctgaatgtcgtggctgttaaggctcccggcttcggcgaccgccgcaaggagatgctgcaggatatcgctaccctgaccggcggcaccgtgatctcctctgatctgggctacgagctgaaggacgcaaccgtccagatgctgggtcatgcccgtcaggtgaaggtgaccaaggagaacaccaccatcgtgggcggcgcaggcgacaaggacgccattgcagctcgcattgcccagattcgcagccagatcgaggccgctaccagcgactttgaccgcgagaagctgcaggagcgtctggctaagctggccggcggtgtggctgtcatcaaggtcggtgctgctaccgaagtcgagatgaaggacaagaagctgcgcattgaggatgcactgaacgctaccaaggcagctgtgcaggaaggtgttgtggccggcggcggtaccgctcccatcaatgccatccccgctgtgcgcgccctgtgcgatacgctggagggcgacgagcgcaccggtgccaagatcgtgttgaaggctctggaggctcctctgcgccagatcgccaagaatgccggtctggagggcagcgtcatcatcgacaagatcatctctgccaacaagcccaactacggcttcgatgcccagaacgaggtctttgtcgaggatatgatcgctgcaggcatcgtggacccgaccaaggtcacccgttccgctctggagaacgcagcttccgtcgctgagatggtgctgaccaccgagagccttgttgctgacctgccggaacccccggctcccgccgcacctgccggcggtgacatgggcggcatgtactaataactgcctaaaaaccgcatgaatccttgatttttggagcgcgcaaaatcggatttacgccaaacttacgccacttacgccaaaaatcaaagcgcactatagggtaacaaaatcggcactcgctgaaaagcgggtgccgattttttgtgtctaggggatttgaagactcatgaaacccactgatggattctgcgagcggcagactgtcagcggctttattgttgacggaaaacaaaggtagggatacaataataaaaaagaatgtaaaaccggaagggagcatgccgccatggaaaatcagagggatttctgcacagaatgccgcagagaaacaaactacaccttgaagaaaatcaaaatcaaccggaccatccgggaaaaggagtatacttttgaaatcacggctgctttctgcaacgaatgtggcggcgaaatggatgttcccggtctgatggactatagcataaaggaaatggacgagcagtatcgtagcatcagaacgtgagatgggctaaagaagcatactgcaacaatgatataaaagtagtttcttttcgtgtgaggtgaaatcaatgaatgctgactatgttgaaaatatcattcgaaatattgataagcaatcttataaatgtatcttagttgatggcgcttggggaattggtaagtcctacatggtaagaaaagcactggaggatatgaaggataggacgtgctttatctcactttttggaatggatgatgttcaaaaaatataccatgaagctttttttcagttggcgttgcgtacctctcgtggaggaaaaattgcaaatggtgcgaaaggggtagcaaaagcagctggtaatttctgtgcggagataacaaaattgaacggtgcgcttgcacaagcaatatctgaacgagaattgtttgcggttacggcgagcaattttaaaaagaacagaattatcgtcattgacgatttggaacgccgaaaggctggattggatttagaggaactctttggagtgattgaggaactaaagcagtccaactatattaaggttattcttattgccaattcaaatgaaattcatgaaaatgaaagaactacgttcaataagtataaagaaaaaactattgatcgtatctttgaggtaacggaacactcggcatcgattaagtggggagtgtatggaatagatggagaatttattgatgcctttttgatgcatcacaaagcaaagaatttgagaacattgcaaaaggctcaaaatttttataatgatgtgaaacagtattgcctgaaaatagaaaacgaacaatttatgaacgaagtaaagatgctctgctttgctgttgttgtagaagatgtagataagttatactataaaaacgattcaacagagaaagaaaatactaacagcagataccggaaagatgggcatatcttgagcaatcatttaaatgtccgacttgcaaactatgtatatcttcaatctagtggcacattattggatgatatctataactactttaaaagctctaagatgcttagtgaagaaacccttcaaaaacattatcaaaaatttaaagaatctggtgataaagcaaattattacaaaactgatgaggagatagagacttacattcaaggttggaaagcaaaattacatgaagcatcaaatagtgtagaat

SEQ ID NO: 13792 - DNA, 35089 bp, Unknown
  gut microbiota DNA sequence
cccccagagggggaagccttcagaggatgcccgcatacgcgggcagatcaaaaacgggaaggtgaatgatatggctgaaaaaattttggtagtgggcggcggcggccgcgagcacgccatcatcaaggcactgaaaaagagccccgactgcggcgagatctggtgcgcaccgggcaacggcggcatcagctatgacgccaagtgcaaaaacatcaaggccaccgatgtggataccatggtgggctttgcagtggaagaaaagttcgattacgttgtggtggcgcaggacgacccccttgcactgggcatggtggatgcgctggcaaaggcaggcatccccgcctttggcccggacaaggccgctgcccgcatcgaggcttccaaggtattctccaaggatctgatgaagaaatacggcatccccaccgcaaagtacgagaccttcgatgaccccgcaaaggtcatggattacatccgcgccgagggtaagtacccggtggtcatcaaggcggacggccttgcactgggcaagggcgtgctcatctgcgaaaacgagcaggaggctgccgacggcgtcaaggagatcatgctggacaaaaagttcggcgcatccggcaaccatgtggtggtagaggagttcctcaccgggccggaggtcagcgtgctgagctttacggacggcaaggtggtcaagcccatggtctccagcatggaccataagcgcgccaacgaccacgacaccggcctgaacaccggtggcatgggcaccattgctcccaacccctactacaccccggaggtggctgcggagtgcatggaaaagatcttcctgcctaccatccgcgccatgaacgccgagggctgccccttcaagggctgtttgtacttcggtctcatgctcaccccggacggccccaaggtcatcgagtataactgccgcttcggcgaccccgaaacgcaggtggtgctgccgttgctggaaagcgacctgctgcacatcatgcaggcctgcaccgacggcacgctggcacagcaggaggtcaagttctccgatggtgctgcggcctgtgtgattctggcctccggcggctaccctgtggcctatgagaagggcaagcccatctccggccttgtggacggtcagctgcccgacgaggagaacgtgacggtgtaccactccggcactgccatcaccgaggacggccagcttgtgaccaacggcggtcgcgtgctgggcgttaccgccaccggcccgcgcctgaccaacgccctgagccacgcctacgaagcagccgaaaagatcagctttgaaaagctgcacaagcgcagcgatatcggcctgcgtgccctgaaagcgctggcagagaagcagtaattaggaaaagcaccctcatcagtcgccgcaggcgagctggatgagggcgcgccttcagaagaattgaatcataagggggaacctacccaatggtctatcgtatttatgtggaaaaaaagcccggctttgatgtcgaggccaacggtctgaaaaatgaactcaccagcctgctgggcatcaaggacctgaccggtctgcgcctgctgaaccgctacgatgtggaaggcatcgacgaggcactgttcaaccagtgcgtcagcaccgtgttcagcgagccgccggtggataacacctacgccgagctgcccgctgccgagggcgtgtcttttgccgtggagtatctgcccggccagttcgaccagcgcgcagcttctgctgccgagtgcatccagctcatcagtcagggtgagcgcccgctggtgcgctctgcccgtgtctacctgctggagggcgctctgacccccgagcaggtggccgagatcaaaaagtatgtcatcaaccctgtggaagcccgcgaggcttctctggagaccaaagagaccctgaagatggattaccccgtgcccgctgccgtggcagtgctggagggcttcaaccagctggatgaggctggtcttgccaagttcattgaggaaaagggtctggccatggatctgggggacatcaagttctgccaggagtacttccgcaccgagcagcgcgaccccaccatcaccgagatcaagatgatcgacacctactggtccgatcactgccgccacaccaccttcggcaccattctggacgatgtgcagatcgatgacgctgtggtgcaggaggcctttgaccgctacatggcgatgcgcaccgagctgggccgcgagaacaagccccgctgcatgatggaccttgccaccattggtgccaaggagctgaagaagcagggtatcctgaagaatctggacgagtctgaggagatcaacgcctgcaccgtcaagatcaagtgtgacgtcaacggcaaggatgaggactggctgttcctgttcaagaacgagactcacaaccaccccaccgagatcgagcccttcggcggtgctgccacctgtatcggcggtgctatccgcgacccgctgtccggccgcagctacgtctatcaggctatgcgtgtcaccggcgcaggcgacccgctcaagccggtcagcgagaccatgcccggcaagctgccccagcgcaagctggtcaccaccgcagccgccggttactcctcctacggcaaccagatcggtctggctaccggtcaggtggacgagatctaccaccccggctatgtggcaaagcgcatggagatcggcgctgttgtgggcgctacccctgcttcccacgtccgccgcgagtgccccgctcccggcgatgtgatcgtgctgctgggcggccgcaccggccgtgacggcatcggcggtgctaccggttcctccaaggcgcacaagctggacagccttgagcactgcggtgcggaggtgcagaagggcaatgcgcccatcgagcgcaagctgcagcgcctgttccgccgcgaggacgcctgcaagatgatcaagcgctgcaacgactttggtgccggcggcgtttccgttgccatcggtgagctggccgacggcctgtatatcgacctgaacaaggtcaccaagaagtacgagggtctggacggcaccgagctggccatcagcgagagccaggagcgcatggctgtggcccttgccccggaggatgtggacaagttcatcgccattgccaccgaggagaacctcgaggctacccctgtggccaaggtcaccgaggaaaagcgcctgaacatggtgtggaacggcgtttccatcgtgaacatcagccgtgagttcctgaactccaacggtgcagagaagcaccagaacgtccatgtggaaaagggcagcgtctggcagccccagtgggcaggcctgaccttcagccagaagatgaagtccatggtgggcgatttgaacgtctgcagcaagaagggcctttccgagcggttcgactccaccatcggtgcagccaccgtgctcatgccctttggcggtgcataccagctgaccccccagaacgccatggtagcaaagctgccggtggacggcgagacctccacctgctccggcatggcatggggctataacccctatctgatgagcgccaaccagtatgtgggtgcacggatggctgttattgagagcgtgaccaagctggttgccaccggcttccgctacgaggacgcttacctgaccttccaggagtacttcgagcgtctgggcaacaagcccgagcgctggggcaagccgctggctgccctgctgggcgcactggatgcgcagatcggtcttggcattgcttccatcggcggcaaggacagcatgtccggctcctttgagcagctggatgtgccccccacgctggtgtcctttgccactgccattggcaaggcaagccgcgtagtctccaccgagttcaagaagccggagagcaccgtggtgctcgttcgtcccatcatcgacccggagaccggctgccccaacttcttctccctgaaggccaactacaagatcgtggagaacatgatcgaagaaggcatggtcgcttctgcctgctccgtgggctacggcggcattgccgaggcactgttcaagatgggtctgggcaaccgcatcggcttcaagatgcgtgcggacatgaccacccaccagatgtttgagcccatgtatggctccatcattctggaaatggtgtctgattctcccgccggtatgctgctgggcgagactaccaaggagtacaccttcgagtcctgcggcgaaaagctggatatggccgaactgcaggagatctgggagagcaagctggagcctgtgtatccctaccgcaaggccggccccgctgtggaaaagatcaacggcagcctgaccgctcccgctgcacccaagatcggtgttgcaaagcccaaggtcatcatcccggtgttccccggcaccaactgcgagtacgacaccgccaaggcctttgcccgcgccggtgctgaccccgagattctggtggtacgcaatctgacccccgccgatgttgccgagagctgcgaggcactggtcaaggccattgacgcaagccagatcgtcatgctgcccggcggcttctccggcggcgacgagccggacggcagtgccaagttcatcgcctccttcttccgcaaccctgcggtcaccgaggctgtgcgccgtctgctgcagcagcgcgatggcctgatgctgggcatctgcaacggcttccaggctctgatcaagctgggtctggtgccctacggcgatatccgccccatcaccgcctgcgaccccaccctgaccttcaacaccatcggccgtcaccagagtatgctggtgcacacccgtgtggcttccaccggcagcccgtggctcagcaagtgcgaggtgggcgagatgcacaccattgccatcagccacggcgagggccgctttgtggctccgcaggaggtgctggacaccatgctgcgcaacggtcaggtggctacccagtatgtggatctgaccggcgtgcccaccatggatcagagcttcaaccccaacggctctgtgctggctatcgagggcatcaccagcccggacggccgcgtgttcggcaagatgggtcactcggagcgcagcggcgagtacctgtacaagaacgtcacaggcgataaataccagccgatctttgagggcggcgtggactatttcaaggtttgatggtagaataagaagaaaaatccctcagtcatcgcagacgcaagggtgaaccctctcagccaaagcctgacggctttgccagctcctccgaagggaggagcttacgagaggagagggaaaggttgcttttttcttgggaaagaagcaacttttccgtttgcagaaaaagctccccacctcggggaagctggcgagcaaagcgagactgagagggttattttcaggaggaaacaaccaatgtcacagcatgatcgctatatcagccctttttccacccgctacgcttccgatgagatgcagtatatcttctcggacgacaacaagttccgcacatggcggcggctgtgggtggcgctggctcgtgccgaaatggatcagggcctgaccaacatcaccccggatatggtagccgagctggaggctcatgtggacgatatcaactacgaagtggccatcgagcgggaaaagctggtgcgccacgacgtcatgagccacgtctacgcctacggtcagcagtgtcccaaggcagcaggcattatccatctgggtgccaccagctgctatgtgggcgataacaccgacatcatcgtgatgcggcagggtcttgaactggtgcgcaaaaagctggtgggcgtgctggcaaagctggcacactttgccaaggagtacaaggatatgccctgcatggcctacacccactgccagcccgcacagcccaccaccgtgggcaagcgtgctaccctgtgggccaacgaactggtgatggatctggccgagatcgaccatcgtctggctaccctgcagctgcgcggtgtcaagggcaccaccggtacgcaggcttcctttatggagctgttcaagggcgatgccgacaagatccgtgccgtggatgcttccattgcaaaggagatgggctttgaccccaaggccgttgtgccggtgtccggccagacttacagccgcaaggtggatgcctttatcctgaacgcactggccggtattggccagagctgcatgaagtttgccaccgacctgcgcctgctggcaaacttcaaggagatggaggagccgtttgagaagaaccagatcggttcttccgctatgccctataagcgtaaccccatgcgctgcgagcgcatctgcgcccttgcccgctacctgatggtggatgtgttgaaccccagctttaccaccggcacccagtggtttgagcgcacgctggacgacagcgccaacaagcgcgtggctatggccgagggcttccttgccactgatgccatcctgaacattatgctcaacgttaccgatggtctggtggtgtaccccaaggtggtgcgcagccgcctgatggccgagctgcccttcatggccagcgagaacatcatgatgcaggctgtggaaaagggcggcaaccgtcaggagctgcacgagcgcctgcgccagcacgccatcgccgccggtaagcaggtcaaggaagagggcctgcccaacgatatggtggaccgcattgccgcagacccggcctttggcctgacccgcgaggagatcgtggcggggcttgtgccggagaactttgtgggccgtgcaccccagcaggtggaggagtttatcgccaacgtcctgcagcccatcttcgatgctgaccccgaggatgtggagcagcacgcctccctgagcgtctgataataggatcaattgcaaaaaggagaagcctacgggcttctcctttttgcgtttgtgccttgcacgattttgtctgtcatgttacactgagggcatcatcaacaaaggagaaccgcttatgcgtttggataaatatctggccgaaactgcccagtgcacccgcagcgaggccaaaaccatgctggcaaaggggcgcgtgcaggtgaacggcgcggtgtgcaaaaaaggggacacccagctgaaggataccgacacggtgacggtggacggcgcgccgctgcgctatcagaagttcgtctacctcatgctcaataagcccgagggggtggtgagcgcctccactgataagcgggacaccaccgtggtagacctggtaggggactcctacccccggcgggagctattcccggccggacggctggataagaccagcaccggctttgtgctgctgactgatgacggcggctttgcccacgatatcctgtccccccggcaccatgtttccaagacctacactgtgaccatcgacaccccgctcacgcaggaaatgcgcacaggctttgcggcgggggtcacgctggcagacggcactgctctttcgcccgccgaggtgaccgccctttccccggacggatgcaccgtgcgggtagtgctgcggcagggggtgtaccaccagatcaaacggatgttcggtgtgtacggtgccggggtgaatgctttgcaccgggaggcgattggcggccttgcactggatgcacagcttgccccggggcagtggcgggagctttctgacgaagaagtggcaaaaattaccagataaaacactgcacttttcacgcgactttcaaaaatgtatcacaatttaccggtaaaataacggtaagaaccacgcaaaaaggcacttttttggcaaaaaatggccccgaaagataatttcaacaagaaagaattattttttttgttgaaatctgttgcaaaagtaaattcttttgtgtaaaatatagattgtaatgcggctaaattgtttaaaatcacaacccatgccgccgcggcttgcacaaacgaggaaaaggggtatccatttatggccaatagagtatttcaaagcgtgatctaccagatgaaggacgcaatcaatcgggtggtcggcgttgtggatgagactggcgctgtcatttcctgctcggagctgaacctgatcggcgaggtgcgtgagggctatatggccgagcgtctgaccgcaggcgaccgctttgtgcgcgacggctatacttaccagcagttctccaacgccaagcataacgattatgccgtgttcgtggagggcgccgacgagactgcagggcagtttgccggtgtactggccatcagcctgcagagcatcaagcagtaccacgacgaaaagttcgataagtccaactttatcaagaacgtggtgctggacaacatcctgcccggcgatatctacgctaaggcacgggagctgcactttgccaccgatgtttcccgcgtggtgttcatcgtgcgggtgatcagcggcggcgatatctctgcctacgatgtggtcagcagcctgttccccgataagcagaaggactttgtgttcaatatcagcgagaccgacaccgtgctggtcaaggagatccgcaagggcatcgaccgcaccgatatggaaaagctggctgccagcattgtggataccctctccggcgaacactacatcaaggccgtggtcggcattggcacccctattgccaacgtgaaggatctggctacctcctttaaggaagctcagatcgccatggaagtgagcaaggtgttcgataccgaaaagcagatcatccgctacgataacctgggcattgctcgtctgatctaccagctgcctaccaccgtgtgcgagatgttcctgcgcgaggtgttcaagcagggcagcattgaaagtctggatcaggagaccctgttcaccatccagcgcttctttgagaacaacctgaatgtgtccgagaccagccgcggcctgtttgtgcaccgcaacacgctggtgtatcgtctggaaaagatcaaaaagctgaccggtctggatctgcgtgagttcgacgacgctatcgtctttaaggtagcgctgatggtaaagaagtacctgtccaacaacccggccaaatactgatattccgctgtgcgggttttgccccgccggcgccgaaccggccgctcgaaaccgatgctggccggttctttttgcagtacgggctgcggacgggctgtcttgaccgtcaaaaatcttgatgtcaggagctaatacgattccatgatcgattttgaacacgtttccaaagaatataaaaagggtggccgccttgcactggaggatatcaacttccatgtggatgaaggcgagttcgtctttctgctgggtcactccggcgcaggcaaatccaccctgctcaagctgattttgcgggaggcgctgcctacctccggcaaggtgaccgtactgggcaaggacgtagccaagctgcgccgccacaagatcccttacctgcgccgtcagatgggcatcatctttcaggacttccggctgatccccagcatgaccgtgtacgagaacgtggcctttgccatgcatgtgctcaatgtgccccgcaaggagatccgtccccgcgtggagtacattctggagctggtgcatctggaggataaggccaagtgctacccggataccctttccggcggcgagcagcagcgtgtggctgtggcgcgtgcgctggtgcataaccccaagctggtcatcgcggacgagcccaccggcaacattgacccggagctgagcctggaaatgatgcagctgctggagcgggtgagcaaaatgggaatcacggtgctggtggttacccacgagcacgagctggtgcaccgcttccatcagcgtgtggttaccctgagccatggccgcatcgtctcggacgtgcccgcagaccccgtggccgccgccgaggacgatctttcgttggatgttgccgcctttgatgcggacgatgcgtccgctgccaaaaaggaggtggctgccgtatgatgcgaccctctactttctttttccttacccggcgtggtgtgcgcaacttgggcaagcactgggctatgaccattgcctgtatcgcttctttgagtgtttgtatgactttgaacatctttgccagcttggccgaggtgaatgtgggcagcatggtgtcctatctgggaagccagaacgagacagtggtctatctggaccccgaatgtgatgatgccaccgccgcgcaggtaggtgagaccctttcggctatgccgggggtcagcggggtgcagtacgtttccaagcaggacgtgctcgacacctaccgcggttatatgcaggattattcctccctgtgggatgaatttgagaccgacaacccctttaaggccaactaccgagtcaccctgagcgacctgacccagatggagcgcatgagcgtgaagatgcaggccatcccgggcgttgtcagcgttactgccccggtggagatgaccaatgtctttgtggagatccagaaggcagtcaccaagggtggtcgcatgatcgtgatggtgctgatggtggtcagcatcatcacggtgggcagcaccatccgtctgagcgtttttgcgcgccgccgcgagatcgagatcatgaagtatgtgggtgctaccaaccgcatggtcaccctgcctttctttgtggagggcctgaccatgggcctgatctccggcatcctgaccgcagcggtcagccttggctgttacagttatgtggtcaacgccgctggcggcttgggcggcatctggcagatgctcatgggccgtgcactggtgccggtggcaaacgtgctgccgaccatcgtggtaacaagcctgctcagcggcgctatcgtaggcggcgtgggcagtatgttctctatccgcaagcatttgaatgtgtgaccgaaaggagccgcgttttatgagtaaagcaatgcacgcaaagcccttccggctcacaggcccttatactggtcgacacgcccggccggaaagcccccgcagcaagctgatccgtgcggtcagccttgggctggcctgtgtctgcctgctgctgacagccacggtgtacccggcctcggcggctaccagcaataccagcatggccagcttgcagagcaagctggataagctttcccagtctatcaatcagcataaaaaggagctttcggacgccaaaaagaaggagtctgccgccaaggcgctggaaagcgagctgaaggaacgggtcaccgtcctgcaggatcagatcagcgtgctgggcggtcagatcgccgcagtgcagaacagcatcggcgagaaggaacagcagatcggcgtgatgcagacccagatcacggacaagcagacccagatcgagcaaaagcagaacgagatcgatgaccagtgggacgattttaaaaaacacatggctgccatgcaggagctgcgggacggcggcagtgtggccatgctcggtgcggtgaatgacctgtatgagctgcttaccttcaatgaggtgatgcaggatatctctatcaaggacaccgagatcatgaacaacatgaagtccgccaagcaggggctggaggacgataaggccgcgctggaagagcagaaggctggtctggaagccgaaaaggcagagctgcaaagccagaagagtgaactggacagccagaacgcccagatgaagggcaagcagagcgagctgaacaacagcatctctgcggcaaaactttccgctgccgaggcacaggcagcgcagcagaaggcgcaggcggccatcgaatccgacgagttgaactatgaggccgtgaaaaaggagatccagaagctgatcgcagcagcctctgccagcaagccgcagctgagctttagcggttttgcctgcccgctgaagagctacagccgcatctccagcgagtacggctggcgtaagaaccctgtctctggcgtaaacaagctccatgccggtaccgactttgcggcggccggcggcacgcctatctacgcagccgccagcggctatgtgcaggtggctggctggtctaccggcggctatggcaactacgttatcatctaccacggcaaaatgtccgatggcaatacctataccaccctgtatgcgcacatgcgctcggtggctaccagtgcgggcaagtatgtgaagcagggcgaactgatcggttatgtgggcaccaccggcaattccaccggaaaccacctgcatctggaggtgtggaagggcggttccaaggccaacgctgtgaaccctcggagctgcatccccatcccccacaactaataagcaaggcaaggagtctggttgatctatgaacgaacaaaaacgcaagcgcgcgctgcgcatcggctgtctggttctggcaggggtgtttgtactctcgctgctgggcagcatctttatgatgttgccgctctgaccgggaggaaaaaaccatgaaccgtaaaatttctttgggtatggcagtcaccattgtgatccttgccatgaccgtgaccttttccatcacgatgctcatcgccatgcgtctgttcgacagcacggtcaacagcgtaaaagaaaaggaaagtatgtacaacaagatcgctgaggtggaccgctacgtccgcagcaacgattactataccattgatgaggccaccctgtacgaccgcctgaccgccggttatctgctgggcacgggcgacaagtacgcccgctactacactgccaacgcctacaccgagctgatgaacatccagagcggtaagatcctgggcatcggcgtggagcttggcatcgaccagaccggttacgccaaggtgactcgtgtctacgatggctctcccgcacaggaagcaggcatcgccgtgggggactacatcaccaccgtgggcgataccgatgtcaagagcctgtccggtgcagacgccgtgtacaaagccttgcagggcgaggcgggcactaccgttaccgtgacatggctggacagtgctgcggccagtaaaaccgctgagctgacccactccggctacaccagcaccaccgtggactaccagctgctggacaatgtgggctatatccgcattcgtcagttcgacggcactacgcccagcgagctggactacgccctgcgcaccctgaccgccagcggcgcagccagtctggtattcgacctgcgggacaatggcggcggcattctggaagatgccatcaactgcatcgacctgatcgctccggagggcacggtggcctacgccgaggataaaaacggcaaccgcaccgtcatcggcagcagtgatgccgaaagctccgtcagcctgccgatggtctgtctggtcaacggcaacaccgccagcgcagccgagctgttcgcagccaccctgcgcaccatgaacggtgctcgtctggtgggcaccaccaccatgggcaagggcaccatccagagcagcccgcagcgcctgtcggacggcagtgccgtggtcatcacggtggcaaagctggtctgcggcgacggcagctgctttgatggcaccggcctgacggtggatgtggagcgtgccctgagcgcagaggaagcaacgaacttctacgactacaccccccagaccgatccgcaggtgcagcgcgctgtcagcgctgcccagcagctgagcggcactactacgctggcaggcgcaagctctgccgccgcagcggacagcaccgccgcctctgccgcagcagacgataccgcccccgcagagactgcggagggagaacccgccgagggtgagactgccgcgtctgagccggaaacggctgcgagcgcagcggagtgaaccccacgatcctgaaccataaacaccaaaaaggctgctgcgttctgcaacagcctttttctgagaaaggaattgaccctatgccggaactgaccgacctttctgtgatccgtgccctgtgcgaaaaatacgattttgcactttctaagggctttgggcagaactttatcatcaacccgggcatccccaccaagatcgtggatgccagcggggtagacaagcgctacggtgtcatcgagatcggccccggcatcggcgtgctgaccaaggaactggccaagcgcgccgccaaggtggtgtccatcgaggtggacgagcgcctgccgcccctgctggccgagaccatggccggtgtggacaacttcaagctggtgctgcaggatgtgctgaaggtggacctgaaagccctcattgccgaggagttcccggggatgccggtggcagtgtgcgcaaacctgccctactacatcaccagccccatcgtgatgaagctgctgggcgaccgcctgcccatcgagagcctgaccgttatggtacagaaggaagccgccgaccgtctggccgctgtgcccggcacccgcgcttccagcgccatcagctgcgcggtgaactactacgccacctccaagctgatgttcaccgccgcaccgggcagcttttatcccgcccccaaggtaaccagcgctgtggtgcgcatggacatccgtcccacccccgctgtgcaggtggaggacgaggcgggctactttgcactggtgcgcgccgcctttggccagcgccgcaagactgctgccaatgccattgcaggcgggctgaatatgccaaaggaaaaggtcattgccgccatcgaggccgcaggctttgatgcccgcatccgcccggaggcactgacgctggaggactttgcaaagatccagcgggcactgggctgagcaaaaagcagtatggtcggtgggtaatagcccactgaaaaaagatcgcaaaaaacccggaaccttttcggagccgcaagggctcacaaaaaggttccggttttctgttttttaatgattatgcggcagcattcgccttactcagaaggggaagatggtgccgttctccttcacggtgcaggcgttcagggtgaccttaccgtgaatgtctgcaccgtctgcaagggtgttaacgtttgctgcggaggaggtgccgaaggccttgaactgccagccgtttgcagaggcgctgtcctctgctgcccaaactgcggcagacaacgacggactgactgcggcattgccaagaagggtattattttgtgaaatgccgggacgaatgcgcaggtgtacggacttttttgcgcccttgcgcaccgggcaaaaaagaaatttcttttcatagtcctgcggtgggtaggacgaaactttgtcaaatgcgtggaatattacagaaaaatttgtgaaaggcgaccaatgaatatcccctaaacgtgttgatattgagaaaaaagacggaggattgtttacaaaagaatgacaggctggtatactttatagcggtagatccctatgagatccgcaaagaaacaagaaaggaaataccgaaccgtgaataccgccgcaccgcacgccctgaaaaaacgattgctgaccttggcactgagccttgctttcctgcttacctgtctgcccgctgcactggctgtggacctgaatgtggacgcaggcttctacttcaagcagagccggggcggcacctgtacgctggcctccgcagccatgatgctgcgccgccgtgcctactttgacgggctgagtgactggacgaacgtgactgagaacagtgtgcgctccacagcatgggccaacggccttgcgcacagttttacatataaggagatgcaggtgggctacgccaccctgccttccgggctgcaaagcaaaacggcggtgctgatctccctgctggagcagcacccggagggcatcgtcctctacgaccgcacccagccccatgcggtgctgctgactgactacaccaacggtattttctattgctccgacccggcggggaacatcggctacggccgcatccccattaccagctccagcgtgtccattgcaagagcgtcctgttactggtacgtcactgcagatcacaacagcgtggcggcacaggccgatggtctgcggctggagggcgtgcgctacccggtgaatatccgcaccggcagcggcatgacgctgaccggtacggctaacagcgctactggaactactttgaccagtgtacaggtggccattctggatgcggcagatcagaccgtgcagagtgcggcggcgcaggcaaacgccgccgctttctctctgaacacgctggacagtcagatccgcttcggggagttgccggagggcagctacagctatatggtgctggtgaccgactctacgggcgagagcctgtgctttgcctcggacttcacggtgtccggcagcgcaagcagcacccagacctactggtcggtcaaggatgccgagggcaccaagctgcagcagacggtccagcagatggagaccacggtagaaactgctgctgagaccaccgtaagctggtttgcaaagctgttcgactgataaaaagaaataattcagggctgctgcacattgctttgtgcagcagccctatttgtgtaatttagaatttttctgcaaaaaagtagttcagaaccgcccgcaggcggttctgaaccacaaaatttaaaatgatttttccgcggctattacctccgcagttctgtgccggggtaatagtgcgccagaatggcgcggtagtctgcgccctgctctgccagtgcctttgcaccccactggctcatgcctacgccgtggccgtagccctttgtggtaaaggagaaggtgccgctctggcagaccaccgtaaagcaggcgctgcgcagccccagcgctttgcgcagggcggtaccctgcaccgtctgcccgcagaccggcaggctgtccacatagccggagggagtgagcaccggcgtgccaaaccactgcgcctgctgcgaaaggtcggcggcaatgcccagacgctcagccagcagctgctgtaattgggcggcagaaaggttcagggtgtattcgtagttgtcggcggcggtgtcggtgctgctgtccaccggcacaagatagggcagggcggtgccccacaccttctcgctggcttcggtgcggccgttggacatggcaaagtagcttgtcccggcgggggcatcctcgtaatatagcacctgcgtctgtactgcatccaccagtgcggaaagccgggcgtagttggccgcgtatgcggtgccccagtaactgtgcaatactgcatcggtcaggcaaccttgccgccggacagggtctgcggtgaaccatgcgccgttttcctcggtgctgtgatcccggcggtagagggcatagctgtgcgctgccactgcctgcgccttcagtgcttcgtccggccagctgaccggcatctcggcggcaactgccccaatcaggtattcccgcagcggcagcgttaccgtctgcccggtgctctgatccgtaaagcaaacggtatcggctgtgtcagcaggggagggagccactctgctgctttcttctgaggtgacagaggccgcctctgctgcggacggcgcagtgccctgcacaacaagtgccatacaggcaagacggtaggcagcacacggcaacgcgcagcccagcaccagcagaacggtgcacagcagcaaaaaggaacgtttcatactagacctcctcccggaacgcaagctttgggtacatcatacgcccggcagcgtgcaaaccggcaggaaatacgcagggaaaccccggtatttttgcgctttgcggtgagaagtgtacacttagcgcttgaatttacttcataaaagcgatattataaaagtatgtccatcagagcgtaggatggactggatcggaaagtataagaagtaagagacggaaaggagcactcctatgaactttgcacacgcagaagtggcaacgctggacccgacgaccatgcgtaccctgtgcgaggagtacatcgcaaacaactacatcgacccggagaccagcgagcggctgggggtcaagcgcggcctgcgcaacccggatggcaccggcgtgctggccggcctgaccaacgtctgtgacgttgtgggctacaaaaaggatcaggagggtcatgtgatccccacccccggcaagctgatctaccggggcgtcaacatcaacgagatcgtggacgaggcttaccgcaacgaccgcttcgtgtttgaggaagtgatctggctgctgttgttcggcagcctgcccacccgggagcagctggacgatttctgtgagatcctagcagaatcccgcgccctgccggacggttttatggacaccatgaacgccccctcgcccaatattatgaacaagttgcagcgctgcgtgctgggcctgtactcctacgacgaccgcgccgaggatctgagccttgagaacatcctgaaccagagcatcaacctgatcgccagtatgcccaccatgatggtgaacgcttaccagatgaagcgccgctactacgataaacagagcatgttcttccacctgcccaagcccggtcagagcacggcagaacacatcctcagcacctaccgcccggatcagaagttcacccacgaggaggcaaagctgctggatatgtgcctgctggtccacgcagaccacggcggcggcaactgctccacctttaccacccgcgtgctgtcctcctccggtacggacacctactcggccatctctgcggccatcggtgccctgaaaggccccaagcacggcggtgcgaacctgatggtcaaccgtcagctgcaggatatcctcaagcacgtcgagaacccggacgatgacgatgaggtgcgcgagtatctgcgccgcatcctgcgcaagcaggcgggcgacggctccggcctgatctacggcatgggtcatgcggtttacaccatcagcgatccccgtgaggtcatcctgaagcagcgcgcaaagcatctggcctacgaaaagggctttgaggaagagtacaatatgctgtgcagcatcgagcgactggcacccggcatctttgctgaggaaaagggcagctccaagccggtgtgcgccaacgtggacctgttcagcggcctgatctacaatatgctgggaatctcggaggatctgtacaccccgctgttcgccatcgcccgtgtgccgggctggtgcgcacaccgggtggaagaggtgatctttgccaaccggatcatccgcccggcttacaagtatctgggcgtgcgccagaaatataagcccatcgaggagcgttaatggaaccgttagagttaattattgtcctgctctgcgtactgcttggccttggccgcggcgcagaccttgcctttgccaccgacgctgccaccggtctgtgtaccgcaggtgcggtgtggtggcggtatctcgccttgggcgctgtggtgctggccgcagtgctggccgggcgcagccgcccgctgcccccggagccgctgcgcagccgccgcccggcggcaggcgtgctggcctttgccggggcagtgtgtatgctggctgccggtgcagcacagtttgtgctggccgccggtacggtaagcacctttgtgcgcattctgctggaggtggcctgtgccgtgtggctgagcaaccttggccgcagctggctgcgcggagacggctggaaaacgcccgccggtggtctgccgctggccatagctggcagtgcgctgttctactggaacgtgctgatgcgctttatggagaatagttccagctggcacagggtacagcccacggcagcggtctggcaggagatggcggcgttgctgcttctggcggcgctggcgcgcacgctgtatctgccccggccggaaaatggccgtagcctgcacgcagcggcgcttgcagccttttgtctgtgcctgtgctgggagctgccccgggtgctcctgctgttggcagcaggctttggcggcggcatggcggcagtgctgccggagctgctttccggccttgcactgtgctgcatcggcggcatggggcttgcctgtgccggaaaggaaaaagctggaaataactgaccaaaacggcttgatacccttggtgcaattgaacaaaagctttgttgcggggtgcataaaatcatacaaaagccaaaaaagataaaattgtgttgttaattttttagcagatacttgaaagtttgccggttttggtctacaataaagataccgtgatttatccgattatgggtaaaataattaggaggtactattacaatggctgttagagttgctatcaatggtttcggtcgtattggccgtctggctttccgtcagatgtttgatgctgagggttacgaggtcgtcgcaatcaacgacctgaccagccccaagatgctggctcacctgctgaagtacgatactgctcagggctctttctgcggcaagatcggcgagggcaagcacactgtcgagtccaccgaggattccatcattgttgacggcaaggagatcaagatctacgctgttaaggacgcaaaggatgctccttggggcgagctgaacgttgacgtcgttctggagtgcaccggcttctacaccagcaaggagaagagcatggctcacatccaggctggcgcaaagaaggtcgttatctctgctcccgcaggcaacgatctgaagaccatcgtctactccgtcaacgagaagaccctgaccgctgaggatcaggtcatctccgctgcttcctgcaccaccaactgcctggctcccatggctaacaccctgaacaagacctatcccatcgtttccggtatcatgaccaccgttcatgcttacaccggcgaccagatgattctggatggtcctcagcgcaagggcgatctgcgccgtgctcgtgctggcgcacagaacatcgtccccaacaccaccggtgctgctaaggccatcggtctggtcatccctgagctgaacggcaagctgatcggctctgctcagcgtgtgcctgttcccaccggctccaccaccattctggttgctgtcgtcaagggcaaggacgtcaccaaggagtccatcaacgctgctatgaaggctgctgcttctgagtccttcggctacaacgaggatcagatcgtttcttccgacgttatcggcatgcgttacggctctctgttcgacgctacccagaccatggtcgctaagatcgacgacgacacctatcaggttcaggtcgtgtcctggtacgacaacgagaactcctacacctctcagatggtccgtaccattaagtacttcgctgagaactgctaatcacgttcttacgctcaaaggtgcttgaggtgtcgtgctgagtaacagctggtaccggctttgctggtacgaacatgcggtgattggtacgacaataggaacttgagttctgcacccttccttttgcgggtctccgtgagaggaagggtgttttttatcttctagcagggggaaaatcccaagaaaggatgatttactccaagaaatgtgctataatgaactcacagtgccccggagccgatgcactatgcggatgacaatgctgttttgcgggtagcatcatgcaataggggaaagcatatatacttatacactaatgaaagttcacttttgggaacgaggtaagcaagaatgggaaagtattttgggaccgatggcttccgtggtgaagctggtattgatctgactgccgaccatgcctacaaggttggtcgctttttgggctggtattacaatatgctccgcgagcgcaatggcaacaacgagcctgcacgcattgtaatcggcaaggacacccgccgcagctcctatatgttcgagtacagtctggtcgcaggcctgactgcttccggcgcggacgcctacctgctgcacgtcactactacgcccagtgtggcttacatcgctcgcgtggatgactttgattgcggcatcatgatctctgccagccacaacccgtactatgataacggtatcaagctgatcgattgctacggtgagaagatgcccgaggagaccctgctgctggtggaggactacatcgacggcaagctccacgtgttcgacaaggattggccggaactgccctttgcacaccgggagcacatcggctgcacggtggactatgtggcaggccgtaaccgctacatgggctacctgatctctctgggtatctactccttcaagggcattaaggtcggtctggactgcgccaacggtgcaagctggaatatcgctaagtctgtttttgatgctctgggtgcggatacctatgtcatcaacaacaagcccaacggtctgaatatcaacaacaacgctggctctactcacatcgagggcttgcagaagttcgtggtggaaaacggtctggacgttggctttgcctttgatggcgatgctgaccgctgcctgtgtgtggacgagaagggcaatgtcatcaccggcgaccacatcctgtacatctacggctgctacatgaaggagcacggcgagctgatgaacaacaccgtggtcaccacggtcatgtccaactttggtctgtacaaggcttttgacgagcagggcatcggctacgcaaagaccgccgtaggtgacaagtacgtttacgagtacatggctaagaacggctgccgtattggcggtgagcagagcggtcatattatcttcagcaagtacgccagcaccggcgatggtatcctgaccagcctgaagatgatggaggtcatgctggccaaaaaactgcccatgagcaagctggctgagccgctgaaaatctacccgcaggtactggagaatgtccgcgtcaccgataaaaaggctgcacagaacgacccggcagtgcaggaggccgtcaaggcagtggcagaagcgctgggcgataccggccgtattctggtgcgtgagtccggcactgagccccttgtccgcgtgatggtggaggctcccgaccacgacacctgccagaaatatgtctctcaggtcgtggaggtcatcaagagcaagggttacgccgtctgaggctgagcgctgcggcggatgttgcccgcgcaccaaaatgcgggcagcagacgcactgcacagcgcgattctgcatctttttgttgacaaatccgcattttttgcgtatgatagaagcaacactgaaaattgtgtcaaattggctgtgaagagaagagtacgcaccgtctgcgcctgacagaaagcccgaaggatggaaccgggcaggccgcgcggtgccgaagatggtcttggagccgcgcaggtgaacaatgagcctgcgacggggtgcgcccgttaccgcgtaaaggccggtttttgccggctaaaggctgcgtccgcaagggcgcagcgaagcaaggtggtaccacgaaggttcagcgctctcgtccttgtccggttatacccggcagggcgggagcgctttttgcttgcaggagaagctgcagaaccaaaagaaaggaagatagaaccccatgagcgaacacaagacattttatatcaccacccccatctattaccccagcgataagctgcacatcggccacagctacaccaccgtggcctgcgatgcgctggcccgtttcaagcggatgcagggctacgacgtcatgttcctgaccggcaccgatgagcacggccagaagattcaggataaggctgccgatgccggcgtcacccccaaagagtatgtggacaagatcgtggccaccgtcaaggatctgtggaagctgctggacgtcagctacgaccgctttatccgcaccaccgatgattaccacatggaaagctgccagaagatcttcaccaagctgtacgagcagggcgatatctataagggtgagtacatcggccactactgcaagccctgcgagagcttctggacggacagccagctggtggacggcaagtgcccagactgcggccgcgaggtctacgatgcccacgaggaggcctacttcttcaagaccagcaagtacgctgaccgcctgctgaagctctacgaggagaacccccagttcatccagcccgagagccgcaagaacgagatgatcgccttcatcaagcagggcctgcaggacacctgcgtgtcccgcacctcggtcaagtggggcattcccgtgcccttcgaccccaagcacaccatgtatgtgtgggtggacgccctgagcaactatatctccgcactgggctacggcaacgacacctaccacgattacgataagttctggccggccgacctgcacatggtgggcaaggaaatcctgcgtttccacaccatcctgtggcctgccatgctgatggcactggatctgccgctgcctaagcgggtgttcggccacggctggctgctgatgaacggtggcaagatgtccaagtctgtgggcaacgtggtagaccccgttatcctgtgcgaccgctacggcgtggacgccatccgctacttcctgctgcgcgagattcccttcggcaacgacggtatgttcaccaacgaggcactgatcaaccgcatcaacagtgatctggccaacgacttgggcaacctgctcagccgcaccgtggcgatgtgcgaaaagtacttcggcggcaccgtgcataatgtggccggtaccgaggccatcgacaccgagctggagaccatggtcaacgagctgaccgccaaggtcaccgccgacatggacgatctgactatcccgcaggcgctgatggagatctttgcggtgatccagcgcgccaacaagtatatcgacgagaccgcaccttgggcactggccaaggacgaggccaacaagcagcgtctggaaagcgtgctgtaccacctgtgcgaggcactgcgcgtgtgcggcatcctgctgaacgcctacctgcccaccactgcacccaagatgatggagcagctgggtctggacgcttccgcactggatctgaccaagaccacctacggtgcacagcagacctataccgtgcacaagggcgaggcactgttcccccgcattgacgtggccaaggagatcgcccacctgaaggaagaggacgagaagcgcaaggctgctgccgctgctgccaacaaagccaaggaggaagccgagaagaaggctgccgctcccgcagaggaaagcaccgtggacttcacccatgaggaagagatcgactttgacaccttctgcaaggtggagctgcgcgtggccgaggtgcgcgcctgcgagaacctgaaggagagcaagaagctgctgcacctcaccgtctttgacggcgagcgggagcgctgcatcctgtccggcattgccaagtggttcaagccggaggatctcattggcaaaaagctgggcattgtgtgcaatctggcaccccgtcccatgctcaagggcaagtacgtcagcgagggcatgatcttcgctgccgacaccgccgacggcggctgctccattgcattctacggcgacgatacccccgtgggcagccgtatccattaagtgaggagcatcatgtctgataatacagccgttcgtgcggcaaagctggataagatcttcggcacgccggtgtgcgccgtgctgctggctattttctgtaatgtcctgtggggctcggcctttccgttcatcaagctgggctaccgcctgttctccatcgactccggcaacaccgcctccatcttctgttttgcaggagtacggttcatgctgggcagcgtgctggtgctgctgggcagcattctgctgcagggaaaggcacctcgcctgccccggggcagggtagcagccgagtgctgcgcgctgggcttgtggcagaccacggcacagtatgcgttctactatatcgccgtggccatgctcaccggcgcgtttggcggcatcctgaacagcacccagagctttctgggcgtcatctttgcccactttatctacggcaatgcggaccgcatgaccccggcaaaaacgctgggctgtgctgtgggttttgccggagtgcttatcggtacgattggcaaccacggcagcggcagtggttggggcgtgttctgtatgatggcggcgaccatcatcttcaccctgtccggcccgtggaacaagtcggtcaccaaaaaggccgacagctttgctgtctgcttcctgaacctgtttgtgggtgggctggcactgtttgtgctgggcactgtcatgggcggccgtctccatgtgcaaagcgcactggctgcggtggtcatgctgtatctggcctttatctgcggcgcaggctatattttgtgggcgctgctgatgaaaaacaacccggtcagccgcatcgccatctttggcttcgtcaacccggtggtcaatgtgctgctcagcgccgtgctcaacggcgagccgctgttccgctggcagtatctggcggcgctggtgttcgtgtgcgtgggcatctggctggtgaacaaagcccctgcccaaaaggagaaggtatgaccggacctatttttgacacccacgcccattacagtgcccgcgcctttgatgccgaccgcattgcactgctggacagcctgcccgacaagggcgtggtaggcgtgtgcgagcaggccacccactccggggatgcgccccgggtgctggagctggcgcaccgctacccatgggtggtggcggccattggcatccacccggaaagcctgctgcccgctgccgactgcggcgaggaaggccctgcgcccacggtgtcggtgtacggcggcgactgggccgccgagatgcgggcgctgatgccctactacaacgaccccaaagtggtggcggtaggggagtgcgggctggactatcactggcccgtgcccaaggacgcccagctggcgctgtttgaagccgagatccggctggcgttggagttggacaagcccatcatcgtgcacgaccggcaggcacacgcagacgtttacgccctgcttaaaaagtaccgccccaagggcattgtgcactgctattccggcagcgccgaggatgccgtgcagctggcggcacaggggttgtacatcggctttggcggtgcctgcaccttcaacggtgccaagcgcgcagccaaggctattgacgccctgccgctggacgctatcgtgctggagaccgactgcccctacatggcaccggagccggtgcgcggcacccgctgcgacagctccctcatccgctatgtgggtgcatacatcgcccagcgcaaggcactggagtcggaagaggtgttccgcgccaccgccgcaaacgcccgccgggtgttcgggctgtaaccgtttttccgcaggtcgcggggcaaagcgctccgcttctgaataaaaagctgatttattgaaaacgataagaataaggagatcactattatgaaggcacgtattcccaaacaccgcgagttcatcatcaacttccccgacagcatcgaccagaacaaggccaacgagggctgggcaaagctgcagcagatcgtggaggactacaagaaggcccacaacggcgcttctgtttacgctcccaccttcatcgaggactgcgagcccgaggtcaagaagctgcaggaagagtacggctttgagtacaccgtggagttcgttcagtaagttcagcatcgcctgatagtaaaagggtcattgcacaaaccgtgcaatgaccctttttgcgtaagtttattccataaaatggcatcccggagtgtccgcagacgctccgggatgtcgaaattataaaatctctattccgctgaaaaagtccagagcatacgcggagggcagcttgaatcatcctcctgccttgctgccttacacctcgtagtccagacagacgcggtttttgtagtaggggcgcaccttgctgtttgccactgccacatgcgccgggtgggtggagtagcccttgagcgcctcgacgctctcaaaggtggtatccagcatcaggtcggcgttagaggaggggagcgcatcaatgttgacatggatgtccacaagccccggaatcttgccggaaaggctttccagaccctccttgatgccagccttgacggcggatttttcctcggcggacagttcgtccttcaactgccagagaataacgtgcttgaccataacaaaaaacctcctgcgttttttctcattgtaacagggtgagaaagaatccgcaagagggaagctgtaaagtcttatttgggtgcgaacagcagcaccactagaagcacggcgcagagtaccgaaactacgatgccctccagccgtgtcagccggatgtactcctccgtaggttcgggcacctgcgtataccgcccacgggaacgcaaggcaatgacgttctccggctgcagcgccataaaaataccgaacccgatgccaaaaagcgcgactaaaattgcgcagatgacttccatagaaacctcctcactttttgtttttgtcgtccctgctcagggtatagcacagatgcgagatcagcagagcaacgcagaacacgagcgtcacgaccattaaaatggagtgcagcggctctactctaggtagaaaaatgttgaccagccagagtgcaccgcaaaggagcgacaggatgccgaagggtctgtggaagtggttcttttcgtcctcattgctccaaccggtgccggtgccattgtacaagtcccggatgccgcggtataaaaatagcacgcccagtgcagcgttcagccagtctgaagtggaaaggttcaggttcatatatttgtacttgcctcccggcggctcaatccgcgctgtgctcccagatctcgtacaaaatcaggtagatggcatcaacaacgagggcgatggtgcgtaccccgttgctcagggtagggaaaccgcccagaaactgcgaagaagcaagaaccattgcgttgaagatctcccacacgccgtttttcttctgccacatggcgcggtattccgggtcgctgtcatattgattgaaaaaggtgtggatcagcgggtctttgccttgcaggtcgcgaatgcccatccacagcgccacaaggcagaacaagagttcaataatgttgtaccagccaaacgccagctgcataaaatacacctcccatcttttaccatattataacataggagagcgaaaacacaaggacggtattcaaccttcctgcgtaaattttgcataaattgcgcatcaactatttgttgaaacaacataaaacaaaaccagccggacgaggcggttgcaagccctcatccggctggatacttacttcttcggagtcataagcctcttctccttggtgacctcattttcggaatacgggtttcatagggtgactctccttagaaacgtttcttcagaatttaggtactttgcaaggggatgaaaatcaactgtacattggactgacccttttctcaactgttggactgcggcaaacggttcatgaggatgaatttcatattaccacattctttcgagttagatttgcaagggaaacgtcttacttagtacattggtagaactccttttcagctattcaaataaggttctccggatcattgatactttcataagaatcatctccagcggatctatctgaacgctctggggaagaattgaatcgacaggttgtcgtgttatcgcatttttgatgctcaagactggctctgtttttgtgtttttatacgggggaaacatcccgtttgtggtgagcctctattttgcttctcagcgaaccccgacagcctgtccctgctgtgcgggttccatatcaaccatcggtcttcgctcctttcttcttaaagtcagcgggagtaactctcttttgagcttctgctgtacttctctggtttctggcttaattatacaggaagaagcacgatttgtctattggcagaccgcacaaagaataaattttgtttttgtgcaatgttaaaatctgcggcggtgcggaaaaattgcccagaagttccgggtcgttcgtgaaggattttccacaaaaggggagaaagtgcccgcaagctattatgcgccggctttatttgtgctaaaatagcgccaatgaatggtagtcgccgtcgccccgcgagatgaaagtttcgcggggcggcttttttgcggcgaaaatttgcataaaaaagaaacggagaatcaatcaaaatgcctaaaactttaccggaacgcatcttctttaccattgtcatggccgctatcatggtctatggcatgatcgtctacaatgtggcgctgaatacaaacggcgtgaccaatgctacttttgttatggctctgcacgaaatgccgatcatggtgccggtggcctttgtgctggaattttttgtggtggaaaagctggccacgaagctggcattcctgtttatgcgccccgcagaccgcccgcagttcatcacctacgcaatctcgctgatgatcgtgtgcatcatgtgcccggtgatgagtctggtcgcaacgctgctgttcaaagagccgagctttgggatgtgggtacatacttggggctgcaatatgcccatggcgctgtgctggcagatgttgtactgcggcccgcttgcccgtgccatcttccggctggtgttccgccgtggggaaaagcaggccgcataagcggtttgcctgcgattctataataaatatgtataaagaatatacataagatgccgcaaaaacataccgggaaagatacctatacgttttttatatacctgatatataaaagctatacggtacggctatttttgcggaaatatttcccaaaaccgggagaatacgtctgcaaagcactggaaagatccaagaaagttgtacagattatatgcttttttaacttgcaattgtgcaccctgtacaacagttttgttttgtcggtgcaatgctaccgggtaaaatgtagaatgtgcacaaatacccttgccaattttgtgcaatcgtactattatacacaacgaaaaaagacgaaaccgacaaagaaaggggagggcgcagaaagcattcaggcagcgccttccttgcttttttcacggtgcacagtcttttcttcacgcgataagaaggtgtgaaggggcgcggagcaaaagtgtgcggcagatcctcggccggggatctgccgcacacccggctcccgcccgcagacccctatccctgcaggaaggaggaaaagcaaatgaacaaattgacgcaggctctgatggaagagctcaccgtggagtatgtcaaggtcggctcgctgcagatcccggaatcggtggtcatcagctgggtgatcatgctgctgctggtggtgggctccatcctgcttacccgtaacctgaaggtagatcacatcagcaagcgtcaggcagcactggaagcgctgtactcccttggcaaaaacttctttgaagggttgctgggcaaggagggcagccgctatgtgccctacctgatgaccgtggcgctgtacattgcctgctccaacgtgatcggtgtgttcggcgtaaagccccccacaaaggatctggatgtgaccgctgcgctggcactgatgagcatcgtgcttatcgagtatgcaggcgttcgcgcccggggcggcgcgggctttcttaagagccttgcagcccctacccccatcatgacccccatgaacatcctcgagatcgccattcgccccaccagtctgtgtatgcgactgttcggcaacgtgctgggcgcgttcgttatcatggaactgctcaagctggtggtgccggtgttcgtcccggcggtgttcagcctgtattttgacctgttcgatggtctgatccagacctatgttttcgtgttcctgaccgcactgttcatgaaagagagcatcggcggcgaggaataaacaacacatttaaaactgtaattacaaaggagatagaactatgagtggtttggtagctctgggcgctggcattgcagcgctgaccggtattggcggcggtattggcattggtattgcaacgggtaaggcaacggaggccatctcccgccagccggaggcttccggtaagatccagacgaacctgctgctgggcgctgctctggcagaaggtaccgcaattttcggcttcgtcgttgcactgctgatcatcctgttcctgggccagtaacggaggcgtggacgaatgctgaagttggatttgaacctgctgtggaccgtggtggatgtcctgatcctgtatgtgttgctgcgcaagtttttgttcaagcccatccagaacgtgctggatcagcgccagaagacgatcgaggcagacattgcagcggcacagacctccaagaccgaggccgccgcagcacttacgaccgcgcaggacaagctgcgtaatgtggacaacgaagccgcagcccgccgcgaagcctacgagaagcaggccgaggtggagaagcagcagctgctggccgatgcgcagaagcaggccgatgagatcgtggctgccggtaaggctgctgtggagatcgagcgccagaacaagctgcgggaagcagatgcacaggctacggcactggcacgctccatgtgcgaaaagcttttgaaacataatttgaccgcccaggatgatgatcagctgctggacgatctgctgcagaaagcaggtgcaggcaatggcaactgaattcagtcgtgaattttttgcggataaccgcatcgtcaaggccagcctgcgctgcgcccataaactccgcgaaaaagatctggaccgcatcaagtcggagatcaaaaagctgtatgacgccacggaagtcatcctgaatatcaccgtggacgagagcctgctttccggctatgtcctgcaggtgggcgaccgcgtgttcgacaattccggccgtcatcagctggataaaatgatggagggcaagccttcgctggctaccctcaagacccgcatcgaggactacaagcccgccgagacctctgcggagggtggtgtggtcatctcctccgccgatggcatcgtgcacattgacggcatgaaccgtgctgtgtacggcgagatcgtcacctttgaaaacggtgccaagggcatggtggaaagcgtagagcccgagcagctgggcgttatgctgttcgatggtgccgagaccgttggtgtgggcaccatggtcacccgcagcggcaagcgcgccggtatcccggtgggtgatgcttttctgggtcgtgttatcagcccgctgggcgagccaattgacggtaaaggccccattgaggctgagggctacaaccccattgagaagcaggcacccagtattctggagcgccagagcgtggacaccccgctgcacaccggtattctggccatcgactccatgttccccatcggccgcggtcagcgtgagctgatcatcggcgaccgccagaccggtaagacttccattgccaccgacgccatcctgaaccagaaggacaaggatgtgctgtgcatctatgtcgccatcggtcagaaggcttcctccatcgcccgcgtggctgaggatctgaaaaagcacggcgctatgagctataccaccatcgtggtagctaccgcgtcggattctgccccgctgcagtacattgccccctatgcgggcactgcactggccgagtacttcatggccaagggcaagagcgtgctcatcgtttacgatgatctgtccaagcacgcggtggcctaccgtgccatctcgctgctgctgcgccgctctccgggccgtgaagcctaccccggcgatgtgttctacctgcactcccgtctgctggagcgctcctgccgtatgcgggatgatctgggcggcggctctatcaccgcactgcccatcgtagagacgcaggccggcgatgtttcggcctacatccccaccaacgtcatctccatcaccgatggtcagatcttcttggagagcgccctgttcaacgccggcaaccgtccggctgtcaacgtgggtctgtcggtttcccgtgtgggcggcgctgcccagaccaaggccatgaaaaaggccaacgcaaacctgcgtatcgagctggcacagtataaggagatggaatcctttgcacagttcagctccgatctggatgctgagacccgccgccagctggagcacggcaaggcactgatggaaatgctcaagcagccgctgtgccagcccaagtccgatgccgagcaggtggtcattctggtgctggcttcccacggcctgctggacactctgcccaccgcagaacagcgggaaaagaccgctgcctttgtgcggcagttccgtgcagacgtctccggcaccatgcagaagatcgatgctgacggcaagctggagcccgaccgtgtggacgccatccttaacgcttggaaagcttatgcgggaggcaatgaccatgtcgtccagtaagctgctgaaggagcgcatcgagagcattcaggataccatgaagatcaccaatgccatgtacctgatctcttcgtccaagctgcgcaaggcacggcagaactaccagaatgtgtccccttacttcaaccgtatgcgggacaccatctcccgtgttgtgccgcatctgccggaggagccggaacatcccttcttccacgagcggaatctggaaaacccccggcgggcgtatctggtgcttactgccgataagggcatggcaggtgcttataaccagaacctgctcaagtttttgcgggagcacgcagaccccaacgaccgcttttatgtcatcggtcaggtgggctaccgcgccctgcgccatcgggacccccgccttgtggaggagttccgttacagcgctaccgcacctaccctgcagcgtgcccgcgacatcacggtagacgccattgacgacttcaagtccggcaagctggacgagatctacgtcgtctacaccaagatccagaacgcccttaccagcgagcctgtcatggagcgtctgctgccgctggaccggcggtttttgcagcctgctcccaagggtctgggcgaccccaagggcgaggtggaactggtaccggacgcatggacggtgttcgagcagatcgcacccatctatatgcacggcatgatctttggtgccatgaccgagagcttctgcgccgagcagagcgcccgcatgaccgccatggattctgctaccaagagcgccaatgacatgatccgggacttgcagctggaatacaaccgcacccgtcagggctccattacgcaggagatcaccgagatcatcggcggcgcagctgccgtgcaggatcggacataataaaggaaaaccctctccgtcacgcctgacggcggcgcggataaaagctccccctcg

SEQ ID NO: 13793 - DNA, 13815 bp, Unknown
  gut microbiota DNA sequence
tccaaatgatacagggaactattattcgcgtagcaggccccgtggtggatgtgcagttcaccgccggcaggctgcctgccctgcaggaggcgcttaccgtgaccgcagagggcaccgagcgcaccatggaggtgacgcagcacgtcaacgagaccacggtgcgctgcatcatgctttctgccagcgagggtctgggcaagggaatgccggtggaagctaccggccacggcctgaccgcccctgtgggcgagggcacactgggccgtatgttcgacccgctgggccgccccattgacggcaagggcgctgtggacgagctgccgcactggcccatccaccgcaaggcacccggctttgcagagcagaagcctgcgactgaaattctggagaccggcatcaaggtcatcgacctgctggctccttacgctaagggcggcaagatcggcctgttcggcggcgccggcgtgggcaagaccgtgctgatccaggagctgatccataatgtggccaccgagcacggcggctactccatctttaccggcgtgggcgagcgctcccgcgagggctgcgacctgtggggcgagatgaacgcctccggcgtgctggacaagaccgcactggtctttggccagatgaacgagcccccgggagcccgtatgcgcgtggccgagaccggcctgaccatggcagagtacttccgtgaggagacccacaaggacgtgctgctgttcattgataacatcttccgtttcgtgcaggccggcagtgaggtctctgccctgatgggccgtatgccctctgccgtgggctaccagcccacgctggccaacgagctgggcgctctgcaggagcgtatcacctccaccaaggacggctccatcacctcggtgcaggccgtctatgtgcctgccgatgacctgaccgaccccgctcctgccaccacctttgcccatctggacgccaccaccgtgctgtcccgtaagatcgtggagcagggcatctatccggctgtggacccgctggcttccacttcccgtattctggaggcggacatcgtgggcgaggagcactaccgtgttgcccgcaaggtgcagtccattctgcagcgctatcaggaattgcaggacatcattgccattctgggcatggacgagctggacgagaacgacaagctgaccgtcatgcgcgcccgcaagctgcagaaattcctgtcccagccctttgccgtggccgaaaactttaccggcctcaagggcaagtatgtgcccctgaaggacaccgtgcgcagttttgccgccatcgtggacggcaaggccgacgatctgccggagtgggcattcttcaacgtaggtacgctggaggaggcacgcgaaaaagcagaaaagaagctggctgaggaaaagggcggtgccgtctgatgaacaagttcatgctgagcatcacagcgtccagcggcgagttctatcagggtgactgcgaggatctgaccctgcccatcagcgatggcatctacggcgtacaagccgggcataacccggtgctggtggcgctgcacatgggcatcctccactttgtggtggacggcaaggcccgggatgtgctggtgggcgacggcattgccgaggtgacccccgcctatgtgatggtgctggtggacagcgccgagaacccggaggacatcgacaagaaccgtgccgaggccgcccgcatccgcgccgaggaacgcttgcagcataagcagagcatgcacgaatattaccagagcaagatcgcactggatcgtgccatgcagcgtttgcagaccgccgcaaagtataagcgctaaggcagcatcccgatttccatataacaaaacctccccgtgcagggcaactgcatggggaggtttttctgtctgtcagcgatgcgaaaattgtgtcacagggtcattttttgcaatcgtcatgcgcgttgccgtgccttacgcccgcacatcctcccggcgtaaaagcagccatgccagaaggaacatcgtccccagccagaagatgcagctgaaggcaaacagcccgtagctgccagccagagcatccgcacttttgttggagttcataccgagctgcatcagggaatagggccacaacagcccatgccccttggaactgataaagatgccggtaatgccgcctagcagccccagaaaaatgggcacggcaaagctgcggatgatcatggccagcaccagctgtgcggcaatgacagccaacgcacccagcagtccccgcagtaaaaacagaggtaaggtgaccggcggcagcccgggcagatgggcaaataccttgccgcagaacacgaacagcgcgaacacaaagccgtgggtcagcagtgccagctttgtcaccaccgcaaactttgcggcaaacaggtccagcggcggtacggggcttgccatgatcaggttccagttgtgccccagatgttccagccgccacaagtaggcagcataggtggctaccatggcagggaagaaaagcatggaataaaacagggtgtgctgggtccacaggctataccagccgtcggtgaggatctcaagattttgcagataattgaaagtgccataggtggccgaaagaatgggcagcacaaagaacattgcccagatgggggatgcgtggagtttgcggttctccgcaagaatacagcgtttcagcatggttttatacctcctcgtcctgtgccttgcgccacgcaagggcaaacagcactgcgcccagcgcaagggtgaaggccaacagcccccagttgaaggagcgggtgccgtaggtgacggtgtgggtggccttgtcccagtttgccacttcgtaggcgctcagagggatgtagtacccaaagggcacaaaataactggcaagcggcggcataaaagcagagaacagacccaccagcgccccgacaatgcccacgcagagcgccggcaggggattgcctacccacagcatcagcagaaattctccaaagaagagcattgtgtccacagccagcgtgcagacgaacagatagcatagctgcccagtgggaaaggcttcggtataaccatggacacgccccagcaccggaacacaggccagctccagcaccgcgaccaacagcacttccagcactccaaagaccgccttgcctgcaaacaggctgcggcggctctgcagggtgtagagcagtttggcggtgttgcctttgatctccatatcccacagccgggaggccagcactgccatcatcaccggcatcagaatggcttcaatgacgggcaggctgtaaagcagggcgctgtaaccgttagcgagctcctccgggtctgccggggcaaggccgcccacccacagcacgacaatgccggggatgagcaggcagagagcaaggtcgtgccgacggtgggctttttgcagttctgcacggaaagctgccatcttacgccacctccccgctggtctgggtcaggctgaggaagatgtcctcaaggctctttgtctgtgcagtcagacccactacacccacgccgctttcggcaagagtatagaccagccccgccagcgcttcgtccggcagcgggggcagctgcagggtgtctggctggtctgccggtgcggtggcttttactccctgctgctgcaggacggctgcggctttgggtgcgtccagcacccgcagcagaatgccgccccggctgtgcttttgcagctgctgcaaagaaccctcgaacagcagcctgccgtggttcaggatgcccacctgatccaccatctgctcgatctctcccagcaggtgactggagatcagcacggtggctccggtggtctgcggcatggaagcaatcagactgcgcatttcttgaatgcccgccgggtccagaccgttggtgggttcgtctaaaatcagcagtttggggctgcccagcagcgccatggcaatgcccagccgctgcttcataccaagggaatactgccccaccttccggtcagcgtctttggtcaggtgcacgatctccagcacccggctgatgtccttccggtccacgtccttcaggtcagccacgatggataggttttcccgggcagtcaggtgcaggtaaccggagggggattcgatcagactgccggtctgccgcagcagggcaatgcggtttgcttcgctcagggtgtgccccagcagttccacgctgccgccggtggggtgtacaagccccaacagcatcttcatggtggtggatttgcccgcaccgttggggcctaaaaagccgtaaacacagccctccgggacagtcaggttcaaatgatccaccaccggacggccatggtagcttttgcaaagggcatgggtctcgattacaggtttcataaatggtctcctttcgcattcatggatttcggaacgatgccagaatacacccgctgccttaaactgaccggaagcgcagcttaatttacccttaaatttgcaggtgttttccgctgcggcgcaaaaagtgtgatatagtaaaggcgggaaaggagaactgcccttatggataccatttatgatgcaaagcttctcatcgtggatgacaacgccgagctgctggcactgctatgtgagcagctgcggggcgcaggatatggccatatcagaactgcccaaagctgcgccgctgcccgcgcctgctttgcggcggaacagccggagctgatgatcctggatatcaacttgccggatggggatggattttcgctgttccgggcgctgcgggcaaaagcggatgtcccggcattgttcctctctgcacgggacgcggatgccgaccgtctgttcgggctggggcttggcgcagatgactacctgaccaagccttttctgatgcaggaactgctgctgcgggtgcagcatattttgcagcgggcgtaccgggcagagctgtcccgtacaaaaccggcacctttgcagctgggggagcggtgcgtagacctgaatgatgctattgttaccctgccagagggcaaaacactggcgctgaccgctaccgagctggcgctgctgcggaaattggcagagaaccggggacacatcgttacctatgatgccctttgtgcggcggtctggggcgcagattactatggctacgagaacagtctgggggtacatatccggcatctgcgggagaagctggaagctgaacccggtgcgccgcagtttttgcggacggtgcggggcatcggctataagctgacaaagggggaagaagcatgaaaacctttgtgcgcctgatccggcggtatgtgctggcggcggtgggcatcgttctgctgctgttgttttccggtgttgcagtgctgggctggctgggttggctggagagttgccgcttgccgcagcgggagtactcctccagcgagatcgcggattccatggtggagaccgccgaagggcttgcctttggggcagaacgcaccccgcaggagtggatgaatggctacgagtgggcgatggtactggacaatgtgggaaacatccgctggagctacggcctgccgcaggagctgaaccatgcctacactcccggcgatatcgccaaatttgcccgctggtatctggcggattacccggtgttctgctggacagaaccctacggactgttcgtcatcgggctgccaaaggggagcctgtggaagtacagcatttacagctcaccggactttgccctgagcatggtgcgggtgctcccggcagcagcgctgggaatgctgctgctgggtctggttctctgcttctggttgagctggcggggggcaaagcggctggagaccgtggcaaacggtctggaagcactggcgcaggggcagaccgttcaactgcctacggatggttttgccggggaactggcagaaaagctgaaccagaccggggcgcagctgcaagccaaaaatgagatgctttcccggcgggacaacgcccgcacccagtggatcgcaggggtcagccatgacgtgcgcaccccgctggcgctgatcttaggctgggcggagcagctggaacaggatgcacttttgccggacagctcccggcagaaagcggccggtatccgcatccagtgcgaaaagctgcgcaccctcattgatgacctgaacctgaccagtaagctggaatacggtgcccaacccctgcgccggaaagatctgcgtgcagggccgctgttccggcagctggtggcgcagttttgcgaaagcccgctggcagagcgctgcgagatcacactggaacaggaagaaccagcagagcagacagtgctttcggtggatgaggcgctgctggcacggctgctggaaaacctgatgaacaacagcgtccggcataacccaaagccggtgaacattacggtgcacacccggcaggtaggggaacgcttctgcctgaccgtggcagatgacggtattggctatccggctgccgttctggcggcactgaacgctgcggagcctgccgaaaatgcgcctcatatccttggcctgtatgtagtgcagcagatcgccgccgcccatggcggcacggcagtgtttgggcagaacaccccctgcggggcaaaaacaacggtctggctgcccggccgagcgtgaacggggcaaaaaaagaaaatagcgcaaaaaacaggccgctgcttgcagttgttgcaaacagcggtcttattgttatacgtttttgctcttatccagtgcatcaaactgctgcaggatctgggggtctttcagtttgatgaccttgccggagaggtagtgcagggtgttttcctccggcacatccagaaagctgatgcgcaccgcgcacagtgcctgcgtcttggtgccggtacgctcgttcatcttgcggttgccgtatttgatatcgcccagcaccggcttgcccagataggccagatgggcacggatctggtgggtgcgcccggtgacaaggccgatcttgcacagggcaaaggggcctgcggtgcgcagcacgtccacgtccgtaatgatctgcttgcggcgctcgtcctgcgattgatgggcgtggatgctgaccttgttgtttttctcgtcgtgctcccaccatgcggtgaaccgcccggactgcggaatgcccaccgtgatggtgtagtactccttcttcagcaggtcggtgcggatgatctcgttcatgtcccgcagggcggcgtagttcttggcggcgatcaccagcccttcggtgccgcggtccagccggttgcagatgccgggcttgaagcggttctcgccgtggggatcgtattcgcccttctgggtcaggtactgggtaaaggcatccaccagattggcatcgccggtgcggtcgctgtggcacagcagatgggtaggcttgtacagcaccgcaagattttcgtcctcgtagatgaccgtcaccttgggctgattgggctgctttttgggggcagccttctgcaccggctttgcgccctcgggcgggaagaactcgtcgttgatgtacaactcgatcaggtctcccgcctgcaaacggtactccggtgcggcctttttgccgttcaccttcacccgcttgttgcggaaactcttgtacagcaggctggtgggaaaatcgcgggtcacgctctgcacaaagcgcgaaagacgcacgccgtcatcgttggcggtggcagtaaattgtttcataaagctatcctcatcgtttttgtcagaatcatgcttttatagtaatacaggcggggcgggaagtcaacgcgcattccggtgcaaaatccgggttatttttgcagaacgcttgtgtttgcgccgcaaaatgggtactataaggagagaacatagaaaaaggagtaccgccatggcagagaataaacggcacaagggacatcgccagcggatgcgggagcgggtgcaaagctacgggctggacagtctggccgagcacgaggcgctggaatatgtgctttacctgaccaacgcccaaagggacaccaacggcatcgcccacgacctgatcgatcggttcggggattttgcggcggtgctggaggccagcgaggaggaactgtgcaccgtggagggcgtaggcccctctactgcccggatgctgcatctgctgccccagatcagccggtactatggccgcagccgcaccagcaccactcgctgcatcaagaccaccgagcagatgggcagctacctgatggcaaaatttgcgtggtcggactacgagcgcgccatgctggtcagtctggacagccgcaagcgggtgcgcgccgccgtctggctgcgggagggcacctccgaccgggtcagtctggatatcaagaacgtggtggctgccgccatcaagggcggtacggatgccgtggtgctctgccacaaccaccccaacggggtggcgctgccctcgctggaggacatggacgctaccggcagcattgcccgggcactgggactggtaaatgtgcacctgttggaccactttatcctgaccgacaccgagtatttttccatgcgggacgccaaccgcctgcctatctacgatttcaagaccggcacgctgttctggccgtaaaacaaaaaactgtttacattataaattgtgcgtgctataatacaacttgaagcaacaacggattgtggttatacgcacggaagggagaaaacgatggcagaggaaaaatttgaactggtgtcgaactatgcccccaccggtgaccagcctcaggcgatcgcgcagctggtggagggggtgcagcggggtgaccgctgccagaccctgctgggcgtgaccggcagcggcaaaacctttaccatggccaacgtcattgcccagtgcaaccgccccacgctggtgctggcgcacaacaaaacgctggcggcacagctgtgtaccgagttccgctcgtttttccccaacaatgcggtggagtacttcgtcagctactacgactactaccagccggaggcctacattcccagcaccgatacctatattgaaaaggacagcgctatcaacgacgagatcgaccgtctgcgccactcggctacggcggcgctttccgagcggcgggacgttattattgtggcatcggtgtcctgcatctactcgctgggcgaccctatcgactaccgcagcatggtcatcagtctgcgccccgggatgcagatggagcgggacgagctgtgcaaaaagctggtcaccttgcaatacgagcgcaacgatgtgaattttgtgcgcaataaattccgggtgcacggtgatacggtggacatctatctggcctatatgagcgagcttgccatccgggtggagttcttcggggacgagatcgaccgcattaccgagttcaatcccctgaccggctccaagcagaacgtggtcaagcacgttgccatcttcccggccagccactatatcgtcagcgcggaaaaaaaggccgctgcgctggaaaagatccgcgccgagtgcgatgcgcaggtcaaacagttcaccgccgagggcaagctgatcgaagcccagcgcattgcccagcgcactaactacgatatcgagatgctgaacgaggtgggtatctgcaagggcattgaaaactactcggcagtgctgtccggtcgtgcgccgggcagtatgcccaccaccctgctggattatttcccggaggattttctgctcttcgtggacgagagccacgtcaccctgccgcaggtgcgcgccatgtacggcggcgactacgcccgcaaaaaaacgctggtggagtatggcttccgtctgccgtccgcctttgataaccgccccctgaaatttgaggaggtggagtccaagctcaaccagatgatctttgtctccgccacccccggcgagtacgagcgccggaacagctcgcaggtggcgcagcaggtcatccgtcccacgggtcttttagacccagtcatctcggtgcgcccggtggaagggcaggtggtggacctgctgggcgagatcaacgcccgcatccagcggcaggagcgggtgcttgtgaccaccttgaccaaaaagatggccgaggatctcaccgattacctcaccgagcaggggatcaaggtcaagtatatgcaccacgaggtggatacctttgagcggatggagatcatcaaggatctgcgtttgggcagcatcgacgtggtggtgggcatcaacctgctgcgcgaggggctggatctgccggaggtgagccttgtggccattctggatgccgacaaggagggctttctgcgcagcgagaccagcctgatccagaccatcggccgcgctgcccgcaacgcggagggcatggtcatcatgtacgccgatgtggtgaccgacagcatggagcgcgccatcaccgagaccgagcgccgccgcgccattcagatggcctataatgaggagcacggcatcgtgcccaagaccatcgtcaaggccattgctgacagcatcgagatcagcgataaggccgaaaacgccaagcgcaacacccgccgcatgggcaagatggagcgggaagctgccatcgagcgcctgacccgggagatgaaggaggctgcgaagctgctggaatttgagcacgcagccttcctgcgggatcagatcgaccgtctgcgccggggcgaaaaccccaccgtggactccgccgccgagaccgaacgcaaacagaaccatgcacagacacaacgaaaagggagaaaataccttggcaaacgataaaatcatcatcaagggtgcccgcgagcacaacctgaaaaatatcaacctgaccctcccgcgggaaaagctgatcgtcatgactggcctttccggctcgggcaagtccagtctggctttcgataccatctacgcggacgggcagcgccgctatgtggaaagcctttccagctacgcccggatgtttctgggacggatggataagccggacgtggacgagatcaccggcctttcaccggccatctccatcgaccaaaagaccacaagccacaacccccgctccaccgtgggcactgtgactgagatctacgattatctgcgcctgctgtacgcccgcatcggcgtgccgcactgcccggtgtgcgggcgggtcatcagccagcagagcgtggacgagatggtagatgccgtcctcaagctggaggagggcacaaagttccagatcttagccccggtggtgcgtcagcgcaagggcacccagcagaaggaactggacgccgcccgccgcgccggctatgcccgcgtgaaaatcgatggcaacctgtatgatctggacgaggagatcagtctggaaaagaacatcaagcatacggtggaaatcgtggtggaccgtcttgccctgcgcaagggcatccgcagccgtctggcggattcgctggagaccgcgctggcgctcaccgggggcgtggccgaggtggatgtcatcggcggcgagtgtatgaccttcagccagaactttgcctgcccggagcacggcatttccatcagcgacctgtcgccccggctcttctcctttaataacccgctgggtgcctgcgaaaaatgcaccggccttggtacctttatgcgggtggacgaggatcgcatcctgcccaaccgcagcctttccatccgggagggtgccatcaaggccagcggctggtattacgccgagggctctgtgagcgagatgtattatcttggccttggtaaaaaatacggctttacgctggatacgcccatcaaggagatgagcaccgaggcggtgaacgccctgctctacggcaccaacggcgaaaagatcgagatgcaccgcaccaacgagttcggcagcggggtgtactacaacacctttgagggcattgtggaaaatctggagcgccgcttccgcgagacgagcagcgagtggatgaaggaagaaatcggcagctttatgtccggcgtggagtgtccggactgccacggacagcgcctgaagccggtggtgcttgccgtgaccatcggggacaagaacatcagccagttctgcgagatgtccatccgggacgagctggaatttatccggcaaaacgagccgaacctcaccgaaaagcagcagcagatcggcggccagatcatgaaggaaatcaaaaaccgcctgcaatttttgcaaagcgtgggtctggattacctcacgctggcccgggcggcgggcacgctgtccggcggcgagagccagcgcatccgcctgaccacccagatcggcagcgctctgtccggtgtgctctatgtgctggacgagccttccatcggcctgcatcagcgggacaacgataagctcatcgctaccttgaaaaacctgcgggatctgggcaatacggtcattgtggtcgagcacgacgaggacaccatgcgcagcgcggactatatcgtggacgtaggccccggtgccggtgtgcacggcggcgagatcgtagccgcaggcagcgtaaaggatatctgcaaggccaagcgcagcattaccggcgactatctctccggccgcaagcgcattgccgtgccccagacccgccgcaccggcaacggccactgcctgaccgtaaagggcgcacgggaaaacaacctgcgcaatattgatgtcagcttcccgctgggggcgtttatctgtgtcaccggcatttccggctcgggcaagtccagcctgatcaacgagatcctgtacaaaacgctggccagcgaactgaacggtgcccgctcccgcgccggcaaatgcgatggggtagaggggctggagttcgtggataaggtcatcggcatcgatcagcagcccatcggccgcaccccgcgctccaaccccgccacctacaccggcgtgttcaacgatatccgcgccgtattctcccagacgcaggacgccaagatgcgcggctacggcccggggcggttcagtttcaacgtcaagggcggccgctgcgaagcctgcgagggcaacggcattctgcagatcgagatgcactttttgccggatgtatatgtgccctgcgaggtgtgcaagggcgcgcgctacaaccgcgaaacgctggaagtaaagtataaggaaaagaccattgcggatgtgctgaacatgaccgtggaggaagcggtggtgttctttgccaaccagcccaagatcgcccgcaagctgcaaacgctgctggacgttggccttggctacgtcaccttggggcagagcgccaccaccctgtccggcggcgaggcgcagcgcgtaaagctggccaacgagcttgcccgccgcggcaccggcaaaacggtgtatattctggacgaacccaccaccggcctgcatattgcagatgtgcaccgcttgatcgaggtgctgcaaaaactggtggacgtgggcaatacggtcatcgtcatcgagcataatctggatctgatcaagtgtgccgaccatatcatcgaccttggccccgagggcggcagcgccggtggcgagatcgtggccgagggtaccccggagcaggtggccgccgtgcccggcagctttaccggccagtatctgcgcccgctgctggaacgcgaccgcgcacagcgcgccgcagaagcagaaaaacactgaaaacagcaaaaaacaaaaaagcgcgtatccgtgtaaaaatcggacttttctcagaaaaaaccaaaaataatcgaaaaatctgttgacaaaacggccttacctgagtataatatctcttgtcgccacgcttcggtagggaagcggcggtcgatatccgggtgtagcgcagttttggtagcgcgcttgaatggggttcaagaggccgtgagttcgattctcgccactcggaccat

SEQ ID NO: 13794 - DNA, 557 bp, Unknown
  gut microbiota DNA sequence
tgcgatgaccgaacactatgaagaaatcactgtctgcggaaagcctgcattattcactaacttccgcatcaaaagagataccgtcccggatagtctgtatgtctacgatgtgcggcatgatgatgactgcctaggaattccctgtgaggttgcaccatttatcatggtcaatcactggggaacgattattcttgcagagccgttggagctacccgatgacggacggcggtatatcgacgaagagacggactggagctatgacccatttagaggagcagagaaaaatcaaaagccttgtgcgacggtgggagagtttatgaatcagtatctgaaccgttgataagagcgagccgtgtcgttccttataaagttcaaaagttatcgcaggtgacggacggcgcgaaccgttcgtcaacggggacaatcttttgaagtttatgagggatgactaaggctcgcaggaaaaagtattaaaaaagccgtgggtatagaaaagtatcaatcacagcgtgatgaaaccgatttgccttagcaaatcggtggagctaaaatgacgt

SEQ ID NO: 13795 - DNA, 7284 bp, Unknown
  gut microbiota DNA sequence
tttgtgcttgacaacagaccgactttccgatataatagagcacgttcccgcggtaagatgccgcacgaacttgagcgatcatggcccggtagctcagttggttagagcaccagcctgtcacgctgggggtcgtcggttcgagcccgatccgggtcgccatttgctgctatagctcagttggtagagcgcatccttggtaaggatgaggtctccagttcgaatctggatagcagctccaaaggcaagcacctcgaagtcttaggacttcggggtgtttttttgcgctttttcagggcagggggcttgttgcatcctactgcttgtggaaaccgcccaaaatagaacgactttttctcttggtatgtcaattgaagctgcctccaaattgttatataattaacataataatgaactgcggcacagcgctgcgtgtgccgtactatttttggaggttttgtattatggctcgttttactctgccccgtgatctgtaccatggcaagggcgctctggaagcgctgaaatccttcaccggcaaaaaggcaatgatctgcgtcggcggcggctccatgaagcgtttcggcttcttggaccgtgccgtggagtacctgaaggaagccggcatggaagtggagctgttcgagggcatcgaacccgatccttccgtggagaccgtcatgcgcggtgccgaggccatgctgaagtttgagccagactggatcattgccatgggcggcggctctcccatcgatgcagccaaggccatgtggatcaagtacgagtaccccgagatcacctttgaggagatgtgcaaggtgttcggcatcccgccgctgcgccgcaaggcacacttctgcgccatttcctccacctccggcactgccaccgaggtgaccgccttctccatcatcaccgactaccagaagggcatcaagtaccccatcgcagactttgagatcaccccggacgtggccatcgttgaccccgatctggctgagaccatgcccaagaagctggttgcccacactggtatggacgccatgacccatgccgtggaggcttatgtttccaccgcacactgcgactacaccgatccgctggccatctttgccatccgcatgatccagggcgatctggtggacagctacaacggcgatatgtccaagcgcgactccatgcacaacgcccagtgccttgccggtatggccttctccaacgctctgctgggcatcgtgcactccatggcacacaagaccggcgctgcctttgcagactacggcgcacacatcatccacggcgctgccaacgccatgtacctgcccaaggtcattgccttcaacgccaaggaccccgaggctaagaagcgctacggcgtcatcgcggacgagatgaagctgggcggcgcaaacgatgacgagaaggtcaagctgctcatcgagtacctgcgcggcatgaacgacgccctgaacatcccccactgcatccagcactacggcccggactcctaccccactgagcagggctttgtgccggagaatgtgttcctcgagcgtctgcccgagatcgccaagaacgccatcgccgacgcctgcaccggctccaacccccgccagcccagtcaggaggagatggagaagctgctcaagtgctgctactacgatactgaggtggatttctgattcgtcctttctttagtacgcctccttccctatggacaaaagccccgcagagcataccgccctgcggggcttttgccgtttaggccaaacgatttaaaatgcccgccgcgtgcgccccttcccgtgaaaaggggacaccggagcgtccgcagacgctccggtgtcccaaattttgaaatagttttctctagcggcaggccttacagcttgctcagctggggaccctgtgcggtgtccttgacagcccagcccagttcggtcagctgtgcgcggatggcatcggcggtggcccagtccttggccttcttggcagcagcacgcttttccaccagcgcggtcacctcggcgggcacctcgtccttcttgcggttgtacagcagacccagcacaccggtgatctcgtcaaaggcggcggcagcggtctccagcgcagccttgctggaagcagcggacagggtgttgatctccttgaccagatcaaacacggcagccagcgcatccggggtgttcaggtcgtcgtccatggcggtgcagaacttggtgcgtgcctcggcggccttttccttcaaagtctcatcggtgccgaagtcggtcttgctcagggcaaagtccagattctcgcggcaggtgtacaggcgctccagactgttcttgcagctctcgatgagatccacggtgtagttcaggggcatgcggtagccggcggtcagcatgaagtagcggatgggctcgtagccgtagaggtttgccacatcccgcacggtaaagaagttgtgcaggctcttggacattttctggttgtccacgttgatgaaaccgttgtgcatccagtagcgggcaaactcacagccattggcgcactcgctctgggcaatctcgttttcgtggtgggggaagatcagatcctgaccgccgcagtgcaggtcgatggtcttgcccagatgggtgcggctcatggcgctgcactcgatgtgccagcccgggcggcccatgccgtaggggctttcccatgcgggttcaccgggctttgcggccttccagacggcaaagtcggcggggtcttccttcaaatcgtcctccatgcggctgcgcagctcgcggttgccgctttccagatcgtccagattcaggtggctcagcttgccgtagccggggtcgctcttcacccggaagtacacatcgccgttcttggcaacgtaggcgtggccggagtcgatcagatctttgacgatatcgagaatctgagggatgtgttcggtggcgcggggctgcacagtgggcttttcgcagttcagcccggcggcatccttcaggtactcggcctcaaagcgctgcgccacctccttcatggaggtgccctcttcctgtccctttttgatgagcttatcgtcgatatcggtgatgttggaaacgtagatcaccttgttgccccggtattccagatagcggcgcagggtgtcgaacacgatcagcgggcgtgcgttgccaatgtggatatagttgtacacggtagggccgcagacgtagatgcggtactcgccgggcacctgcggcacaaattcttccttctgtcgggtcagggtgttgaagatctgcatggtcaattctcctttttgttccaaacagaagccgcaaaacaaaacgcccccggagcggtgcacaaggcacagctccgaaggcggttttaaaatcaaaatcgcggttccacttctgtttgtcgctcaaaaccggtaacggcggcgcaccgcacggcgatacttccccacggggttcccgccgcgtgctgtccgggcgcactttgcgcggcggtctgcaaacaggctttcagccagtggcctgttctctctgcgcagacggtgtgcggcgctactctgcccggataaacgcatttatccttttacccctttattatagcggtgcggtgcagggaagtcaaggcagaacgaaccagtgaaaatgaaattcagccaagcctaccggcttggctgaatttcaaatcaaaaagatgctttcctctttacccgggatagcggcttacttccagcagttcttctgcgcgctttacctgctctgccgtgggcggtactgcgtccggcaggggatagggaatgcccaacttctgccacttgaacagccccaaggtgtggtagggcagcacctccacccgctgcaccgttttgagcgagcggataaagtcagccgttttgcgcagcccctcctcgtcatcggtcagcccgggcacaaggacgtgccggatccacagcgggatgccgaggtcggagatgtgccgcgccatggcaagaatattggcgttgtctttgccggtgagctgccggtggcgctcggggtcgatctccttgaggtcaaggatcaccagattggtgttagccatcaggcggtcgaacgcggccagataggccgggtcgtccgggcggaagggctgcccggcggtgtccagcgccgtgtgcacgcccttggcgcgtgccagcgtgaagaactcagtcaggaaatccatctgccgcagcggctcgccgccgctgaccgtgatgccgccctttttgccccagtagttgcggtagcggtatacccgctggaacagcgcttctgctgtccacgcctcgccgccctctgcccatgtttcggggttgtggcagtatttgcaccgcagggcacacccctgcaaaaacaccacaaagcgcacgccggggccgtccaccgagccgaaggattccagcgagtggacgtacccaagggccttacaggacgccatggcaggtacgggccagcacgtccagctgctgctcgcgggtcaggtcgatgaacttgacagcgtagccggaaacgcggatggtgaagttggcgtactcttccttctcagggtgctccatggcgtccagcagcttctccttgccaaagacgtttacgttcaggtggtgtgcgccctgatcgaagtagccatccagtacctgcaccagattctccacgcgctcgccctcgctgtgacccagtgcctcggggttgatggtctgggtgttggagatgccgtccagcgcccagtggtagggcagctttgccacggagttcagcgaggccagcagaccgttctgctctgcaccgtagctgggggtagcgccgggtgcaaacggggtgaaggcggcgcggccatccggcagagcgccggtgtacttgccgtacaccacgttggaggtgatggtcaggatagaggtggtagcctcggagttgcggtaggtgtggcgcttcttgatcatctcaaggaaggtcttgagcagccacacgccgatctcgtcggcgcggtcgtcatcgttgccgtacttggggaaatcgccctcggtctcaaagccggtggcaaggccgctctcgtcgcgcaccaccttcaccttggcgtacttgatggcgctcagggagtcgatcacgtgggagaagcctgcaatgccggtggcaaaggtgcggcgcacatcggtgtcgatgagtgccatctcggcttcctcgtagtagtacttgtcgtgcatatactggatgaggttcagcacgttgacgtacagccctgccagccagtccagcatctgcacatacttgggcagcacctcgtcataggtcaggtactcgctggtgatgggggcgtagttggggccgcactgctcgtggctcttctcgtccacgccgccgttgatggcgtacagcaggcacttggcaaggttggcgcgtgcgccgaagaactgcatctccttgccggtctgggtagcagacacgcagcagcagatggagtaatcgtcgccccagacgggcttcatcacgtcatcgttctcgtactggacgctgctggtgttgacggacaccttggcggcgtacttcttaaaggcctcgggcagggcagaggagtacagcacggtcaggttgggctccggtgcggggcccatgttttccagcgtgtgcaggaagcggtagcagttcttggtgaccatgctgcggccgtccatgccgatgccgcccacctccagcgttgcccacacggggtcgccggagaacagctggttgtagctggggatgcgggcaaacttgaccatgcggaacttcatgaccatgtggtcgatcagctcctgtgcctgactttcggtcaggatgcccttgtccagatcgcgctggatataaatgtcaaggaaggtggagatgcggcccacgctcatggcggcgccgttctgggtcttgatggcggccagatagccgaagtacagccactggcaggcctccttggcgtccttggcgggctgggagatgtcgtagccgtaggcctcagccatcttcttcatgcccttcagggcgctgatctggcgggcgatctcctcgcgcagacggatgacgtcgtcggtcatggtgccgtcgccgcagttagcaagatcctcctgcttgaactggatcagggcatcgatgccgtacagggcaacgcggcggtagtcgcccacaatgcggccgcggccgtaggtgtccggcagaccggtgatgatgtgggtgtggcgtgcctttttcatctccggggtgtaggcatcgaatacggcctgattgtgggtgcgggtgtagtcggtaaagatcttgtgcagctcggcagagggctggtagccgtaggtggtgcaggcctgctctgccatcttgatgccgccgtagggcataaaggcgcgcttgaggggcttgtcggtctgtaagccaacgatctgctccagatccttcaggttttcgtcaatatagccggggccgtaggaggtcaggctgctgaccacctcggtctccatatccagcacgccgcccttggcgcgctcggctttctgcagctgctgcaaagcaccccaaagcttatcggtagcctcggtggggcctgccagaaagctttcgtcgccgttatagggggtgtagtttttctggatgaagtcacgcacgttgacctcttccttccagatgcggccttcaaagccttcccactgttcaaactggatcattggaacctccttgctccattacgcagttagcgttttctaactaatgagcctttgaaaaaccgctctgtctgggcggttttctgggggcgaaacggtcttgcgctgccgacagcggcagcccttactacaaggtgtagacaaaaataaaaacctgcccacaaaatcttgcgttattataatagcaagaaccactttaaaaagcaatagaaaacaagtgggttttcttccaaagcaaagggctttctttgggcagaatgtagaaaaaccgccgaaaccccggcggcacggcaactttgcgaaaaaatttgcaaattaagggttgacaagactaactgactgtggtatcctgttctcgcagcggcggttagctaatcctaaccgcgttgcaccagaaaaaaggagcgtctgcaagcgctccgctccattcctccattcctttctcttttctacgggaagcggcagcacggtttgctctgctgcttccggcgcggcaccggctgtgtttggtaccacagccgacgcaaagaaaacaaaaacgggacactcagcttgaccacctgagtgccccgatttttgtttctaaatctggctttcac

SEQ ID NO: 13796 - DNA, 13095 bp, Unknown
  gut microbiota DNA sequence
atttatattgagatagaataaaaactgtatctaaaagtccactgcactttcaggttattacaatcacggtcgattgcacatacaatacaagtatcacttcacaaaacggagggtacttgtactatggtggactacgccgacatcggaaaacgcatccgtgcctgccgccttgcaaagggcatgacgcaggaacagctggccaatgaggtcggcgttgtggtcacgcacatcagccatatcgaaacaggcaactcagtgcctagcctgaaaacgctgatcgacatcattaacgcactggactgctccgcagacgagctgctgtgcatcgagatcaaaaaagcaaagccggtgttcgacagctggatgaccgaacagcttgcagattgctccgccgatgaggcaaagatcatcaaagaaacggtggtcagtctgaaaaaatcgctccggaaggtgtatggaaagtcctctaaatacagatatgactaaaacttcaaaaactgaatgccagttggtaggtattgagtgtctgaaagaacaccaataaacagaatgaaccgcctcggtttccatagtaggaagccggggcggctttttatacaaaaaagaaatcgtttttttgtagctttgatgaattggcgcggagccgttgacagcagaagggcagaagcgtatctttggaacagaaggcggaacagggccataaatagcagttttctttaccttgcaaggacactttcgttttgatgaggcacgccccggtgtgccgcttttttcatttgcggagataaaatgcaaaaaagtacggattatagtacacattatctgctatgctcggtacacggaaagcacacaccggaaaaggagcaaaaatgcgctggacgttgaataaaacaaggcttttggctggtaaaacggacccggagaataccagcctgtggctgccgctctggatgcacctgtgggatacggcgggcatcatggagcggctggtccggcagtggctcccggaaagtgcaaaacgggccatgggctttgagcgcgaggaagcgttgctcgcgcatgcccggtttctgggcgggatccatgatataggcaaggctacggtagcctttcaggcaaatatcctgcgcactctgccggaggcgcggcagcggctggaaatgctgacgccgctggactgtcctgaacagaaccgccgggagtcgccgcatgcccgggcgggagaggcaatcctgctgtgggatgattgtcccggcgggctagcctccattgtgggagcgcatcacggcaggccacagagctgcgcggcggtcgatgaccagttggagtgctgggagagcaactactaccccaagggacaggaaaaggtctggcagggcttctggacagaactgctcatgactgttttgcaggactgcggctttgatgatacggcggaactgtacgacctggacccgcaggaggaagtgcttctgaccggacttctgatcatggcagactggatcgccagcaatacggaatacttccccctgatcccggtagaggagctgggcagcatggaggattacccggcgcgggtggacagggcttgggaaaagctggcgctgcccttcccgtgggaggcacagccgggcatcgcagacccgcaggagtttgcggtgcggttcggctttgcgcccaatgcggtgcagagggctgttctggaggctgtggataccgcagcggaaccgggcattctgattttggaagcacagatgggcgtgggcaaaaccgaggcggcgctggccgctgcggagatcatggccagccggttcgggctgggcggtgtctttttcgggctgcccacacaggccacggcaaacggcatctttccccggctgcttggctgggcagacacgcagtctgagaagacgctgccgcaggctataaagctggcgcacggcatggcagaactgaacgagtgctatttgcggttacaggggcgcggggtgcagctggaggaagatgcgcaggaagagcatcgggtacaggtacaccagtggtttcgaggaaacaaacaggtactgttggcaaacttcgtgattggcacagtggatcagctgctgctggcggcacttgcccagaagcacgttatgctgcggcatctgggacttgcgggcaaggtggtcattattgatgagtgccacgcctacgatacctacatgaactgctatctggaccggacactggaatggctgggctggtataaggtgccggtcattctgctttcggccaccctgcccgcccggcggcgcacagagctggtcgaggcctaccagcagaaaaaggctgccccggacgccccatgggaaaccagctgcggctatccgctgctgacatggacggatggcgcagaggtaaagcaaacggccatcccatcggacgcacccggtcaaacggtgcagctgaccacgctcacagagccggagctgcccgcgctgctgcgccggaaactggtcgagggcggctgcgcgggggtgatcgtaaacacggtcaaaaaagcacagaagatcgcacagctgctgcgggaaagcctgccggacaaagaggtgcagctgttccatgcgcagttcctgatgccggaccgcgcggcgcgggaaaaccagctgatggcacgcattggcaagggctctgcaccggagtgccggaacgacctgatcgtggtgggcacgcaggtgatggagcagtcgctggacattgatctggacgttcttgtcacagagctttgccccatggatctgctgctgcagcgcattggacggctgcaccgccaccaccgcagccgccccgctccgttgcagcaggcctgctgcgcggtgctggacaccggggaagatgcctttgacgcgggcagcgaggcggtatatggacagtggatgctctggcgcacccggaactttctgccccggagcattcggctgccggaggagatctctccgctggtgcagcgggtctacggctgggagcgggaagttcccggcggggcgcagggtgaggaaatgcgctgcgtatatgagcagacacaggagaaaaagaaagcacgcgccgaggcgtaccttgtgccgcagccggaaacgcaccggctggcgcagctgaacacgctggacgactggatgcagaacgagggcgcctgctccgacccggcggcgcgggcggcagtgcgggacggcgacccctcggtagaggtgctggtgatgcagcgtcgggcagacggcagcatccactttctgccgtggcaggagggcggcagtgccgtagctgccgacagcccgcccccaccggaaacggcactgaagatcgcccggcagaagctgcggctcccggcggtgttcggcaaggcgtggaaggtggatagggtcatccgggagttggaagcggataaccgcagccgccttgcggcgtggcagctgtcgccgctgctgcacggagaactgatcctgctgctggacgaaaacctgactgcccggcttgcgggcatggaactttgttatgaccgtgaaaacggcctgtattaccaaaaggaggagacggatgaaggaaattgaattcaacttgctgaccgaaccgtggatacgggtgcggctgcgggacaacacggtgcgggaggtgtccctgaccgaggcgctggtgtcggcgcaggattatgtggaccttgcgggcgagatgcccacccagaacgccgcagtgctgcggctgctgctggcggtgctgttcaccgtgttctcccgggtggatgcaaagggagcgccccgcccgctgatgcagagcgatgatgcactggagcgctggagcgtgctgtggcagctggggcatttcccggcagagcctgtccgggattatctggagcagtggaaggaccgcttctggctgttccacccgacacatcccttctggcaggtgccgcaggcaaagatcggcacggaatacggtgcggccaaactcaacggtgaaatgtcggaaagcagcaataaactccggctctttccgctgtatgcggggcagagcaaggagcagctgagctatccgcaggcggcgcggtggctgctatgcgtgaacggctatgatgacacctctgcaaagccaaaaggaaaggggcttccgtccgtaggagccgggtggctaggcaagattggttttattcaggcacagggtgataatctgtacgagaccctgatgctgaacctgacgctgctgcgcgacggccgggaatgctggggcgaaagcaagccctgttgggaattggaagcaccaaagagcgcggaacggacagaaatttgctgcccggataacccggcacagctgctcaccctgcaatccagaaggctgttgctgcacaggacaggggagaatgtagatgggttctgtctgctgggaggagatttcttccccagagaaaacgtctttgccgaacagatgaccatctggcgcacgatgccaatcaagaaaaatgaaccggtggtgtttgtaccctgtcgtcatgacccggctaaacaattctggcgggagttcccggcggtcttttgtcaggacagcgggcatcgcccgggcgttgtatgctggatcgaaaagttgcaggaaaagagattgaaacttctggatccccgcagaaaggtacatttccgcatctccggtgtccaatatggcgataaggacttctttgtaaatgattctttcagcgacagcctgacctttcaagcagggattctggatgagatagggcgtccatggcagagccggatcgtcagagaaatcgagcgctgcgaacagacagcggcgctgatcgggcgttttgcacaggagctggcaattgccgccggtgaccggaatgaaaatgcaggcggcgcggttcgtgcacaattctactttgcggtggaccagcccttccggcagtggctgcaggcgatcgacccggagcaggacgacccggatgaggcagcactgcgctggcagacacgggcgcgcagcatcgcggaaaagctgggaaagcagatggtgatggaggccggaaatgccgccctaaagggacgccgcattgtggtggataaggataaaaagaccgagcgcaccatcctgtataccgcgccaaaggcctataatcatttccgcgcaaggctttgggagatctatcccaaaacagaaccataaagggggaattgtatgaaaacacaggatgtcaaactgtatgcggcgcagcagctgcacaggcttcaggttctgccggacaaccagcggcgggcagaactggcaaagctgcggcggggtatcggccacgcacccggtgagctgccggagctgtggggatgctttttgctgggaatgccggaaagctttcagggccgcagtgctccctcggcggcagagtgggcggtctaccttgccctgaccctgtatgctgtgcatcagcaggggaatgaccgccccatgaactgccccggcaacacgctggggcgtgcggtgcggcagctggcagagcggaacagtgccggacaggactggaccgaggccagtgtgctccggcggttcaatgcgctggccaccgcagaagaaatcaccgagatcagccaccatctgcggggcatgatccagttgttgagtgcggcaaaggatggcggcatcccgctggactatccgcagcttgcggcagacctgtatgaattgcaatgcaccgacccgcggtatgcacagattcccgccaatgtccgtctgcggtgggggcaggacctgtaccgcgacccgaagcctgcaccggaagaaaaagaaaaggagacttgaccatgaagaagcgcctgtatgttgatttccacattttgcagaccgtcccgcccagctgcatcaaccgggacgataccggcagccccaaaacggcagtgtacggcggtgtgacccgtgcccgggtatcctcacaggcatggaagcacgccatgcgtgcagcctttgcggagaatgctcagctggacgtgggcaagcgcaccaaaaaggccgcagaactggtgaaggcgcagatccttgcactggccccggaactggatgcggacaagctggcaaaaaaagcgctggagaatgcgggcatcaagagcgacgataagggcaccaaggcactgttcttcatgagcactgcgcaggcaaaggcattggcagagctggctgtggagggctctgcggataaaaagcagtatcgggatgccctgaaagcggctccctcgatggacatggcgttgtttggccgcatggtggcagatgacccttctctgaactatgacgccgctgcgcaggtggcgcacagcatctccacccatgccgtgcagaacgagtacgattactttactgccgtggatgactgtcaggcagaggacaacgccggtgcaggccatctgggcacggtggagtacaactcctccaccctgtaccgctatgctacggtgaacgtgatggagctggccgggcagctgggtgcagcgcaggcagcggaaacggtgcgggcctttggtgaggcgttcctcttctccatgcccaccggcaagcagaacacctttgcaaaccgcactctgccggacgcggtatatgtgaccctgcgggaggatcagccggtgaacctgtgcggcgcattcgagcgtgccgtgccccgcagtgcgcagggttacgccgcaccttccaaggcggcactggcgcagtatgcgcagcagatgtacagcagctttgccgaggctccggcgcaaagctttaccgtgggcagcgggctggaggtgctggctccggcgcagacggcaaaggcgatgctggacgcactggaaaaggctgtccgggatgcgcttgccggaaatgaggtggggtaatggcaacgctgttgcttcggctggcagcgcctttgcaggcgtggggcgcggactccaaatttgagacccgcaagacgggctgggaacccaccaagagcggcgtggtcggcctgttggcggcagctctggggctgcggcgggacgagcgcgaagcgctgacccggctgaccgggctgcggttcggcgtccgcgtggagcgggaagggcagctgctggtggactaccacacggcaaagacgcaggacgaaaagacctcttatgtgacctaccgccattatttgcaggatgccgtgtttctggccgggatcgaaagcaccgacaccgcccttttgcagcagctgcagcaggcactgctgcacccggcattcccgctgtatctcggccgccgctgctgcccgcctaccctgccgctctgtctgggcgtacgtccgggcagcttgcaggaggtactgcaagcggaaccgcccctgtgcccgggacggcagagccggatcttgttggacgccgatccgctggagccgggcacggctccgcagcgggatgtgccggtgagctttgacccgcatcatcggcagtacggctaccgctcggtacgggaactatggcagaagatgccggacagcccggaggctacggagcacgacccgttccgggaattgtaaaaagggggcgagagaatgtatttatcacgggtagaactcgatcccacccgccgcagcaccatggctgcgctggcggcaccacaaaaactgcatggcgcagtggaaagcgcttttgcaggggagcgccgccgcaggctgtggcggttggatcgtctgggagagcggctgtatctgctgctgctcagcgaggatgcgccggagttgaccggcgtggtggagcagtttggcaccggagcggctgcggagacccgcagctacgacccgcttttgcagcgggtggagccgggcagctgctggcagttccggctgactgcaaaccccaccaaaagctgcaaagacacccaaaaccccgcagcgcggggaaccgtggccgcacattgcacgacacagtaccagaagcagtggctgttagagcgcgctgcaaagcacggctttgccctgcaggacgagggatttaccgtgacccgggtgcagtggcagcattttgccaagcacggcacccggccggtgaccctgttggcagtgacctatgagggcgttttgcaggtgaccgatgcagagcagttccgggcactgctgtgtcagggcatggggcgcggcaaggcctatggccttgggctgatgaccgttatgcgcgcaggaaactaagagggacgggatgccgggcatgatccggccggacttgcaggcgctgccgcagcattttcagctggcagaaaaagtggagcatcgcgccctgccggactgccatttgatacaacaggtttattgcaaactgaaggaaacagcggtacaatagcaacgggaggcacggtgctacgggatctttttagtcttttccccgcatacgcgggggtgatccttgcggttcgttttgtacgattagcgttcgcgccttttccccgcatacgcgggggtgatcccatgtgatagtgtggtcttgctgtctgctctcccttttccccgcatacgcggggttgatcctatgcatatggctgactgcaagcgtcaggtggccctttcccccgcatacgcgggggtgatcccacaacacaggggtagaatgccatggtgtcgcgctttccccgcatacgcggggcttaccaaaagacccctcgcaaggttttgcgcgagcgcctgaaaaagcgcccctaaagcaaacgaaccgccccggtttccgtgatagaagccggggcggttttgtatgcaggaggcgggggcaagggatgtccttccgccccggcgctttcttgcatttcacggaaaaatgcgcaaacaaaaagcaggcagtgtcgtggaaaggaggaggaaagcgacactgcctgctgtataggaacccctgaacattgcggcttgatcaggagggatttggtagtctgtccgccgttctggctattgcctcgcatagaaacgggagacagttttttatgggcctgctgtgcgccgctgctgcggccgcacccgcagggaaatgtgcctgcatgggcttttgcggggagaacctttcggaggttatgggggatgtccgttccgttctccctgaatgcacccttattatgccagacaatcgtggcaattctttgtggtaaatttgaacagtttgcaaatattgcagtttgcgtttataatgtccgagcaacatccgcaaactgcatatcgcaaatatgccgttttgacaggcactgtttttgaaaattgcgataaacgccctgctcataaaaaagactgctgaaaagtccgcgcttctcagcagtctgaatctgaaatattccgcgttacactccaaagaactccttggcgatgtcggcgctgcgcttggcgtccttggcgtaccagtccgcgccgatcttttcggcatattccggggtcagcacggcaccgcctaccatgatcttgcagtccagctgcgccgcgtgcagggcggcgatggtctcctccatgcttttcagggtggtggtcatcagggcggaaaggcctaccagatgcacgtccttttcccgcacggtgtccaccaccgtctccaccggtacgtcccggccaaggtccagcacctcaaagccgtagttttccagaatgacccggacgatgttcttgccaatgtcgtgcacatcgcccttgacggtggcaaggacgatacgccccttgctggcgctgccctcgcccttttgggcaatggcagttttgatctcctcaaaggcgctctgggcggcgctggcagcctgcagcagctgcggcaggaacagggtgcctttttcgtacttggcacccacgatgtccaaagcggggatcaaggcttcgtccaccacctccagcggctgcttttctgccagcagggcgcgggtatgggcggcggcgtcacctttcaagcccttttccaccgctttcatcagggcggcgtaggggccggtaagttctgcttcggcggcactggcggcaggcacggtctttgcagcctgtgccagcgcagtgctggcgggcacgcggtcggcaaagcgctcgatgtactttgtgctctgcttgtcccggttggtcagcacgttgtaggcgtacaccgccgccatcatctcctcactggaggggttcatgatggcaaggtccagccctgcgtacatggccatggtcaaaaaggtggtgttcaggtaggtgcggcagggcagaccaaagctgatgttggacacgcccagcacggtgcgcactcccagctcctttttgcaggcttccagcgcctgtaccgtggccagcacatcttcctgctgggcgctggcggtcagggtaaggcagtcgatgtagatatcctcccggggaatgcctgctgccagcgccgcttcggtgatgcggcgggcaatggccacacggtctgcggctttgggctggatgcctttttcgtcgatggccagacccacgatggcggcaccgtacttcttgcacagcggcaggatggcggcaagtttttccggctcgccgttggtggagttgacgatgggcttgccgttgtacacccgcagaccccgcgccagcgcctccacgttggaggagtccagctgcaggggcaaactggtcacgctttgcagcgccttgaccacctgctccatcagcaccggctcgtctacgccgggtgcgcctacgttcacgtccaggatctgcgcaccggcctctgcctgactgacggcctgctccagcacatagttcatgtcgccttcccgcaatgcctgctggaagcgctttttgccggtggggttgatgcgctcgcccaccaccgtgatgccgtccaccgtgaccgtgtccaccggggtgcacagcaccgagggcatccggtgcgcgggacgccccggggtgcagcctgcaaaggtgccgttgagcagcttgatgaactccggggtggtgccgcagcagccgccggcagcaaacaggtgcagctcccggtagggcttcatctgcaaggcgaacagctgcggggtgatgtcgtagccgctgccgtccgcccggggcagaccggcgttgggcttgacgaacaccgggaagttgccgggcacggcctcggccagtcgctttgccatggggaagatctctttgggtcccagcgagcagttgatgcccacggcgtctgcccccaagccccgggcggtggcggcaaagctttccactgtgcagccggtaaaggtgcgcccgcccgcttcaaagctcatgcttgccagaatgggcaggcgggtgttttccttggcagccagcagggcggccttcaactcgtacaggtcggtgtaggtctcaaaaaagatcaggtctgccccggcggcttcgcctgccttgacgatgcgggcatactcagccacagcatcctcaaaggccagcgttccgctgggctccagcagctcgcccagcgggcctacgtccagcgcggtcagcgcaccgtagggcgcgcaggcgcgcttgcagttttcaatgcctgcggtgatgacctgctccagcgtgtaagcactgcctgccagcttgtgggcagaagcgccaaaggtgttggcgttgacgatgcggctgcccgccgcagcgtactgcccatggatgccctcgatgagcgccgggtcggtgatgttcagctcttccgggcgtgcacccagcttgagcccggcagcctgcagcatggtgcccatgccgccgtccagcaggatggtattgctctgtctgaaaagttcattcacttgcacaggtctttcccctctttctgtattcgcagcgggtgcgcagcacgcaatggccgcacccggccagttgtccttttaccgggtggtcgctgacccccagcagggcagtcacgctcttgcgcggggtcatcaggttggtgtcggtgacgcatagcccggccttgcgcaccgtgtccagcgccgctgccaccagcggctgcaccgcgatgtcccaatcgccgtagccgggcgaaaagcgcccggtcagatactttccctccgtggccgcccactggcgcagctgcgcctcggcagcatcggcggcctgctcggccagtgcgctgcccaaggcatcggaggctaccccggcggcaatatcgcccacgcctgcccggcggatctgggcatccaccccggggcccagcgtcaccgccagcagaatggcctgcccgcagccggtcaggtgcttgtgcacatcctcaccgggcagaagcccggcctcggtcagggcgggggtgtctgccagcagccacaccgcccggggcatcgccactgccagcagcggcaccgcgcacttttgcagcagcgccagcgtggcggcgtccggctcgccgtgcgcgccgaaataccgcgccgcctgtacaagatctacggcctgcggtttttctatcgccagcgggcggggcacaccgatcgccatggactacacctccttacttcgctcgaataaagtactattcagtataccgcacttgtgggcttttatcaatcccgcaaaaggggaggaaatagaaaaaggctgctctgtttttggaaaacggtcttgcagtgtgcgcagtttttgcacacattcggatttttaccggcagtttcacaagcaaaacaaaaacgcacgctgatccttaccgaatcaacgtgcgtttgcaggatcggagtggcgagactcgaactcgcggcctcctgctcccaaatcatggaatcgttgtattggaacgtttgagattatacagctttatatagaaacatcgttgttttattgtttctcgtttgcgctcgtgtttggcttacatcggtgaataaggcaaaaataaggcacattccagagggacaagacaaaagagaacggcccactagagcgcggtaaacgcttctgtgagccgcttttgttatgcgttggtcttttgcttgatacggtcaaaaacaacgtccatcgcgtcagaagcggccgcatccgctgatttgatgaactctgcgtaaatatctgttgtggtagaggtctgagcgtggccaagacgcccggcaaccgtcacaatgggcacatgggcggctatcatcaagcttgcataggtgtggcgcaggctgtgaaccgtgaccgccgggagatca

SEQ ID NO: 13797 - DNA, 52464 bp, Unknown
  gut microbiota DNA sequence
ctgtcacgtcttcaaaaatccccgtttgtagcagatctgtagcaaatcgcttcgatttaacgaattggcgatataaaaatcgaaaagtcatcatgcatcacacgcagggggtctggggttcgggtgcctttttgctcccgggatgtttgcctttgcgcaacagtccgggaaacaggcaaagacaggaaaaccgcgcagatcacgttcaataaacaaagaaatggctgctgcaccgggaagaaaccctgtgtagcagccatttttattatggtataagatcagtccttcttctcggcggtgcgggcaaagaagttggcgaggacggcgccggaaatgttatgccacaccgagaacacagcgccggggatggttgccagcggatactgtgcaaagtgggcagcggccagagaggtggccagaccggagttctgcataccgacctcgatggagatcgcgcggcacttggtggaatccagcttcagcagcttgcccacaccgaagccggtgaggtagcccagcaggttgtgcaggatgactacggcaaggatcagcaggccgctggtcatgatcttggcggagtttgcagaaacaacggcgcagatgatgagcacgatggcggtggtggagaccagcggcagcacgcggatggcgttctgagtgaaggcgtggaagaagtggttgaccacaaagcccagtgcgatgggcaccagcactactttgacgatggacaggaacatatttacagggttcacatccacgcgctggccggcatacagcagggtgagcaggggagtcaggatgggggccagcacggtggaaacggcagtcataccaacggacagtgcaacgtcgcccttggacagataggtcatcacgttagaggaggtgccgccggggcaggtacccacaaggatgacgccgatagccagctcggtgggcaggtggaacagctgcgtcagcgcccatgcaaggaagggcatcagggtgaactgcgcaatgcagccgatgatcacgtctttcgggcggctgaacaccaccttgaagtcctccggcttcagggtaagacccatgccgaacatgacgatgcccagcagggtgttgacccatgcggtctttaccacgctgaaggtgccggggaacagcagagacagtgccgccaccacaatgacgatggcggccatgtacttgcccacaaagtcgcttactttttccaatgttttcatgataaactctcctttttcctgaacacttatttttgcggatgcaaaggcaatgaaacatccggaaaatggctttcccgcaaacaaaaacgcctttgtcccttacggttcgtaagagacaaaggcgtataaactcctctgcggtaccactcttattgccggtgcaaagcccggcccctcagtgcgcatccaacaatgcgcggcccgtgataacgggggcctgccgttcccgcttactggggcgtagacaccgcccattcagccggaaagctcggagaggatcttcccacggacgccctgcactgccttgcaccagccggcagctctctgcggcattctttccgggtactctttctcgtcatagccgaatatttcactgccacggagtatactcccccggaggactgaagtcaagggatatgacccgtctgttttttcatctggttcatatcatgaatgaaagcagctcatgtgatgactgcctcggccagcttcgccgggcgtggatcctttataaaaaaggtgaagtgaccgctggccacttcacctttttgtgtctcgtgtatttttgctgttacaggatgcgcacccggatgacggcggggatgctgctcagcttctcgctcaggcgggcatccacggagccggtggcgtccagcatggtgtaggccatgttctttttgctcttgttcaccatgttttcgatgttcagaccggcctcggtagtcagggcggtgatctggctgatcatgcccggctcgttcttgtggatgatgcagatgcgcttaccgccggcgcggggctgatgcacctccggcaggttgaccgagtgggtaatgttgccgttgcgcaggtaatcgctcagctcctgcgccgccatgatggcgcagttgtcctcggcttccggggtggaagcaccaaggtgcggggtgcacacgatgccgggacggcccagaatggcctcagaggggaagtcggtcatgtagccggacaccttgccgttgtccatggcttccagcagggcggcggtgtttaccagttcgccgcgggcgtagttcaaaatcttgacgccgtccttgcacagggcaagggtctgggcgttgatggtgtccttggtggtgggcaggtagggcacatggatggtgatgtagtcgcacaggggcagcatatcgttcaggtttacgcagtggtgcacctgactgctcaggttccatgctgcttcaatggagatgtaggggtcgtagccgtagacttccatgcccagctcgatggcgcagtttgccacccgggagccgatggcacccagaccgatgacgccaagggtcttgcccttgatctcgttgcccacgaactgctttttgcccttttccacgctcttggccatggccgggtcaccggccagaccctgacaccactgggcggcggcggtcacgttgcggctgcctgcaatgagcatgccgatgaccagctccgccacggcattggcgttggcacccggggtgttgaacaccacgatgccctgctcgctgcagcgctccagcgggatattgttcacacccgcaccggcgcgggcgatagccagcagattgtcgttgaaggtggtgttcaaaaggtcggcgctgcgcaccagaataccgtccggggcgtcggcatccaccgtgacatcgaactggttcttgggcagctttgccagccccaccgggctgatggcgttgagcgttttgatggtgtacatatctgaaacccctctttatgcattctctttgcggaacttctccatgaagtccaccagcttgtccacgccctcggcaggcatggcgttatagatggaagcgcgcataccgcctaccagacggtgacccttcaggttcacaaagcccgcctcggcggcttcggcgcagaactttttgtccatgtccgggttggggctggtgaaggtgacgttcatggtgctgcggtagcggtgctccacagggttcgtgaagaactcctgcccgtccagatagtcgtacagcaccttggccttggcttcgttgatcttctgcatattggccagaccgccgatgtcgttttccagatacttcagcaccagaccggtcatgtagatgcaccagcacggcggggtgttgtacatgctgtccttcgccagcagggtggtgtagttcatcatggtgggtacgttatctgcggcgtgacccagcaggtcatcccggatgatggcaatggccataccggcgggggctacgttcttctgcacgccaaagtagatgcagccgtacttgctgacgtccaccggcttggaaaggatcatggagctcatatctgccaccagcggcacgccctccacctgcggcagctccacatactgggtgccgaagatggtgttgttctggcagatgtggatgtagctggcgtccttgtcgtagtcgatagcgtttacatccgggatataagtgaaatttttatccttactggatgctacgatcttggcctcgccgaacttggcggcctccttggcagccagacccgagaagttgccggacacgatgtagtccgccttgccggtggtcataaagttcagcggcaccatggcgaactgctgggtagcaccgccctgaaagaagcccaccttgtagttatcgggaatgttcatcacccggcgcagggaagcttcggtgtccttgatgatggcatcgaaccacttgctgcggtggctcatctccatcacgctctgaccactgtcgccgtattccagcagctcggcctgtgcctgccgcagcaccttttcgggcagcatgctggggcctgcgctgaagttatatactcgtgccataatgaacctctccttttcctgtgatacacctattacgcagcaccgccgtttttgcggtgcgtctgttactttccgtagccgtagtataccggttttcccatgctgaaaacaagagcatctttgcacaaagatatggcccctgcaccccgcctgagggcacaaagcatacaaatgtacgccgtgcggagacaaaatataagacaaatgtaaaagatatgtgctatcccttggtttcatgcggattttccactcttgcgcctttggcagaaatgcggtatactggaaatactaagacaaatgtaaaagaaaaacgaagcccaaactgtgaaagtgcgtttggagcggcccgcagagcttgtcggggcaaagcccctccatctgctaacgcagaccgctctgccgcttaaaagccccactggggctttcattgctacgctgcgctccgcaaacgcggtcactccaaacgcgaaataaaatagtcattccgctgaaaatggtcagagcgaagcggagaccattctaaatcgccccaccgcaaaaaacggtgactaaggggaattgaatcattcaaggaggtacaacagatgtacggcttaccagataccctgcggccgctttcggcggcggaagaacaggtgatgcttgcggtgtgggcgtgcccgggcgcggcggcgcggcgggacatcagccagaagctcaaggccaccggctgggcagcagccacggtgctgaattttctctaccggttggaggaaaaaggctgggtcaggtcggcaaaacagggcaactgcaacgtgtatgtgccgctggtcacccggcgggcttacggcgtgtactgtatgcggcagcggctggataccctgtttgacggcgaccttgccgccgccgtccatgcgctggtaagcgagagcggctgctcccagagcgccttggagcaggccatccaggtgttggaggagaagcatcaggagaccgaggagtacgatttgtacgacccctacggctgaattgtttcatatttttttacaaaatgttggttgacagcgaaatgtccgttctgtaatataaaagctattaaaaaatgagaaactgatatggacgaacaggaaaggagcagtcagacacatggatcatttgcagaatgtattaagctacttcgaccagcagcagcccctttgcgcagagcatgaccgcatccccaaggacctctaccgggagttcggggtcaaggccggtttacgcgacgagaccggcaagggcgtactggcaggtctgaccaacatctcggacatccgggcgttccagtatgtggacggggtcaagcacccggcagacggtcagctgctgtaccgcggctatgacgtaaaagacctcatcaacggcagccgcggcagccgctttgcctttgaggaggcgggatatctgctgctgtttggtcagctgcccaccccggagcagctggaacagttctgcgcggtgctgggcgagtgccgcaccatgcccaccaactttacccgcgatgtcattatgaaggcacccagccacgatatcatgaacagcatggcgcgcagcgtgctgacgctggcttcctacgaccccaaggcggcagatttggacaccgccaacgtgctgcgccagagcatccagctggcgggcatcttccccatgctggcggtatacagctaccacgcctataatcactacgaaaaagacgccagcatgtatatccaccgcccggaccccagcctttccaccgcagagaattttttgcggatgctgcggccggatatgcagtacaccccgctggaagcccgcgtactggacgtggcgctgctgctgcacgccgagcacggcggcggcaacaactccacctttaccacccgcgtggtcacctcctccggcaccgacacctactcggccatggcggcggcgctgtgctccctcaagggcccgcgccacggcggtgcaaacctgatggtcatgcacatgatgcagaacatccgggacaacctccacgaccttgaggacgacgaggagctggaagcctacctgaaaaaattgctccatggcgaggcctttgaccgcaagggtctgatctatggtatgggtcacgccgtctactccctcagcgacccgcgcgaggtggtgttcaagggctatgtggagcagcttgcccacgaaaagggccgggacaaggatctttccctctatacccgtatcgagcgcatggcaccccagctgatcgcgcaggagcgcaagatcttcaagggcgtcagccccaacgtggacttttacagcggctttgtgtacgagatgctgggcatccccatggagctgtacaccccgctgtttgctgtggcgcgcatcatgggctggagcgcccaccgcatcgaggagctgctcagcgccaacaagatcatccgcccggcctacaagagccttggcggcacccacgattatatcccgcgcagccagcgggcataaagggagggcatcagcatggaagagttacagcagcatcagggggaatggttcttcctccacgagctcaacgtggataaggtgttcagcaccatccagcgggcagattatctcatcctgtattatatcaaggtagagcaggaggcacaccccggcgaaaaactctatcttgccgaccttgccgccgtcatggggctgcgggtgaccgagctttccaagggcatcgagaagctgcaggacagcggttttgtgacgtggaaaaccgaccgcgaggccgggcgcacctatgtggagctttccagcaaggcggtggaactgatggcggaggagcaggcgcttttgcagcgctgctaccgccggatgcgcacggagcttggagacgaagagttgcgccgtgctgctgccaccatgcagcgcgccaccgctatcctgaaggaagagcgggagaaggagttcccggcagcgcagtaacgattatgaaagaaagataccggacagctttgtaggccgcccggtatctttctttttataaaaatatttttatttgatgcagcttgcgcagggggtatagcctgcggcaatggcttcgtcatagctggaaaagaggacctggttcttttccgcaggcaggttggcgcaggtgggcaggtggaactttttgctgttcacgttgccgatgtaagcttgctgcgcagtgctggaggacgacgggtcggtggggttcagctggctgtccggcacaaagcgctcggtgcccacggtgaagttctggccgtcgctgccaatggtgatggtgccctgcaggtcggtgcggtagacgtccacctttgcgtcccgcagaatgcttaacgtctcctcgtgggggtggccatacttgttgcccgtgccgcaggagatgacgcccatttccggcagaacagcgttcagaaacaggtagccggtgctggtgctggagccgtggtgccctacctgtaaaacatcggccttcaggttggcaccgctgttcacaaggtcggtctcggcggtattttccatgtcgccggtcagcagaaagctggtgctgccgtagtcgatgcgcagcaccagagaggtgttgttggtctcgctgtacccggtcaccgggcctagcagggtaacagtggcgctgcccagcggccagaccgtgcccacggagggcacttccagctgcaagccctgctgctgggtgtacttgacaaaatcattgaagcatttggtgctgctctcggtcaccgggctgtaagcgtgtcccgccgggaactttgccattacggcggcaagcccgcccacatgatcctcgtgggcgtgagagcagaacacatattgcagctgctccaccccctgcttttgcaggtaggagaccaccagactgccgtcgtccacgttgccgccgtcgtagagcatgaactgtccgtcacactccaccaatacgctcaacgcctgccctacgtcaatgaagtgcatctcaaagggctgacttgtcccggtggagggcttgacgatgtgtccgccgctgccgggcaggctgtcacaggcggtaagccccagcgccagcacagcggccagcgccagcgcagccagccgcaggaacaggcggcgggggaacagagttactttttcttctttccggttttccacgttgcgttctctttctgttgattattcttgggtttatggccgggcgcagagttgggcgcaaagcgtgcgcccgggctgggttgacggcctgccggggcggcggcgcgggcatttttgccggtactgcgtcccttctggctggggtgtacggtataggtgccatcgttgtggatggtcacctcggcgctctctgcccggcgggcggtgcgctgcacggcgcggcggccgacggcgggcaccagcagggggatcaggtcctcccggtgggtcagctgcaaagccttgaccaccttttcggcgttgcggggctcgtagtattgcagcagtgcgcgctgcaacgccttgccctcgggggtcttttccacaaataccggcttgagggtgtaggggtcaaggccggtatagaacatacaggtgctcacggtgccgggggtggggtagaagtcctgcacctgctccgggcgcatgtggttcttataaaggtactcggccagatagaccgcgtccttcagggtgctgcccgggtggctggacatgaggtagggcaccagatactgttttttgcccgccttcttgctcagctcgtagaacttatccttgaacttgttgaaggtctcgatgggcggcttgcccatgtaggcaagggtgttaggggcgcagtgctccggggcaacctttaactggccggacacatggtactccaccagctccttgaagaaggtatcatccgggtccgccatcaggtagtcgaaccggatgccgctgcggatgaacacctttttcacgcccggcagctcccgcacccggcgcagaattttaaggtagtcgctgtgatccacgatcatgtgggagcaggtggtgggggcaaggcagtgcttgccgccggtgcacatgccgcgcagcatctgctcgcggcaggaggggaagcggaagtttgcggtggggccgcccacatcgtggatatagcccttaaaatccggctcgtgggtcatgcgctcggcttcctccacgatgctgtcggcgctgcggctggtgacccgccgcccctgatgcagctggatggcgcagaagttgcagccgccgaagcagccgcggttctggataatggagaactgcacctcgcggatagcgggcacgccgcccatgctctcgtagatggggtggtagcggcgggtgtagggcagggcgtacaccttgtccagctctccgcgcaccagcggctttgcggggatgttctgcaccagatacttttcgctctgcttctgcacgatgatctggccgctgaccacgtcctgattgtccatctggatgcggcaggccttggcgtaggcggtcttatcgctggccacctttttaaaaccggcacactccacataccgctggggcaggtggtcgaaatcggtcaggtagcaggtgccgttcacgtccgtgatggtctccaccggctccccggcggccagacggcgggcgatctccacggtctggtgctcgcccatgccaaagctgatgagatccgcgccggagtcctcggcgatgctgggcagcacggtgtccagccagtaatcgtagtgggcaaaccgccgcaggctggcttccagaccgcctaagatcaccggcaggtcggggtaagcctgcttggcaagctttgtgtacacggtggcgctgcggtccgggcgggcaccggccttgccgccgggagagtattcatcctcggcgcggggaatttttgccacggaatagtggctgaccatgctgtccacattgccgccgccaatgaaaaagccgtacttgggcttgccgaaccgcttgaagtcctcgcagtcggtatagcggggctgtgccagcacgcccaccttgtagccctcggcctccagcaggcggctgatgatggcggtgccaaagctggggtggtccacataggcgtcaccgcccaccaccacaaaatccagctgttcccagccccgggcttccatgtccgcccggctgatgggaagaaattcggtgtagatctggggagtagaatgttccatagtgctcctttattattcctccggctggttcatctgcatttccagccactgctggcggctgatgagcacggcgcggggctttgcgccctcgtaggggccgatgatgctcttttgctccatctcgtccatgatgcgggcggcgcgggcgtagcccagcttgcagcggcgctgcagcaggctggtggaggcctgaccggcgtcgatgaccacatccacggcctgcttgaacatggggtcggagcctgcgtcctcctcggcgtcggcaccgccgccgccctttttgccgtcctgaatggcgtgcttttccatggcctcgatcatggcctcgtcgtactgcacggtggcgctggacttgataaagtccagcacacggctgatctcttcatcccgcacgaaggtgccctgaatacgggtgggcttgggtgcgcccacgggcataaagagcatatcgccctgacccagcagcttttctgcgccggcaccgtccagaatggtgcggctgtccacctgactggacaccgcaaaggcgatgcggctggggatgttggccttgatcaggccggtgatcacgtccacgctggggcgctgggtggcaacgatcaggtgcataccggcggcacgggctttctgggcgatgcggcagatggaatcctctacgtccttgcccaccaccatcatcaaatcggccaactcgtcgatgataatggcgatgtagggcatcttttccagctccggctgctcggcagccagcttgttgaaggacttgatatcgcgcacattgttctccgcaaacaggcggtagcggcgctccatctcctgcaccgcgctgcccagtgcaccggcggccttgcggggctcggtgacaacgggcatcagcaggtgggggatgccgttatactcggccagctccaccaccttggggtcgatgagcagcagcttcacgtcctccgggctggagcggaacagcaggctcatgatgatgctgttcacgcacacggatttaccgctgccggtgctgcccgcgatgagcaggtggggcatcttgcacaggtcggtcacctgcgctacaccggcaatgtccttgccaagggcgatgcccagcggcgaggtcatgcgcagaaagctctggctctcaaagatgctgcggatggaaacggcggtctttttgtggttgggcacctcgatgcccacggcgggcttgccggggatgggggcttccatacgcacgtccgccaccgcaaggttcagggcgatatcgtctgccagcgaggtgatgcggctgatcttcacacccgccatgggctgcagttcgtatcgggtaacagagggcccgcgggagatatccagcacccgggtgcgcacgccgaagctttccagcgtgtccaccagcttttgggcgttggccttcagctcctcctgtgcgccggggtcgctctcctcctgcgttttttcaaacagctcgatgggcgggtactggtattcgtagcggtccaccggctcggtctcctcggcgggtgcggtggcggctgcctgctcggagacagcgggcttttccatggccgctgccaccagcgagttgatgtctttttcctccaccggctcggcggtgatgctgatccagccgtcctcgtccggcgcagagcggaacgccacggcgttctcggcgctcacccggggcacggcgggctggataggcgcagcctccggctgcgtgggcatctgcggctgcaccaccggcgctgccggctggacgatgggcgtatcaaaagcgggggcaggctcttccggctggggggcatctttggcaaagaaatctgccgcagaggcgactaccgggtctgccacgatgggcggcggcgtgggcttggatgcagggcgcagcgggtcctgcccgaaggtgccgcccggcccgacgatcagcggctcaatgggctcgctgccgccctcggagagggcggtgtggtcggggccaaggtctacatcaaaggcggcgcggggatgggcaacgctgacccgcaccggggtgatgggcggcgcggcaggctccggctgggcaggggcggcgggcgcagcttcggtgtccgcagcgtctgcctccatctcctgcgttaccttgtgtccccagcgcagcacaccggacatccagtccggcacccctagatgcagcccggcaggctcgtcctcctcgtccagcggctcgtcctcgatttcgtcgtattcctcgtcgatctcccgctctgcctgccggatggcggcgcgctcggcgcggcgggcagagcgctgctctgcaaaggcagcgccgcgggcgtggataccgccggtgacggcacacagccagacccagacctcggcgggggtgatatcaaaaatgtacaggctgccgcacagcaagagcacgaccatgatgagatttgctgccggacgtccgcacagcaaaagcagcacgccgcccaacacaaagcccattgcgccgccggagagccatgcattgacgccgttggcgtagcaggcggaaagcatttgcagcgccgacagcccctgcggctggatatcggaaaacacgatgaccgtgccgcagacaaagataagccccagcaccagcttgaggatgcgggacagcagctcctcgccccgggtgtacaaaacggccagacagcacacggctgcacccagcacaaagctgccgcagccgaacagcccgaacagcacatcatggagcacccgccatacggaatcgccccgcacaaaggccagcaccatcagcagcaggccgccgaacagggtgccaagccctgccggaagccgctgctctgcctttttacggcgggcagcagtacgccgtttcgttgattttcgttttttcgttgccattctactctgttccccaacttcccatagacacaataattgattctattattgtaccacgcaagggcaaaaatggcaaaccataatgttgtttttcttgaggaaaatggaacgaacccagcccctctcgtgaaaaggcgtttggagcgctccgcaaagcgcgacaaacgcgaaataaaaaataatttttccgctgttcctgcgcaaagcgaacgcggagcgcagttcaaatcgtccggcggggagacgcaaggccttacccccgttcgatctccccgtacagccacgccagcgcgtccgaaagaccgcccagctcgtcgatgagcttttcctttacggcacggcgtccgtccagcaccgtgcccatgtccatgaccagttccccggtgtggagcatcagctgggtgtagcgcttttccggcatgccgctgtgggcggccacaaagccggtgatgcgctgctgcatctgctcaaagcagtgcatggtctgcgggacgcctaagatcagcccggagtgccgcaccgggtgcaccgtcatggtggcggtggggacgatgaagctgtgccgcgcgctgaccgccagcgggatgccgatggagtgcccgccgcccagcaccagcgtggcgctgggcttggagatgctggcgatcagttctgccagcgcaaggccggcctccacatcgccgcccaccgtgttcagcagcaccagcagcccctcgatgcgggggtcctcctgcaccgccaccagctgggggatgacgtgctcgtacttggtggtcttttgcccctgcggcgcttcggtgtgcccttcgatctggccgatgacggtcaggcagtggatgacatgaccgccccggctcagggtgaccgtgcccagatcctcaatatcctctttttccatccggtgctgctctgcgggggtgtcttttgccgtatccatgcgcgttctccttccgtagcagggtctttgtggggtcagtatcccccggctgccggggaagtatgcaggagagcgaatacaaaaaactttgtgaattttttgcttttttacaaataggtatttgacattcgcctttcatgctgtatactttaaataatataacaggataaaacggaacatctctctgcgcgcaaagaagccccttgcatggcggcagaagctgcagcgcgttgggcagaaaggagaattttgctatgaacaccccccagaaagcatcgatccctgtgatcaagcgtctccccaaatattaccggtatctgcgctccttgcaggccgatggcattaccagcatctcctcccgggagctggcctctcagatgggcaccaccgcctcgcaggtgcggcaggactttaactgcatcggtgacgtgaacggacggcagggcatcggctactcggtggagaacctgctttccattctggaaagtctgctgttcggcaacggcgaccgtctgcccaccattctgatcggctgcggccgcctgggcaaggctgtgagccgctttatcaccaccgacaccaacggctacaagctgatcgcggcctttgacgtggccgagaacgaggtaggcaaggagatcagcggtatccgcatccggcacattgacgagctggaggccttttgcgaggaaaacaagcccaaggtggcggtgctctgtgtaccccgtgatggtgcacagcaggtcagcggacggctggtggatctgggcatcgagggcttctggaacttctcccactatgacctgtcggtgtcgtaccccaatgtggtggtggaaaacgtccatctgggcgacagcctgatgagcttgggctaccgtctgcgcaatcaggagtgacggcatggcaaaattgtatttccgctacggtgccatgaacagcggcaagagcacggcgctgatgcaggtggcacacaactacgaagagcagggcatgaaggtgctcattttgaagccgcaggtggatactaagggcggcggagaactggtgagccgtctgggcgtgcgccgcaaggcagacctgctgatcccgccggagctggacgtgttcgaagctgtgcaggcggcaaacgctgcttccgggccgctggcctgtgtgctgtgcgacgagagccagttctttaccccggagcaggccgagcagctgttcatgatcacggtagatctgaacatcccggtgatctgctacggtctgcgggcagatttttccctcaagggcttcccgggttctacccgtctgctggagctggcgcacaccatcgaggagatgaagaccatctgcacctgcgggcgcaaggccatctgcaactgccgcaaggtgaacggacggttcgtctttgagggcgagcaggtagccatcgaccttgaaaacgatgtgcagtatgtcagcatgtgcccccagtgctacttcaaggcacggcgggcgttttacgctgcaaggaaaaactgagatacttttatgttgtatacaagccgctgtaccgcgccgggtgcagcggcttttttgcgtgatttgcggaaggggttccccgccagagtctccaacaggctgtatacagactgatatatcaatttgttgcattttgcgagaggaactgatatatcaaccgggcggaattcgcacgttttttgcactattgatatatcagttcggaccgggcagttactcgacggaggggagagggaatgggagaagaagagagcgacgggggacggcagagcacaaaaaattacaggcggaacggtaaatgtaacaggaattattgagatttttcctgttctgcccttgttgcatcccagatttttatgcaagtcattgaagtatacaagttgcacagtttttcagcgcaagtttattcatttcggcaaggacgtcgaattgcacgcgaaaacaagggcaatatttgtacgtttttatcccgtatcactgtaatttgcatctttcttttttcagtggcttttgttatcataattgtatacaagggggcatgtgcaggccccctacatgaagatgttttctattaggaggagaacaaaaatgagcaaggcaatttctcgtcgtaacttcctgatggctaccggcgctgtcggtgctgcaggtctgctggctgcctgcggcagcaagcccgctgcttcttccaccgcttcttccgctgcttctcaggcccccgctgcttccgcagacgagagcctggccctgtctgacggccccgtcaacctgagcatcagctggtggggcggcgacagccgtcacgctgcttaccagagcgctctggaggctttccaggctgagcactccaacatcaccgtggagcccaccttcgccgcatggtccggctgggaagagaagatggctgctgccttcatcgcaggcaacgctcaggatgtctgccaggtgaactggaactggctgtacaactactctgccgacggcagcaagttcgtggatctgaacaccacctccaagttcatcgacctgacccagtgggattccgctgctatggacgcttgctatgtggccaacagccagcagtgcgtgcccgtctccatgaccggccgtatcttctactggaacatgaccacctttaataaggctggcatcaccgaggtccccaagtctctggacgatctgatggctgccggtaaggctttccaggagaagctgggcgacgattactaccccatgcacctgggcgcatacgaccgtatgatcctgatggtgttctacctcgagtccaagtacggcaaggactgggcagatcccgttacctccaccctgaactacaccgaggacgagatcgctgagggtctggccttcatcaagagcctggtggacaaccacgtcatgatgaacctgaagacctactactctgcaaactccgataccgctacccaccagtccaacgagtggatcaccggtaagatcgcaggcatcttcgagtgggattccgctgcaagcaagtactcttccgctctggacgacagcaacaaggacggcttcaccgtcggcgaggagatcaagttcggcgataacaacggcggcttctccaaggtgtccatgggtctggctatcaccaagacctgcaagaacgttgccgaggctgctaccctgatcaacttcctgctgaacgaggaaaagggcgcttccatcatgggttctgagtgcggcatccccgcttccaaggctggcctgaagttcgctcaggacgccggcgctgtcaaggacctggttgctgaggcaaacgccaaggtcatggctttcaccaccaacaagctggatcccctgttcgagaacaacgacctgaaggcttccggcaccggcatctatcaggaagtgttcgataacatcgactacggcgatcagacccctgaagaggctgtcgagactctgctggacggcatggagtctgtcggctacaccatcggctaagcttacctctctctgacagcggtcagaaccggatattcagtatctgaaataaataagggcatctgccgcccgtacgacaggtgcccttgttttatcggagaatggttatcaaaccttgaaagaattgttaccggtctgtgacctgctgcactgtctgcttcaaatcctgtaaaaggaggatttcggatgaaaaaaagtaatgcgcccgccggcgcacgaactccgttccagaaatgggtcgataagtatcagggtctgttttatctgattccctggatcatcggctttctcgtctttaaggcgtttcccttcggtcagtcgctgtactacagcttcaccgatatgaacttcttcaaggacggcaccagctttgttggtctggccaactacattaccgcattccacaccagaaagatcaccaaggcgctgatcatcaccttcaagtacgcctttatcaccgtgcccctgaagctgatcttcgcactgttcatcgcctacatcctgaacttcaagatcgcctgcgtgaacctgttccgcaccgtgtactacatcccctccattctgggcggctctgtggctatcgccgtgctgtggaaggctgtgttcagcgtggacggtctgctgaacaccgtggtgcgcgctgtcacctttggtgcggtgcagggccccgagtggctgagtgaccccaactacgcgctgtggatcatctgctttttgcgtatatggcagttcggctccgccatggtgctgttccttgctgcactgaagggcgtgcccgcagacctgtacgaggctgctaccatcgacggtgccggcaagtggcgtcagttcttctccatcaccgttccgatgatcacccccatcatcttctacaacctggtcactcagatctgccaggctttccaggagttcaacggcccctacatcatcaccaacggtggtccccgtggttccactaccctgatctccctgctggtttacaactacgcattcaagtcctacgacatgggcatggcttctgctctggcatggatcatgttcatcatcgtctgcatcctgacgatcattgcgttcaccagccagaagaagtgggtctactactcggatgaaaggtaaggtgaccaatatgggaatgaaagcatcgaataagatcgcaaccttctttaagtacttcgtgctgatcctggttggtgtcatcatgatctatcctctgctgtggatgatcagcgctaccttcaaggataacagcgagatctttgcaggcatcagcctgtggatcaaaaagcctacgctggatggataccgcaacgccctgaacaacttcggcggctccatcaacatcctgcaggccatgctcaacacttacagctatgtcatccccaaggtgatctgcactgtggtgtctgcctgtattgccgcttacggctttggccgtttcgacttccccggccgcaagctgctgttcaacatcatgctggccaccctgttcctgccgcaggtcgtgctgaacgtgccccagtacctgctgtacaacaagttcggctgggtggacagccccttctatctggccatctgggtgcactgcgcatttgctaccgagacctacttcgtgtatcagctggtgcagttcatgcgcaacgtcccgcgtgatctggacgaggctgccgccattgacggctgctcctctttccagactctgtacaaggtcatcgtgcccatgctgggacccgctctggtgtcctgcgcactgttccagttcatgtggagctgcaacgactttatgggcccgctgctttacgtcagcacccccggcaagtaccccatgtccctgttcgtcaagctgtctatggacggtgataccggctttgcatggaacaagatccttgcgctgtccctcatctccatcctgccgcagctgatcgtattcttctgtgcacaggatcagttcgttgaaggtatctccgcaggtgccgtcaagggctaatgcgccataagaacatctgaccaagaccaacaccccctgtgctgctcccaacggatggcacagggggtgttttggttgatacatcatttcgtctgcttcttgcggtactgcaaaggactgatatccatcacctcgcggaacacgcggcggaagtgggcggcgctggcaaaaccggtctgctcggcaatagcgctgatggaaagctcggtggtctccagcagcttctgcgcagcctcgatgcggcggttgttcaggtagtccacgatggactgtccggtcacccgccggaacaggcggctgagatagtagggggaaaggtagaaccgcgccgccacctcggtaagggagaacttttgccggtagttggcggcaaggtaggcacacacctgctcaatggtctcgttgcgggggcgcgctgcggcgctgctctcggcaaggcactcctgctcgacatagtgcaggatgagcagcaggtacagcccgccggggtagtcctgctccggcatggcagcgcgcatcatctccagcagggtgcgcaggcggcgaacccacggcaccgggccgtacagcaccgttgcctcgccgggcaaaaacagccgggcaaaatcccgctgggtggcgctgcgcagctcgtgcagggcgctgagcgggaaccgacagcccaccagttccggtacggctgcaccggcggcagagagcactgcatcccccgcgcccagcagcagcgcgctgccggggttcagcagcaggctgttttcccccatttgcagggtgcagctgccctcgcttaccagcagaaaggtgcacgtctcctcgtctgccgtcagctccagcttgctgccgttcagccgcacggtgtccgcttttacctttgcatggatcttttcccgttccgctttcatcttgcgcatcctttccggaaacagccctcccggtagccgggagagcgcttttcctcatgataccacgtctgccccgtgggggcaagacaaactcacaggaggttatttcgcatgaatctgaccctgatccgttccatgacccgcagcgccgtttttgagctggaaaacgagctgtgctaccgtccggcacacccctttaccgttgccctgaacggcaaaacggtgtatgaggcctgcaacaccaacgtgttctccctgttctccctgctgcctggcaccacctatacggtggaggtgcaggccgagggcgagaccctgaagctggatttcaccaccgaggccgagaccttctttgtggatgctgcccgctatggtctggtggctgacggcgagaccgacaacaccgtgcggctgcaggcggcactgtccacctgccccaagggcggcacggtgtatgtgcccgccggccgttaccgcaccgccagcctgttcatgaagagcaacaccaccctgtatctggaaaagggcgcggtgctgctgggcgacaacgaccgcacccattaccccatcctgcccggcgtgctgcccagcgagaacgaggtggacgagtactatctgaccggctgggagggcaacccgctggacagctttgcaggtcttttgaacatcacgcaggtgcatgacgtggtggtgaccggcgagggcacgctggactgcgatgccgaaaacggcgactggtgggtgaaccccaaggtcaagcgcatcgcatggcgtccccgggccgtggctgcggtggacagcgagaacgtctgcctgcacggcatcacggtgcagaacagctattcgtggaccatccaccccatctatgtaaagcacctcgacctgctcaacttcaacatcaacaacccctacaacgcccccaacacggacggcatcgaccccgagagttgcgagtatatccgcatcatcggcatgaacatccatgtgggcgacgactgcatcgccatgaaggccagcaaggtctttctgggcatgaagctgaagcgcagctgtgagcataccgtcatccgcaactgcctgctggacaagggtcacggcggcatcgtcatcggcagcgagatgagcggcggcgtgaaggacatggtggtgacccagtgcctgatggaccacaccgaccgcggtctgcgcgtcaagacccgccggggccgcggcaacaccgccgtcattgacgggctggtgttccgcaacgtggagatgcggggcgtcaaggcaccctttgtcatcaatatgttctacttctgcgacccggacggccacggcccctatgtacagtgccgcgagccgatgccggtggacgagtacacccccaagctgggcagcctgaccatggagaacatcgtggctaccgatgcccagtttgcgggctgctatttcgatggcctgccggaacagcccattgagcgggtgaccatgcgggatgtgagcatcacctttgaccccaacgccaaggagggacaggcggccatggccgacaaccgtccgctggtgaaaaagctggcgatctatgccgagaacgtcaaggagatcgacctgcacaacgtgaagatcgagggctacgagggcgagcggctgcactttgccaacgtaggacattttgaggaggactgacccatgacccatgaagagatcctgtccatgctgggcgactatgtggactacctgatcgccaattccagcgccgaggcaccgatgtggaacatcgagaaggtgcgcagcggcaaaccaaacaagtggaactacatcgacggctgcatgatcaccgcctgcctgagcctgtacaagaccaccggcgacgagaagtatctggaattctccaaggagttcatcgactactttgtgcagccggacggctccatcaagacctacgaccccaaggagtacaatctggacaacgtgaatcagggcaagaacctgttcattctgtatgatatctacggggacgagaagtaccgcaaggccatcgacaccatccgcagccagctgctcacccagccccgcaccaaggagggcaacttctggcacaaggacatctacccgtggcaggtgtggctggacggcacctatatggcgcagcccttctacatggagtacgagacccgctttaacaagatgcagggctgcatcgacagctacaagcagttcatgaacatcaaaaagcacatgcgggacgaaaagaccggcctgtactaccacggctacgacgagagccgccagatgtactgggcagaccccgagaccggctgcagccccaacttctggctgcgcgccatgggctggttccttgtggcaatggtggatgtgctggagcgcatggacgagcagctgtacaacgagtatcgcggcatcatggccatgctcaagcaggctgtggaggatatgcacaagttccaggacgagcagagcgggatgttctggcaggtcatcgaccacccggaggccgagggcaactatctggagaccagcggcaccgccctgtttgcctacgccgtgctcaagggcgtgcgtctgggctatctgcccaaacgcatggctgcatgggcggagaaggccttctacggcacctgcgaccggtatctgtccaagaacccggacggcagcttgcagctggacggcatctgccttgtggcgggtctgggcggcaaggatcaccgtgacggttctctggcctactacttcagcgagccggtggtctgcaatgacgccaagggcgtaggcccgctggtgctggcttataccgaaatgatcgcacggaagtaaccaaaaacgggatacagcaaggctgagcagctgcaaaaaaagtggctgctcagcctttttgcgtgtcttttttgtccccttgcataaaccgcccgccgctgtcccacactaagcccagaaaagttcccgtacacaaaacgaacagatgggagtaacaagcatggagcagatcaaaaaatttctgcacggcaagggctttgctctgctgctgaccgcaagcctgctggctgcggctgcggcaggggtgtgggcggtgcgcgccctgcgggcagaactgcaaaaaagtctggatggactaaacgcccccggcaccacccaacagaccaccccggaaacagaaccggactgggacgcacaggaggacaccacatggcagcagcccgtgaccgacgttgcaaacagcaaggcagatgtgccgcagcagacgccctctggggcatcctctggtgcgcagtctggctctggttcgctgcgcgaaccctcggcactgcaaggcgcatcctcgcctgccagcagttcggcgcagcctgccgccgcgccctctatgccggggcgcgtgctcaacgccttcagtggtgaggagctggtgtataacaagacgctgggcgactggcgcacccacaacggcgtggactacgcctgcacgcagggcactgcggtggcggcacccgtggcgggcaaggtggtgtctaccggggcagagggcaactggggcaccgtggtggtgctggaggatgccgctggccgcagttggcggttgtgcggtgtggctgaccctgccgtaaaagccggagataccgtagccgccgggcagaagctgggcacggtgggcactgtcggctgcgagtgcgccgaggagagccacatccatgtggaggtaaagcagggcgaaagctacctcgacccggcaaagctgccggagtaagcaaaccataaaaggggctgcagcagcggctccttttttgctgcgtcagacggtacggcgcgtttgcagcagccagagaaccagcgccgaaagcaccccggctgccagcagtacatctgcggggtgtgcggcccagtgctggaaggcactgccataggctgcctgcccgatgggctgggtcaggcaggccagcacggtgcaacaggcggtagttttgcccagctgtgcctgcggcaccagcacttgcagctgcgcaaagaaccatacattgaacagcgctgccacggccataaacacggcccccagcaccagaatgctgccgaactgcagcactgacacccggagggcaagccccagcgcggcgcacacgccgctgagcgccagcaaaagaggtgtgccgctgcggatgggatgacggacaaagacggttccggccagcacgccgcccagaatgccgcctgcgctcagcaccgcctgcacaagaccaagggaggcatcacttttctgcagggtctgtaccaccagcaccggaacacctacggtgagggcgggaacttccagcaggtttacagccgccatggcggcggctaattgcagcaccgcagcctgcccggtgaggaactgcgcgctttcccgcaggtcggcccacagagagcggacggagagctttgtgtcatatgggacatcctgtgggatgcgcagacagagctccatcccggcagaaagtgcaaagcagcagccgcagagcaccagcagaccccggatgccgaggtgctccagcagaacagcacccagcaggggaccgagaagctcgtccacggtatccaccagttggatgactgcattgccgcgcagcagctgggtgccgttcagtagcagaggcaggcaggcgcgtactacgggctggtaaagcccctgcatggcgtacagactgcccagcacggtcaggaccagcggaagcaggggcagatgcggcagtccggcagcgactgcagccgcaataccggcggtcaccagatccagcagtgccatcaggctggctttacggcagcggtctgccagcgcgccgccggtcagcattccagcaagggcgggcagcatggccagagcggtgatgccgccgtacagcgcggcagaaccagtctgccgcagcagatacagcggcagcgcaaaccgcagggcggcattgccgaacagggagacgatctgtccgaggacgataaggacaaaagtgttcatggaaacctcctgcttttttatttacagactgttggtctgtatttacatacaaaaaaaggcggagcgttccgcccgggaaattcagtctttgaccggtgtgcacagctgcaccagctgttcggcctgtgcatccgtcaaaagatccagcccaagtgcatgggtcatttgctgaaacacgacgttccgcgcccgttgctcggtcggtgtggtggggcgcgtctggggagaaagccagatgtctgccagcacgaacagcgcttcggccagcgcattggcatcggtggtgtggatggagccgtccgccatgccctgccggatcatgggtgcaatacactccggggccagatgcgcttcaatgttggtcagctccatggcaaggaactgcgggttgctgcacaggtgcggcaaagtctgcgcgatctgctgctgccgctgcccggcaaaggaaactgcaaacaccgcctgcagcttctgcagcccggtcagggccggatcgtcccggatatggcgcagcggctcccacatttggtcgcccagacggtcaccaacgcgctgcgcgatctcctccttggagcggaagtgatggtacaccgcccctttggaaagctttgtggcatcaatgatgtcctgcagggtggtattctggtagcccttctggaggaagagcagggcggcggcgtccaggatcttttccacagtctgttccgggtatttgttgcgcggcatggcggatgctcctttttacaaactaacggtctgtaaaaagaatacagcagcccggcggctttgtcaagagggtgtggaaccgaaaatccattcatttcctgcggcgctgcattgcttttgcgcggggtttctggtatgatacaatagagttaaaaggcgattttgggaggatgacagatggcaagggttttgatcgtgggagccggggcagccggactgatggcggcgggtgctgccgtgcggcagggacatcaggtaacggtgctggagcataccgagaagcccgggcagaagatccttgtcaccggcaaggggcgctgcaacgtgaccaacgactgcccggcagaggagtttttgcgccatgtgcgcacgaacccgcgctttttgtactcctcactgggggcgttccccccggcaaagaccatggaactgttcgaaggccttggcgtggagctgaaggtggagcgcggccgtcgggtgttcccggtatcggataaggccgaggagatccggcaggcattgctgcgctatgcgcaggacgccgatatcgtctacgatggcgcaaaaaagctgctgctggaggacatcgtgccggaggcagagcccgccccggcgtcagcggaaaacccgcgccatcccaaaaagaaaaaagcaggcccggcgctgcgctgcgtaggcgtgcggggcacttccggccgggagtaccgggcagacgctgtgctggtggctaccggcggcgtgagctaccccaccaccggctctaccggcgacggctacaagctggcgcagcaggcgggacacacccttgtggagccggtgcccagtctggtcagccttgtcagccgggacccggactgcaaaaagatgatgggtctggcgctgaaaaacgtcaccctgaccctgctggaggacggcaaagccatctttgacgagcagggcgagatgctgttcacccactttggcatcagcgggccgctgaccctgagcgcatccagccatctgggggatatgaaaaagcacaggtacatcgcggagatcgacctgaagcccgccctgagcgaggagcagctgtacgaccgcatcacccgggactttgccctgctggcaaaccacgcggcgcagggtgcgctggtcaagctgctgccttccagtatgcagccggtcatggtggcgcgctggggcatcgaccccgccaccaaggcaaaccagatcacccgggagcagaagcgggagctggtgcagctgatcaagcactggcaggtgcccattgacgcccggggcgaccttgcccacgcagtcatcaccagcggcggcgtatcggtgcgggaggtagaccccaagaccatgcagagcaaaaaggcgctgggactgtactttgcgggcgaggtgctggacgtggacgcctacaccggcggctacaatctgcagatcgctttctgcaccgcacaaagctttgcgaataacctgtaaaaacagcgcagccaatttcctgtgtactatatataaataaggagaacatatcatggtatctgttgcaattgatgggcctgcgggtgcaggcaaatccactctggcacgccgtctggcggcagagctgggctatatctatgtggacaccggtgcaatgtaccgcgccatcggcctgtacgccctgcgcgcgggcaaggaccccaaggacaacgcagcggtggatgctctgctgccccagatcgagctgcggctggcctccattgcgggcgagcagcacatttacttaaaggacgaggatgtgagtgccgccatccgcaccgaagccgcgggcatggcggcctctgccgtgggcgcaaaccccgcggtgcgggcatttctgctggacttgcagcgcagcatggcaaaaaagcaggatgtgctgatggacggccgggatatcggcacggtggtgctgccggacgctacggtgaagatcttcctgaccgccagcccggaggcacgcgccacccgccgctggaaggagtatcaggccaagggcatcgacaccccctacgaggaagtgctggcagatgtgaagcagcgggactatcaggatacccaccgcgccgccgctccgctgaaacaggcagaggacgccgtgctgctggatacctcggcgctggattttgagcagagccttgacgctatgaagcagattattgccaaaaagatcggcggataaaacaaacaggacaggaatagaaaatggtactatattatattctggtgccccttgcgtggcttgtgtggcacatcggtttccgcatccgggtggaggggcgtgaaaacctgaaaaaggtgcagacgaagggttatatccttgcgcccacccatgtgtctgccatcgacccggtgttcatcgttgtcacccggtggggcaggcggatggtggtgttcgccaaaaaggagttgttcgagatcaacgccttcctgacgtggttcttccgctgctgcggcggcgtgtgcgtccgcggcaccaaggacgagatggcggtcatctctcagacggtggaggcctgcaaacagggcaagaccctgctcatcttcccggagggcacccgcgaaaaggagggcaagcttctgccccccaagagcggcctgttcgtcattgccgccgaggcaggggtggacgttgtgccctgccgcatcctgtacgacaccccggacggaagaatgcacctgttctgcaaagtgcgggtgatctacggcgagccgatgcccgcagcgcagtttgccatggagggccgccgggacaccaaaaagctccgtgccaacaagcaggcgctgctggaagcatgggaaaaaatgggggcgtaagagatggagatccgtttggcgaaaacggcggggttctgctttggcgtgaaccgtgccgtggaactgacctacggcctgctggccgaggggcataaggtggcaacgctgggtccgctgatccacaacccgcaggcggtggaggatatgcggcgcaagggcgcacaggtagtggacaccgtgcaggatgtgcccgccgggtgcgaggtggtcatccgcagccacggggtgccccgcagcgtttacgatgaactggaagcgcgcggcatcccgtaccatgacgccacctgcccctttgtgcagaagatccagcgcattgccgcgcaggccgaaaaagagggtgcggtgctgctggtggcgggggataagacccacccggaggtgcagggcattgtgggacacacccggggcgaggtgttcgtttttgccgatttagccgagttagaggcgtggaacggcccttctgacccccaaaaacccctttttgcagttgcacagaccacatttcaggttacaaaatggaaagaaagttcggagtttctcaaaaaagcctatacaaacgcccgaatttttgatacaatatgtaatgcgacgtgggcgaggcaacaggaagcggaagacctcagccaaaaatgcgacattgttgttgtcattggcggtcatcattcttccaatacccaaaagctggtacaggtcgccgcaaaacacacgcgtgccgtaacggtcgaaacagcgagcgaacttcggccggaatggtttgcagatgttaaagtggcgggcgtgacagccggggcttcaacgccatcgtctattattgaggaggtacttaacagtatgagcgcagaaatcaatgacaacatgagctttgaggagatgctgaacgcatccgaagaaaagcgagttcatgcaggcagtattgtgaaaggaatcgtgaccagcatctctgccaacgagatccaggtggatatcggtgcgaagcagaccggctttgtcaagctgagcgagctgaccgatgattcctccgccaaggtcgaagacctggtgaaggttggcgatgagctggacctcatcgtcgagaaggttatggatcaggatggcgtcatccagctctcccgcaagaagctcgcatctcgcaagggcatggaagagatcgccaaggcagcagaatccggtgaagtcgtcgagggcgatgttaccgagttcaataagggcggcgttgtcgtcaacgtcaagggcgtcaaggtgttcgttccccgttctcaggccactatgcgccgcgacgaggactacactgctctggtcggccagcacgttcagctggtcgtcaccgagtgctccggccgcaagatcgtgggcagcatcaacaaggtgaccgctgagcagaacaaggctaagcgcgaggagttctgggcaaacgttgaggtgggcaagacctacaccggcgttgtcaagagcctgacctcttatggtgcattcgttgacatcggtggtgttgacggcctgtgccacatcagcgagctgagctggaaccgcatcaagcacccctccgaggtcgtctccgttggtgacaccatcgaagtgtatgtcaaggatatcgacaccgagaaccacaaggtttctctgggctacaagaagtccgaggacaacccctgggagcagctgaagaacaactaccccatcggcagcaccttccacgctccggtcgtttctctgaccaagtttggtgcattcgtccgcatcctgccgggtgttgacggtctggtccacatcagcgagatcagcaatgaccgcgttgagaaggtctctgacgcactgaaggtcggcgatatggtcgatgtgaagctgctggatgttgacttcgacaagaagcgcatcagcctgtccatgaaggctctgctgaacgacgacgctgagtaatcagcccttcgtgcaaaagcatagcttctgacacaatgcgatctgcagccccgttgccgggaaaacggcggcggggctgtttttgttaacaaagccatgataaaattcttcaaaaagcactgggaagtgcttagttatctgatcttcggcgtgctgaccaccctgctgaatattgtgctgtatgcgctgttcagccggctgttcggctacaccgccgccaacagctggggcaatgtgctggataatgctttgtgcatcctgtttgcctactgcaccaaccgggcgttcgtgttccgcagcaagaccaccggcaaagccatggccaaggagttcggcacctttgtcacctgccgtctgggcaccatggtgctggatgccgctatcatgatcgtgggcggcaatctgctggctgcgcagggcgcggcgctgatggacggtctgatcggacattttatcccgtccggggtaagctataccggcgcggcggcttcggcagcagcatcggcagcgggtgttgtcatcattggcggtgcagacggccctacggcgatttttgtcagctataacgcgcaggagctgtggggtctgtgcgtcaaggtattctccaacgtggtggtcgtggtgctgaactatgtgttcagtaagctgatcatctttaagaaaaagtaagcaagaccctcctcggtagcgccggagaaggttttcaaatcaatcatcttaggaggtacggtattatgaaacgtggtctgaaagggttcgcattcctggtttctggtctggtgctgggcatcattggtgcaacggcatcggtgactgcgatcgcactgagcgctgtgggcatggcaaaggtgcgccgtgccagcaagtaaaacaacggaggaacgaacatgaaccgcgaagagatcctgtcccatgtcgatcataccctgctgaagccggaggccacttggccccagatccagcagctgtgtgacgaagccattgcaaaccacaccgcatccgtctgcatcaacacttgctacgtcaagcaggctgtggagtatatggcgggccgcatccccgtgtgctgcgtggtgggcttccctctgggtgccatggataccgccagcaaggcctttgaagccaagactgccatcgccaacggcgcagccgaggtggacatggtcatcaacatcggccgcctgaagaacaaggagtacgatgctgtccgcgaggacatccgtgccgtgaagcaggctgtgggcgataagattctgaaggtcatcattgagacctgcctgctgaccgaggaagaaaaggaaaagatgtgcgacatcgtctgcgaggccggtgccgactacatcaagaccagcaccggcttctctaccgcaggtgcaaacttccatgatgtggagctgatggtcaagggcgtgcgtggccgctgcaaggtcaaggctgccggcggcatttccaccgtggaggatatggagactttccttgcactgggcgctgaccgtctgggtacctcccgcgctgtcaagatcctgaacggcgagcaggcaaagggctattaagttttctgcaaaaaatgtatttcggcaaagctctgggcttggctgaactgcaaaggatgatctctcaagggctgctgcacaaattgctgtgcagcggccttttttgcgcccaagccttgcaagcagagtgtagcagggtgtataatataaataggtattgtataaaataggggctgctcgctttatggggcaaggcgggcagaggaggaaatgcaatgaatatacccgagatccttgtggccaatggcacaggggcggtgctggtaagctttctgcttttattgcgggtgcgcggcgagagtaaaaacagcgtgggaacagagctgttttgccggattctggtggtgacgctgctggcacaggccacagagacgatcagctttctgctggacggcgtgcccggcgcggcaagccggttctggctgtacctgaccaacaccgtctgcaccggcgctaccgtgtgcgtgggctatgcgtggtgtttgtatgtggacttccgggtctaccgcagcattggacgcctgcgcagaaggcatctgctactgggtgcgccgctgctggcgcttttggtgctgctggtggcaaacctttttggcacggggtggatcttttccatttcggcggacaacgtttaccatcggggcccactgaacattttgctgtatctgctgctgttcggctattatgccgagagcgtgtggcaggtgcataaggccaagcacgatggcattacggtggagttttttccggtgtactacttcgtggtcacctgtgcggtgggcacgctgctgcagggcgcattctacggtatggcctttggctggctgtcggtagctatcgcctttgtgttcgtggacagccagacccgcagcctgcgcggctataccgatgaactgtccggcctgtttgggcgcaagtacatgaactactgtctggaccgcatccacgccacacaggagaaggacgtttacggcatcatgatggacgtgaactgcttcaaggagatcaacgacacctacggtcacgccgagggcgaccgcgccattcaggagatcgggcacatcctgtccggggcgctggtggcaaactcggtagccatccgcatgagcggcgatgagttcatggtgctgatccgtcacggctcggaggagctgctggacgagatctgcaccgccatcgagcagcgggtgcagcactataacgccaccgctccggcgggcagctttcagctgtccttctccaccggtgtggcaaagtacgagggcggcagcgtggagaagtttctggtggagctggatcagcggatgtatgcggaaaagcgcgctttccacgccgcccgggacggccatgccgcaccggagcagggaaatgctccatcaatttaaaaggaatgtctaaaataagtgcgacttatcttgacaatctgacgctgcaatgatagaatatgtggcgtaccaattgaataccgacttatcaagagcggctgaggggacaggccctgtgaagcccgacaacctgcgcgagagcgtaaggtgccaaatcctgcgggaaaccggaagataagagtgcaacgctcagagctttcggctctgggcgcttttatttttcagaacaaacttgatggaatggtaaatacacgcaactgcaacatttaggaggcaaaaaatggctagacacctgtttacttcggagtccgtcaccgagggacatcccgacaaaatctgcgaccagatctctgatgcaattctggacgagatcctgacccacgaccccaacgcccgcgtggcctgcgagacctgcgcatccaccggccttgtgcacattatgggcgagatcaccaccagctgctatgtggacttccagaaggtcgtccgcgaggtggtggcagatatcggctacacccgcgcaaagttcggctttgacgccgacacctgcgccgtcatctccaacattgacggccagagccccgatattgcactgggcaccaacgatcaggtgggcggtgcaggcgatcagggcatgatgttcggttatgcctgcgacgagacccccgagctgatgcccatgcccatcagccttgcccacaagctggcaaagcgcctgactgaagtgcgcaagagtggcgagatggattacctgcgcccggacggcaagagtcaggtgaccgtggagtacgacgagaacaacaagcccgtgcgcgtggacgccgtggtcatctccagccagcacagcgagagcgtgagcatggagcagctgcgggcagacgtgatggaaaaggtcatcaaggccaccatccccgccgagctgctggacgagaacaccaagtactacatcaaccccaccggccgctttgttgtgggcggcccgcagggcgataccggcctgaccggccgtaagatcatcgtggacacctacggcggctatgcacgccacggcggcggtgccttctccggcaaggaccccagcaaggtggaccgcagcgcagcctacgctacccgctgggtggctaagaacatcgtggctgcgggtctggcaaagcagtgcgaggtgcaggtggcctacgccatcggcgtggcaaagcctgtgtccatcatggtggataccttcggcaccggcacggtggcagacgagaagatcgagcaggctgtggagaaggtgtttgacctgacccccgccgccatcatccgtgacctcgacctgcgcaagcccatctaccgccagctggccgcctatggccacatgggccgcgaggatctgggcgtgaagtgggagaacaccgaccgcgtggatgccctgaaggctgccgtggctgccctgtaaaaagcgttttaccctgatagaaggtaagtgaagagaagagccgctgcacccgaccgtgcagcggctcttttgcgttacagggaaaagaaaatggtacggcaaaaagtattacttttcatcaaaaatcagataaactttgcgaaacggtaaagatttggtcgcgtttttgtaagaaactcacattctcttgaaggaaaaggaaaaacagctgtgcaaggcgcagaaaatccacacatgaaacaaattgatatggaacaatcgacaaaatgtgataaaataaaaccagatatgcgcacttgtgtgcatggtacggatggtaaacagcaataaggagttatgtgactatgtctattgaaatttcccctaagtccttctttgagcagcccagtgtggcggatatgcggctgatcgcctgccccggtgccgaggagctgaccggcctgatcgacaagcaccttgtccgttgggcaaaggctgccggaattgaaaaagacaccttcattatttcctgcgactgcccccgcttccagagcggcgacgccaagggtctggtcaaggagtctgtccgcggcgacgatatctttatcgtggtggacccgggcaattacagcgtcacctacaagctgttcaactacgagaaccacatgtccccggacgaccactttgcaaacctgaagcgtctgatccaggctgtggccggtaaggcacaccgcgtttccgtcatcatgcccagcctgtacggcggccgtcagcaccgccgcgtggtgcgcgagagcttggactgcgctgtggccctgcaggagctgcagaccatgggcgtgcgcaacatcatcacctttgacgcacacgacccccgcgtgcagaacgcagtgcccctgatgagctttgataacgccatgcccacctatcaggtgctcaagagcctgctgaagaaggaccccaccctgtccttcgacaaggagaagttcaccgtggtcagtccggacgagggcgcgatgaaccgcaatatgtacttctccagcgtgctgggctgcaacctcggcatgttctacaagcgccgcgattacacccgcgtggtgaacggccgcaaccccatcgttgcccatgagtatctgggcgagagcgtggagggcaagaccgtctttatcgcggacgatatcattgcttccggcgagagcatgctggaggttgccagcaacctgaaggagcgcggcgctgccaacatcattgccaacgccaccttccccctgttcaccagcggtctggagaagttcgacaaggctgtggcaaacggcaccctgacctacgttgtgggcaccaacctgacctaccgtatgcccgagctgctgacccgcgactggtatgtggacgtggacgtttccaagtatgctgcctactttgtggtggctctgaaccacgatatgtccgtttccagcatcatcgaccccctgaagaagatcgagaacctgctggcaaaccgcaagtaagaagctgttccaaagcccctgcaccctgcgtgcaggggctttttgaattttcatagagaaaaggaagtgtatcattagaaacagcagtggtataggggactttcgctgatcagcactttttacaaaaaatgatatactaatatattaattgaaacaaaaaacactaaatactatttacaaattgtgatataaatggtattctttgtacaatgttgaagcaggaaggcacctgccgtgagaaaaaatcggagaaaaagcaagagagtccggccttcaaagccgggcataacaaagtgcgcaggcacttacaaaaaggagaaaacactatgaaacgccgcgattttatgaagctttccgccgctaccgcgctgggtgctaccgtagccgctatggcaccctcggctctggctgcgacagagctggaccagaccaacggagatctgcacactaccgtagatcgcaagaccgcagctatgggtctgggcaatggcaagacctttgcttatgacccggaaaacccgtacctgaacgtgaatgtgggtctgtttcatgatgcgcaggtaatggtgggcggtcagaatgttggtgctgctacctattacctgcccgacggcatggatccctgggcgccggcagttatcgtgctgaccccggacaacaccaccgcaagggcgttctccggctcggtcacaggtcgtatgtggcgcacggtggcgtgcaaaaataagatcgccgttgtatttttcggtcctgaaaacggcggcagctggaacctttccctgagctctgccggtcgtgatgacgcagcagcgctggatgcattgtatcagctcatgcgcaaaaagggcgttaagctgtccggcgcattctccatggacaagtcccacactgcactggtgggctacaaggagggcggcgcagccgctctgctgttcggcgctcgctgggcaagcgatttcagctccatctgcgccgtggatgccgttgaggtcccggcagcttctctggaggcagtgggcggcgagtatgtgctgcccttccccggcgactccacccgtggcgtgcaggaggaagccattgcggcaaagacagtggatactcccgtttggttcgtccgctccaaggcggatactgccaataaggcagcgctggatttctacctgaacgccaatcaggccgtgtcaaaggggaacggcgtgtatgtcagcaaccgtacaggctctgccgccgaggtgtgggtcaccgaaaaagcacagtgtccggcagccatctgggaaaagttctccggtcagttcaagcgctttatggcactgcagctgccgggtcgcgtagcaaaggcagaggactttacccgtcggggctttgatatccatgaggagtgggtcaacggcgagctgcgccgctggatggtctatgtgccgtccacctataccggcagcaaaaaggtgccgctggtgctggtgatgcacggctacaccgcatccatgtacgccattgccgaagagtcccgctggtacgatgtggcagagcagaacggctttatcgtggtgtttgcgcagggcctggtgcgtcccgcagacctgatgggcaacattcccaccgccatgtggctggcaggtccctttgccgcactggctggtaaggataccgaccccagcgtggatttggagttcatcaacagtctgctggaccgcatggagcgggattacagcatcgacaccacccgcgtgtatgctaccggtcactccaacggcagcctgatgacttgggctaccgcctgccgctacgcaagccgctttgccgccattgcacccgtcggctatatgtttgccccactgccggagcttgaccccgctgttctgctgccgacatgggctttcctgggcgagtacgactcggcaggtgtggcagagctggtggaggataacgggacggtgaaggcgctgcagggctggaacgcccacaacgccaccaacgaggcagctgttgcagaaagcacctcctacgatggcgcttttgtgaccaagagctttatggggggcaacgctccgctggtgcagtacaccgtggtcaaggatacccctcacgtttacctgcaggaggagagcgttgccatctggaatgagttcttctcccgttacagccgcggtgcggacggcaccctgtactatcagggcaatgccgtgaccgccggtaagcatcagcccagcgcagactggtacgctgcaaaataagctgataatgcccgccgcgcggcggtacagaagctttatatctcgggacaccggaacgtctgcggacgctccggtgtccctttttatgttttgcggcggcttgtgttaagtttttgaaaattcgtgccgggggctttgcaaatcccggtgggtttatgctatatttaagttgaaatactttgcattctgacagaaaggaaaaacgccatggagcattttgtggagtttgaagatgtctgtaaatattaccagaccggcagtgtgaagatcgctgccgcagaccacctgaatttctatgtggacaagggcgagttctgcatcatcgtggggccctccggtgcgggcaagaccaccctgctgaatattctgggcggcatggacaactgcgacgagggcaacgtctggctggacggccgcaatgtgagccgcttttccgcccgggagctgaccacctaccgccggtatgatgtgggctttgtgttccagttttacaacttggtgcagaacctgaccgcactggaaaacgtggaacttgccagtgagatctgccgcgacccgctggaccccaccgagaccttgcgcagcgtggggctgggcgagcggctgaacaacttcccggcgcagctttccggcggcgagcagcagcgggtgtccattgcccgcgcactggccaaaaaccccaagctgctgctctgcgacgagcccaccggtgcgctggactaccgcaccggcaagcaggtgctgggccttttgcaggatacctgccgcaagaccggacgcaccgtcattgttattacccacaacacggcactgaccggtatggccgaccgcatcattcaggtgcgcagcggccgcatcgtgtccaatcaggtcaacgagcacccggtgccggtggaacagatcgagtggtgagtactgtgcagaaaagttaccgcaaaaatatcctgcgcgagatgaaaagcagcatcagccgggtggtgtccctgtttggcatcgtggcgctgggggtgatgatgctcaccggcctgatgtgcattgcccccgatatgcgcaccgctgcccagaagtattatgtgcagcagaatgtgttcgacctgcgggtgctgtccacccttggcctcagtcagagcgatatcagcgcgattgccgctgtggacggggtagacgccgtgcaggcggtgaagtatcaggacgtggaaggccactggacaggggacgagcagaccacggtggcgcggctgtatcagctgcctgccgacccgcaggccgatacgccggagaacatgaaccgcccggtgctgctgtccggccggatgccggaagctgccggggagtgcgtggtgcatgtgatgggccacggcagcccggtggagctgggcacccagctgaccctgccggaagagaccgagggggtcagcgggcaggtgttcacggtggtgggcacggtgcaggatccgctgcatttttcctccgattccgagagcagcaccgtgggcgatggccagctggactgcatcctgtttgtgccggagggcactttgaccgcagattattatacggtgtgctatatcaaggcagaaaacgccggattgtatgataattattccgatgaatatcaggccgcagtggatgccgtagccgaaaagctcaaggccatccagagcgtgcagtgcaccgcccggcgggaagagctgatggacactgccaacgacaagctgaccgaagcgcgcgccgagtacgacagccagaaggccgaagcggagcgtcagtttgccgaggcggaggcaaagcttgcggacgcacagcagcagctggatgccgccaaggcgcagctggaagccggggaaaaggagcttgccgcccagaaggctgccctgccggacaccatgcagagcggtgccgacaagctggtgagcagcgaagcgcaggtgctggaatttgaggaacagttacagcaaatcgagatgctggtcaacctgaaaaaggtggcagaccccctgctgacctacgcggaagccgccctgcgcaacgccgaaaaggcgctggacgaagccgagccggaggacgaagactacattgagctgcgggatgcactggccaaggcgcaggccgcttacgacaacatctataaccagttgcagggctatcagcagcagctggacgcgggcaagcggcagatgtacaagcaggggctcatctcctcgccgaacctctccaacgtccagctggtgaccgaggccaaggctgcgctgcgcaagatgaaattgcagcttttgcagggacagttgcagctgaccaccggcaccgccagcgcctacacccagttcgatgccgcacaaaagcagctggaagagggctgggcagaatataacgccgggcagacccagctggaagaatcccgcaccgagtacgagagccggaaagccgaggcagagcagaagctggcggacggccttgcccagctgaacgatgccgaggagcaggtgagccagatcaaaaagggcgagtggtatgtgctggaccgcacctccaccatgagctgcgtcacttttgcccagtacgccgaccgcatggacgccattgcccgggtgttcccggtgttcttcttccttgtggcggcgctggtggctaccactaccatgacccgcatggtggacgagaaccgcctgcaaatgggcaccttaaaggcgctgggctactccaacttcagcatcgcgggcaagtatttgttctacgcgatgctggccaccattctgggcagtatcgtcggcatggtggtgggctttgtggtgttccctatcattatctggaacgcctatcagctggtgttcagcctgcctaccttcaccctgtacttctacccgggcatggcagccgccagcgtgggcatcagcgccgccgtcatcggctttgccacatggtatgcctgccgttccagtctggccgaaaagaccgcagctttgctgctgccccgggctcccgtggcgggcaagcgcatcctgatggagcgcatcaccccgctgtggtcccggatgtccttctcccaaaagaccaccgcccgcaacctgttccggtataaaaagcggttcttcatgaccgtgctgggcgtggcgggctgcaccgcgctgctgctcatcggcttcggcatacaggattccctgctgcccatcgtcacgaagcagtctacggagctgacccacaacgatatgtccatcaccctcagcgaccccaaagccctgaccatggagcaggggctggcagaggagctggacagcaacagcgccgtgcagaactggggcgcggtgtataccaaatccaccaccatctacaatgccgaaggcgagagtgcaagcgtgagcatcgtggctgcggcaaaggacagcgacctgacccgctatgttaccttccgcacccgcaaggggcacaaggccatcagctttgacagcggcagcgtcatcctgaccgaaaagaccgccgagaacttgggcctgcacaccggcgataccttctgggtggagaacaccgaaggtgcccgggtggagctgaccctgaccggcatcacggaaaactatatgttcacccggctgtacctctcatgcgtacagctggaaagcctgctgggcacggaggatatcccgtggaacacggtctatggccagaccacctgcaccgatgctgccgggtacaacgccctgcgcaccgacctgctggactgcaactacgtcagcagcatcagctttaccgaggacaccaccgaactgttcgataacctcatcgtcagtctgggctatgtggtggtgctgatcatcatctgtgcggcggcgctggcggctgtggtgctgtataacctcatcagcgtcaaccttggagagcgcaaaaaggagctggcgaccatcaaggtgctgggcttctacgatcaggaggtgtaccgctacatcttccgcgagatcgagctgctggcgcttatcggctccggcgtgggtctggcactgggggtgccgctgcacaagttcattgtgttgaccgtggagatggatcagctcatgttcatccgcaccatcgccccccgcagctacctgctggcggtggcgctgaccatggtgtttaccgtggtggtctgctttgtcatgcggcggcacgtccggcgcatcagcatggtggaaagcatgaaggccccggagtaattacaaagcaaaaccataaaaaacaccccctgcggtctgtacgggcagaccgcagggggtgcttggctttttatacgctcagggaatcagaggaacacatacttgaggatgaacagcacggtgagcacatacatcagcgggctgatcttcttctccttggccttgccggtgatcacattgatgatggtccaggagatgatgccgatggcaataccctcggagatgctgtaagcggtgggcatagccagaatggtcaggaaggcggggatgccctcgctgggatcattgaaatcgatcttgatggcagaacccatcatgtagaagcccacaatgatcagagccggagcggtagcaaagctggggatggtgaggaacagcgggctgaagatggtagccagcaggaacagcacgccggtggtcatagcggtcagaccggtgcggccgccctcggtaacgccggaggcgctctccacgaaggtggtggtggtggaagtacccagcacagcgcccacgcaggtgccgatggagtccgccatcagtgcgcccttgatgttgggcagacggccgtcctcgtccagcatatcagccttggaggccacgccgatcagggtgcccagcgtgtcgaacaggtccacgaacaggaaggagaacatgacagcgaagaagttcagcaggccgacaccggagaaatcggtcttgaacacctgaccaaaagtctcgcccagtgcggagaagtcgaagctgacaaaggcggtggggatgacggagtacataccggcatccacatcggggacgtagataccggtcagctcgcacacgatgcccagcagccaggtgatcaggatgccgtacaggatgccgcccttgaccttcttgaccagcaggatggcggtgatgaccacgcccagcagagccagaatagcgcccacgcccacgctgtggaaggttgcgcccttgaagtgctggtaggtgaccagcgtggaatcgctgttgacgatcagcttggcgttctgcaggccgacaaaggccacgaacaggccgatgcccacgctgacggcgctcttcagggtcatgggaatggcgttgaagatgccctcgcgcacattggtcagggacagtgcaatgaagatgacgccctcaacaaagacggccatcagagccagctgccagctgtaacccatggtcagcacgaccgtgtaggcaaagtaggcgttcaggcccatgccgggagccagggcaaaggggtagttggccagcacagccatcagtgcggtggcaataaaggatgccagcgcggtggcgatcagcacagccttggaatccatgcccgctgcggacaggatgttggggttgacggcaaggatgtaagccatggtcatgaaggtggtgataccggccatgatctcggtctttacatcggtgtggttttctttcaggtgaaagaacttttctaacatgagaaacctcctgcttccaataaaacactccgccggttgcggacggcggagaaagaacagttcccattctatcagctgaaaacgtttttgtccacaccagaaacacacaaatttcgcaatttgttcaaattttcttaaatgagtatgacttatctcacaaaaaatccggctttttttggtagtttggacggaatgcaggcaccttatgcagaaaaaatgtgtgcggaaaaaagtagttccgaaacaccctacgggtgtttcggaactacaaataaaatattttttacaaattaccggcgcttacagcgtttctacccggtcgaacagatcctttacggcttccacggcgtccttacttccaaaggccacccgcacgccgccggacagcacgtcagacagggcagcggcctgctctttcagcagggcggtgtccacgctgcacagcgccttgcggtcggcggcgagcatctcgtccgtgatgccgcagaagtaccggtgatccagttcccgggcagcggcgcgtgccttgcggggtgtgtccagcttggcagcagtgcccacgatgaattcgtccagatcccgggcggtgtagtcccgggcggcaagggcggcaggggcatttgcgaaggtctcgtagctttcccgcaggtgggggtcccggtaggtgtacaaaaactcgatgccgtcggcacagagcattccggtgccgtaggcaccgcccacctcccggatggcgtgccacaggtattcgtagctcatcacccgcgccagcacccggcggcggctgtcccggggcatgggccaagccagcacatcgtagttcacgccgccgtcaatgataaaggcttcgttcaccgggggcgtcagaggctgggtgtagggctgcgccggggtacgccgggcggcggcaaagcggctttccggcagcagggtgcgcagcttttccagtgcagcttcggtgccgtgcaggctgacggtcagggcggcagtttgcagcacccggctgcgcacagcatccagttttgcgcccagtgccgcccagtcggccttttccagcagattgcacaggaagtggtagtagctcacgccggtgcaggcttcgtccgcagcgccctctacataataatgggcgcgggcgcgggtagaggcaaactcgttgccctgctggatgaacagctgctccatgcgcagcttcagctggctgaccacccgggcataggccgcttcggcggcagcgccggtaaggacggtatcgtacagccactcgccgccgatctccaccgccttttccaaactgcgctctagcaggctcaggcagagggtgagtttcgcgtggcagggagaaccctcctgccgtccggtccagagatccagctgggcgcggctgtcgcccagccatgtgctgcgcagggtgttcagctgctgggcggtatgggcgggggtgtccagctcgtccagcacatcggtgagcagattcaggtattgcagctcctccggggtgacagtgccaagatcatagtagaaattcaggtacaggctgccggcagaggggtggcgcagcagggtggcaccggccagctgctcggtgctgccctgcggggtggcatcgcctgcgccaaggtcggcggcggtgaggggatgctccagcaccagcttgccgtcggtgcgcaccggggcggcggtatcctcagtcttgggtgcggtgggaatttgcaccacctgcaccggggcgggggcaaacagctcccgcagcagggcgtcgaaccagccctcctccagcttgctgcgcagggcggcaaagagcttgtccgtgtgcagcagcagggtagcatcgccggtgtgcagccagccggtggcggcgttgatggcgtccagcacgccgtccggcagactgcccgggcgctccagcgaggcaaactcggcctcgttcaaagcggccagcagcaggtcgtgaggaatgccggtctttagcagctcgtccacagccttgcgcacggcgggggcaaacttgcgggcagaatccaccgtagcaccgcgcagcagcagctccaaggtgggctgcagggtgctgtcgtcaaagccgatgtcgatatctgcgcccagctgctcagccagcagcgcggccttgaggggggagctgttggtgctcagcagcgcacccagcaaaatctccacacccagctgccgctcacggtcggcaaatgcgccggtgtaccatgccagtgcgcactgcacctcatccggcttgggctggtcggtgtagtagggcagctccacgaatgcgccgggctgctcgtcctgcatggtcaggcggggacgggcagcggccttgggcatcttggacaggtagtccttatccagccgcgccagcttatcggccatgtccatcttgccgtacagggtgatgcagcagttgtcggcgctgtaatggcggcggtacacccgctggtatttctcataggtcagggcggggatggacgccgggtcgccgccggacacaaagccgtaagcggtatccgggaacatcgctctttgcagggcgttttgcagctgggcatccggggaggccagcgcaccctgcatctcattgtagaccacaccgctgaccgtgccgtccgcatcccggtgccagccctcctgctcgaacaccgcagagtccaccatagccagcgggcagaacaccgcgttcaggtagacgtccatcaggttgcagaaatcggtctcgttgggggtggcaaaggggtagaccgttttgtccgggaaggtcatcgcattgaggaaggaagccatgctgcttttgagcagctgcacaaagggggagctgaccgggtatttttcactgcccgccagcacagagtgctccagaatgtggaacacgccggtgtcatcggaggggaaggtgccgaagccgatgccaaaggccttgttgacgtcctcgttctccaccagcagcacggctgcgccgctgacgtcatgggtgagcagggtcaaagtaccgtgctgctcggggcagtcctcggtgcgcaggacggtataaccgggatagtgtgccatttttattctcctttacgggatgtttttcacagaggatgcgcctgcggctcagccgccgaacaggccgaaaaagctggtgtgggtcacgcccagcacaaggaaaagagcaatcagagcgaacagcacgccgatgatgatgtccatctggtgcaccgtgagcgggaatttatcgtaaagcttttccttggggtttacaaagtccttgttgccgttgtccagcaggcgctttttgccctgctcaaaatcggccttctgcgcctgcaattcagcctgctggcgggcaagctctgcctcacgggcggccagtgcggcctcgcggcgttcaagttcggtctgggtatccggggtgggctgtgccatggaaagtccctcctgtaagcataagatgttttccttatgataccacaaaaatgtggacaaaaaaagcacccgcagtacaaagactgcgggtgcaaagggggatgatgaggagattacttcttagccagatacttgcggatatcaatggcgacagccacgataatgacaaggccctgaacgatgtaggtgtaggaggagttgacgttcatgaactgcagagcgaccttcatcagctcaaagaccagaacgccgaccagaacgccgggaacagtaccaacgccgccggtggtggaaacaccgccgatggtgcaggctgcgatggcgtccagctcatagcccattgcagtgttgacggatgcgccgccggactttgcagccagcaggcagcctgccagaccgaacatgcaggaggccagaatgtagatgcggatcttggtggcgttgacgttgacaccggccacctcggcagcagcttcgttgccgccgatggcgtacatatacttgccgtggcgggtcttgttatacaggaaccagaagcagacagccacgatcagggcgatccagatcagcacggggatggcgaggaaggtgtcctttgccagtgcggtgaagttggagttcagagagccgatgggggtaccgccggtgtacaccaagcagataccgtagaccacctgctgcatacccaaggtagcaataaagggctgcaccttcaggtagctgaccaccagaccattgcacaggccgatgacggcgcagatagcaatgaccagaacgaataccagcggggtggagatggtgggcatgttggggtagaacttgccggaagcgccttcggtctgcgcaaaaatgcaggccaggcaggcggcaaaaccggccagacggccagcagacaggtcgttaccggtggtgatcaagcagccggaaatgcccagcgcaatgatgtagcggatggacacgttcttgaacaggttgatcatgttggtgccggagaagaagttggggtgaatgatgccaacgatcagagtgacggccagcatcattatgataatggcgttgttgctgagccacttgcccacagccttgccattcaattttttggtagcttccacgatagacagcctccttaattactgatttgccgcagctgcgtcaggtgcggtctcgaactgggtagccagcgccatgatgttttcctgggtggcatccttaccgttgataaagccggtgatgcggccatcgcacatgaccatgacacggttggacataccaatgatctcgctcatttcagaggagatcatgataatgctcttgccctgcttggccagatcagcgatgatgcagtaaatttcgtactttgcaccgacgtcgatgccacgggtaggctcgtccagaataagcacatcggggttgttggccagccagcgggcgatcagcaccttctgctggttgccgccggaaaggctcttgatctgggtcttggggctgggtaccttgatggccatcttttccttgttggttgccaccagatcgaggatcttctggttgtccagcatgatggggcccttccgcagggcatccaaggaagcgatggagatattatcggcaacgctcagcacgcccagaatgccggtagcacggcggtcctcggtcagcagagcaacgctcttctgaatggcgtcgcggggctgcttgatgttgacctcttcacccttgatccacaccttaccggaggtatgggcacgcaggccgaagatgccttccatcagctcggtacgctgagcgcccaccagaccggcaacgcccaggatctcaccctttttcagctcaaagctgcagtgacggaaggaacggggatggatggaggtaaagtcctccaccttcatcatgacctcgtccgagggcacgttctccagcggggggaacaggttagacagctcacggccgaccatctttgcaatgatctcttccttggtcatgttggcaacgtcccacttgccgatgtactggccatcgcgcatgatggtaacttcgtctgcgatgaccttgatctcgtccatcttgtggctgatgtagaccagcgcaacgccctgctccttcagctcccgcatgatgcggaacaggctctcgacctcgtttgcggtcagagaggaggtgggctcgtccaggatcagcaccttgcagttggcggaaacagctttagcaatttccaccatctgcatctgggcgatgctcagggaacccagctttgcatgggggtcgatgtccagcttcagtttcttcagcagttcatcggtatccttgtacattttggcatgatccacaacggtgacgatgccgtatttcttggtggggtagcgccccagccagatattctcagccacggtacgggccggaatgggctgcagctcctgatgcaccatagcgatgccgcggtccagtgcatccagcggggtggggatgtttaccttctgcccctcgtattcgatctcgccctcgtccatcttgtaaatgccgaacatacatttcatcagagtggacttaccggcgccattttcacccatcagagccatgactttgccgggacggagctccagctgagcatgatccagggctttgacaccggggaaggtcttgaccacgcctttcattaccagacggtattctgacattccgcaaaagcctcctttatggttgtttacaggcgggcaggtcttttctaaaataaggcgcgtgcgcggagaagatttctcgcacgcacgcgctttttagctttcgttcaagccgttaaggcctgctgcgcaccttgcattggttccgggaaactttagtcttccttcaggtactgagaagcgttgtccttggtgaccttgacgtagtcgacccagtagtacttctcaacatccttgccctcgacgaacagcttggtagcctcggcagccttggtagcctgaccaacgtcgtcgttcagaacggtaccggtcatgttgccatcgacaacgttctgcacagcctctaccagagcatcgacgccgaccaggtagacgtccttgccaacggtgcggccagcctgctggatggactgcagagcgcccagtgccattgcgtcgttgttgcagaagacgacttcgatcttgtcgccgtactgagacagagcgtttgcaacgtcctgctgagcggtggtctgatcccagttatccaggtactcgtacaggcactcaacttccttgccggcatcggtcagagccttgatggagtactcggtgcggtactgagcgtcgatgttctcggggtcgcccttgcacataatgtaggtgatcttgccgtcgccgttgatatcgccctgagtctcggtctcgaggatcagctcgccctgataagtaccggactgacgagcgtcagcgccaacgtagcagcacttgcccttgtaggaatccagaacgctctcctcgggctcacggttgatgaacacgatgggggtgccggagggagaaacggtgtcaacgatggtctgagcggaagtggtctggacggggttgatgaccagcacgtccacgccctgctgcaggaaggtgttgatctgttcggtctgggtgttctggtcgtttttgccgtccatgatggtgacggagtagcccatgtccttcaggtagccttccagatcagcgcggtacagggtcatgaagttatctgcaaactgatagatgcaaacgccgacgttggcggagccgttggtagcagcggcagaagcagcagtggaagaagcaacgctggaagcagcggtgctggtggaggaagagccgccgcaagcggtcatagcagcggtagcgcccacaacagcggaagccttcaggaagtcgcgacgagaaatcattttcataatagtaatctccttcatttgtgtatcacagcatattcacagacgcatttgtcgcatgcgtccgtaatccctgacagtattatacccttgtatgggggtgttccgcaagagaataagttcacaatattggtgcaaatgttttgttacgtttctacaaaagcggaccaaaggttacaaaatcttttcgcgaattatcacaacttttcatgccgatgcaaccaacatacaaatatgatgaaggtatgtaaaaaaacatgcttgaacatgactgaatgttgcatgactgctaaaaaaccgcgaaaaggggcgatacattttttgaaagatattttcatggatactacacagcggaaagaaaacgccttttatacactcttaccggaagggaaaaacaacacgggtcgagaaaaatgtttactccccgggtggggcggcactgtacctttatagtaacagggcggtcagggcgcagcgaacgtttttggtggcagtgcccgaaatacgagcggccgttttctgcgtgctacgccgaccgggaagataaaactgacggaactgcgttgtgccttgaaagcataaaatatacaa

SEQ ID NO: 13798 - DNA, 14819 bp, Unknown
  gut microbiota DNA sequence
ctggccccacaaaagtgcacactgtcgggcacggcgggcgggtgatatcctgtgtacagagcccgggacaccggacgaaaggaggaaaaacatcatggggcagacaaagcccgccgccgggctgaagagcctgaaccgcgccgccgataccctgagcaccctgctggcgcaggaggtgaaggagctgaacgagcggcagaaggccgcccggcgggaaaacacccccgaccccgggatgatgaaggggctgaaggaggctaccgccgtgctcaaggatctggcgggtgtggtaaagaccctgaacgatcagggcacagagctggaagggacagagtgcggcgtggtgctgctgccgccggtggaacaggaggagaaggaatgaacagaaccgagcgggcagtcattgtgtggaagccgcagccccggcagctggaatttatgcgcagaccggagccggaggcactgtacggcggcgcggcgggcggcggcaaaagcgacgcgctgctcattgaagcgctgcggcaggtgcatatcccgcattaccgggcgctgatcctgcgcaagacctatccgcagctttccgatcttgtggataagagccagatgtactaccgccgggctttcccggaggcgcagtacaacgctacctcccatgtatgggtctttcccagcggggcgaagatctggttcggctccatgcagtacaccaaggatcgcaccaactatcagggcaaggcctacgattttatcggctttgacgagctgacccactttgagtgggacgagtacagctatatgatgagccgtaaccgccccaccgggccgggcacccgggtgtatatgcgtgccaccaccaaccccggcggcatcggccacggctgggtgaaggcgcggttcatcactcccgccccgcccggtacacccattgtggaaaccgtcacggtgcgcctgccggacggcaccgaccagcagatggagcgggcgcgggtattcatcccgtccagcgtgttcgataaccctgccctgctggccaacgaccccgggtatctggcaagccttgccagcctgccggaggcggaaaagcaggcgctgctctacggcagctgggacagcttttccgggcaggtgttcaccgaatggcgcaacgacccggcgcactatcaggatcagcgctggacccacgtcatcgcgccctttgccatccccaagcactggcccatctggcgtgggtacgactttggcttttccaagcccttttcggtagggtggtatgcggtggacgaggaggggcggctgtaccgcatcaaggagctgtacggctgcaccggacgtcccaacgagggtctgcgcatcgacccggtggagcaggccaagcgcatccgggaagccgagcagaacgacccgctgctgcggggcagggtgatccacggagtggcagaccccgccatctttgacgagagccggggcgagagcattgcggccatgatggagcgcagcccgcattttttgcactggcagcccggggaccacacccggctggcaggtaagatgcagtttcactaccggctgcggtttgcgccggacggacggccgatgctgcaggtgttcagcagctgcaagcacttcatccgtaccctgccaaaccttgtgtacgacgagagcaatgtggaggatatcgacacccggcaggaggatcacatctacgacgagtgccgctatgtgctgatggagcatcccatcagcccgcccgaggcttctgccgcgccgccaaggccggacgacccgctggaactgcaccggcaggcgcggttctaccgcatctgaaaaacaggacagaaaggaaagaactatggaagatacaagagcagagagcctgcccatcggcgcggcagaggcggcggctgcattgcagacgctgcagcgctacaaggcgggcaaggcggcgctggacaagcgcctgatcgataacgaattgtggttccgcatgggacactggaaaaactatcgcgacccgctgatgcccggcaaggcgcagccctccagcggatggctgttcaacagcattgccaacaagcacgcagatgccatggacaactaccccgagcccatggtgctgccccgggcggcagacgatcaggccacagcgcaggcactttccagcgtgctgccggtggtgctggagcaggcggattacgagcaggtgtacagcgatgtctggtggcgcaagctcaagcagggcactggcgttaccggcatcttctgggacccggcggcgcgcggcgggctgggcgatattgcggtgcgcagcgtcaacctgctcatgctctactgggagcccggcgtgcaggatattcaggactcgccggatctgttccacctcagtttagaggacactgcccggctgactgcgcagtacccgcagctgacggggcacgccgccggggtggtggacgtgccccggtacatccacgaggacggccagaccaccgccaacaagagcgtggtggtggactggtactataagcgcccggacgagaacggcaaattgcggctgcactactgcaagttgtgcaacggcgtggtgctgtatgccagccagaacgacccggcgctggcggcgcgcggattgtacgaccacggcaagtacccctttgtgttcgacccgctgttcgtggaggaggattcccctgccgggttcggctacatcgacgtgatgaaggactgccagaatgccattgataagatgaaccacgccatggacgagaacgtgctgctggcctcccgccagcggtatgtgctcagcgataccgccggtgtgaatgaggaggagcttgccgacctgagccgggacattgtgcacgttgtgggccgattgaacgaggacagcttccgtccgctgcagacggcgggcctgcagggcaacagcctgagctaccgcaacagccgcatcgaggagctgaaggagatcagcggcaaccgtgacctgacgcagggcggcaccagcggcggcgtgaccgccgccagcgccatcgctgccttgcaggaggcaggcagcaagctgagccgggatatgctcaagagcgcctaccgcgcctttgcaaggcagtgttaccttatcattgagctgatgcggcagttctacgacgagcagcgggtgttccgtatcaccgggcagcgcggcgagagcgaattcgtgcccttctcggcgcaggggctgcgcgcaaagcctgtgcccgccgtgggcggggtggagctgggcagccgggagcctgtctttgatatcgtggtcagcgccgccaaaaagagcaccttcagccgcctgtcccagaacgagaccgccaaggagtgctataagctgggcttctttgaccctgccaacgcggatgctgcccttgcggcgctggaaatgatggactttgaaggggtggaaaaggtgcgcgcccgggtgcggcagaacggcacgctggcgcagcagctgttgcagctgcaggggcagatggcaaaactgaccgccgcccttgcccagcagcccggcggcacccaaacggcgcagaacaccgccagtctgacggtaccgctgccggtggcggctgctgcccgcgccatgaactggaacggaaaggaggtgaagtgagatgatcaaggtatgttacagcgagctggacggccccaaggggctgagcctgcggctggaagccgccggtcacgcgggctatgcgcccgccgggcaggacatcgtatgcgccggcgcaagcaccctgatgcaggcgctggtgtacctgctggcaggggaggagagcgcccgcagcgatgcttgggacgagccggatggaccgcgccttgccgtggcagtgcaggccccggtagcaccgtgggtgcagggtgcatttgaactggccaaggcgggctttaccctgctggcagagcgctacccggacaacctgcgctttgcggatgtgagccgcagcggacagcaaagcatgatggacttgcagctgtttgcggaaggcgaagccgcccctgcgttgagcccggagcagagccgacaggcggtggctgcgggcaccctgaagccggaagcccccgccgcgcagccggaagcgccccggcagaccccggcagagccggaaaagcagccggaaacacccgcacagccggagcgcccggtattgccgcccctgccgctgccggtgcagaacacggtgcgcagcctgcacgcccgctgggcggcagaggaagcggccatgcgccgcagccagccgggctttgacctgaaagcagagctgaagaacccggagatgcgccgtctgatgcagctgcccggcatgcgggtgcaggacgcctaccgccttgcccactacgaggatgccctgcgcaccacggcacagaccgtggagcagggcgtggtggagcgggtgcagcagcgcgccgcgcgtccgctggaaaacggcctgcgccccggtgctgcggcttcggtacggccggacgtagccgccatgacccgcgcccagcgggaagccttggagcgccgtgtgctgcacggtgcacagatcgaactttaatctgacaggagaaaggaaaaaagcatgatgaattttaacatccagctgtttgcggacgcgcagaccaacaccaccggcactatgtcggtggagatgaagaccttttacgagaagcgcctgatcgatcaggcggagccgcgccttgtgcacgaccagtttgcggattactaccctgtgccccagaacggcggcaagaccatcgagttccgcaagtacgacagcctgcccaaggccagcactccgctgaccgagggtgttacccccaacggtcaggccctgaacgtgaccagcatcaccagcgatctgcaccagtacggcggctggaccccgctgaccgatgttttgcagatgaccgccatcgacaacaacgtggtgcaggccacccgtgtgctggcaagtcaggcaggccgaaccatggacagcatcacccgcgatgtgctggcgggcggcaccaacgtcatctacgccccgaagctgggcgcagacggcaccgagaccgccgttaccagccgcaaggcgctggacaagagctgcactctgaccccgaagctgttctttcaggcggcggcgcagctgggcgcaatgaacgccgaccccatcggtgacagctacgttgccatcatccacccctatgcggcctatgacctcaagacctgcaaggagttcatggaggtgcacaagtacgccgaccccgacaccatgttccgcggcgagatcggcaagctgggcaacatccgctttatcgagaccagcgaggccaaaatctggaaggacgacacctgcccggcgggtcttgcggtgttcggcacgctggtgctgggtgcccacgcctacggcgtgaccgagctggagggcggcggccttgagcacatcgttaagcagctgggctacggcgacgacccgctgaaccagcgcgcctctgtgggctggaaggggatgcgcgccgccgagcgtctggtggagcagtacatggtgcgcatcgagagcgtgtccagctactctgccaccgctgccgccaactaaggaggtgcccatggctgaaaagaatgtgcgcatccggctgttcaaggacaacagccgctacaagggcgatctgttcgtcagtgtcaacggcgtgaactacaagattcgccgtggcgtggaagtggaggtgccgcccgctgtggccgaggtactggagcacagccagcgtcaggacgagctgaccgctgcccgcattgccgctgcggagaacgcggcacagtgaaataagcgctgcccggctgggagaaatgcccccggccgggttttttataaaaggatgtgatgagatgaccataggagaggctttggagcgtgccgagcagctgcgccccaactgccgcattgaaaccgagacccggctgcaatggctgcgggaggcggacgcattgctgcgcacaaagctgtttgaccgcgccgccgccggggcgtttgacgccgtgggcgcagaccgtccgtgggagcagccggtgcaggacgaccagacgctgctggcaccgccgccctttgatgccctgtacccgcacctgctgtgtgcgcagatggatgccgccttgggcgagaccgaccgctacgccggggagcaggcacagtacaacgccctgtacgcagagctggcggtttggctgcggcagaactacccgccccgcagccgggcgcagtggcgctggtaaggaggtgaggtgatggtactggcagacagaatacggcttgccaacacccggcagctgctgcgggcctttggcggcctgaacgagacctacggctgctcggaagcagagtacagcgccggagtgaacttttccacccgggatttccccgcactgagcacccgcaccccgcgccgcagactgcgggcactgaccgggctgaacgggatgtatcacctgaacggtctgctgaccgtctgcggacgggatgtcgtttataccccggacgatgccgccgccccggcggtgacgaagctggacgccgtgaccgacggccgcaaggcgctggtgggcatcggtacaaagattctgatctttccggacaagctggcctttgatacggcagacggcagcgtgaccgcactgggagcactgtggacggcggcgggcaaaagcgtgacctttgccccctgtgatgccgcaggcaagacctatcaggtggaggcctttggccgggaggagcccgccgaaccggcagacggacagctgtttttaaaggtagaggatgccgaccatccgtggcggtacgacagcacgctggagatgtacagcaaaaactccggcagctggacagccatcccgctggaatactgccgtatcacggcggcagggctgggcaagctgttccggcagtgggacaccgtgaccgtgcagggcgcagccgccgaagcggcagggcagagcccggagctgaatggagaccaaatcgtgtatgacgtgggcgaggactggctgcgggtgcgctgcaccccacagggcgagtatttctacggcacactggtgcagaacgccgccgccgcccagtggcagagcatggacggcaaacagcaccgcagcgtggaagccgcccagacggtatccatggagcgccgggtgccggaactggattttgtgaccgagtgcgacaaccgggtgtggggctgcaacagcaaagaaaacgttatctacggctgcaagctgggcgaccccaccaactggttcagctaccggggcatcgccgcagacagctacgccgtcaccgtgggcagcgatggtgcctttaccggggcagcttcctgcatgggctatgcgctgttctttaaagagaataccctacacaagctgtatggctccaagccttcggattttcagctttccagcctgcgctgccggggcgtggcaaaaaacgccgcccgcagcctgtgcgtgctgaacgagacgttgtattatctctcgccggacggcgtcatggcgtgggacggcagtctgcccaccaaggtgtccggcgcgctggacgctgcaaagctttccaacgtgcaaagcgctgtgggtggtgcgctggatggccggtattacctgcacatctcccgggaggatgcccggctgctggtctatgataccgagaaggggctgtggagcgaggaggatgtctgctcctgcgatatgaccagcaccggcgggcagctttatctgtgggacggacaggcgctgtgggcggcagaccccacccgcgagccggactggcagagcaccgacggcgtggaaacggacattccctttgaactggtcacaggcgatgtgggactggacggcaccgagcagcggtacctctcccggctgactttgcggctggacgctgagtgcaccagcacagtagaagtggcggtgagctatgacggcggcgcgtgggagacagtggcctcccttgccgcccaaggcagccgccgcagctatgacctgccctttgtaccccggcggtgcgggtcgctgcggctgcggctgcgcggcaaggggcagatcaccctgcgcggacttgtgcgcaccatcgccccggcaaagggaaaaatatgggaggaggatgcctcatggcaagcatgaacggcctgagcaagctgggcctgcccaagttcagcgatcacatggacccggaggatgcccgggcactgcgcagctatctgtaccagatgcaggagcagctgcagtatgtactgaccaatctggatacggaaaatatgtccgacaccctgcgcagcaagctgcagggattataagaacgaaaggagaattatatggcatccaaaaagaaggaggaactgctgcagccggatatgcaaacgcaggcacagcccgctgcgcagtccacttacagcgccgaggggctgaacagccgcgccgatgtggaaaaggccatggcaaacgtcagctaccgccccggtcagcaggtgaccgatgcggctgacgccctgaagcagtggcagcagaaccgccccgcagactaccagagcagctatcaggataagatcaacagcctgctggggcagctgctggagcgggagaattttcagtacagctacacccgtgacccgctttaccgccagtacgagcagctgtatacccagaacgcccacaatgccagcgcggacgcggcggcgcaggccgctgctctgaccggcggctatggttccagctatgccaccagtgcggcgcagcaggcctatcagcagcagatcggcgggctggccagcgccatccccaccctgtacaatctggcgctggatacctaccagagcggcggcgaagaactggtgaaccggctggaccagctgaacggacaggagcagaacgcccagaccctgtacgaccgtcagctgcaggactattacacccagctgcagcagaagggcgaagcgtacaacgacgcctacgccaaggactacggccagtatcaggagcacctgaaccggctggacaccctgcacggctactacaccgcgcaggagcaggcggaaatcagccagcgccagcagaccttcaataacatcatgacggtgttgggcgtcatcggggacgtggtgcagctggccattaccggcaccaccggtctgggcacgttggcgggcagcctgctgaacaccgggtacaacatctactccggcaaccgcgcctacgaggccgagcgcgccgatacccagtggaaccagcagatgcaggaaaagcagcggcaggacgcactgacccagcagcagtacgacaacaccgccagcgagcgcgcctatcaggatgcgctgaagcagcaggcctttaacaacaacgtgaccagtcagaagctgaacattgccaagggcgagtgggcactgaagcaggctaatgcccagcagaaggccgcacaggccgccagcaaggcagcggctgcgggcacaaagtccggaagctccagcagcggaaaggccaccggcagcagcggctctgcttccggcggcagccgcagcactgtcagcgccggagtgccctacacagcagcgctgctgcgcagtcagggcaagaacgatgtggccatcacctctgccctgcggcaggagggctatacccccgcccagatcgcaaagatcctgcaggagatgaataaataagagaaaaggcaccccggcaaagcagctgctttgccggggtgctgtacttttatagtatcccgccaaaagaaaaagtccgctgttcaaaacagcggactttttggtggggtgcccagtgggactcgaacccacggtctccagatccacaatctggcgcgttaaccgactacgctatgggcaccacatagatgcgcccgaagggactcgaacccccggcccactgcttagaaggcagttgctctatccacctgagctacgggcgcacgttgttatcccaatgggttccattatggcggcagcgctgtgtcggcacaggctgcgagaaaaataataccatacccatcgcattctgtcaaggaaaatctgaaaaaagtttcaacttttttgcgctgcgggcaaaaatggccgttccagcgtgtaggaatggccttacagcagccacattccggcacagcccagcgcaaagcccagtgcaaagccgcataccacgtcccgcacatgatgcaccccggtaagcacccgcaggcagcagatgagcagggcaacgcccaccatcacgcagcccgcggcaggggagaaatacagccacaccgccgccagcacggcggcgctcagcgcgtgacgggagggcatggaatgcccacgactctcctttgccaccagcggggtaaagccgggctgctcgtaggggcgggggaagggcagccgactgcgcagcagcgtgccgccccagaacaccagccccggcacaaagacggagcgggcgatgagcaccataaagtccagcgcggcctgcttctgggtgaggaacagccgcgagagccggacgttcagcaggtatagcagcaccgggtagcacacaaagggcaccagcggcagccaccgatccagaaaaacgaccagccgctttacagtcgggtgggcgctgaaccaatgatagatgggcttatactgttctgcggtcaaagcagctctcctcctgtcggggcggacatcagaaacaggtgtccagatagttttccacatcaaagggctccggggtggaatccttgcgcaggtacagcgggtggtgcgggtgcccctttttgctgcgcttgccaaaggtgacccacgggatcttccgctcccgcgtcagggccaccatctcccgcatcagaccgggcaggtagtcccgcttttcgatcagggtgccccatgccgcccacatggtaggctcggtctgggccagaacggcctgcagccagcgcaggttttcatcgcacagggcgcggtcgggggtcttgtccatatcgttggggtcggtggcgcgctgggggtagacgttgaacatgatccagctgtcaaagccgttggcagcggccagccgctccacgctttttaaggtggggtccagcgcaccgggctgggcggtactggggttgatgccgatgcacaccaacgggtgcttgcccacccgccccagaacgtaacggtagctttggtaggtgtggggctcgtaataccagatgccgccggcgtattcgcccgcctcgagcacgggcagagaaatggtctgcatgatcgtaaactcctgtcggttttgaatatcattcttatcgtacctgaaaccaccgggaaaatcaaccgttttaaccccaaaatactgccttatttctgtttttgtggtatactggaggtgttccggtgcggcagggggactgcggcaccgcgcttcgcttacagaaaaaaggagttcttatgctggaagattataaaagtgcactgcgcgcagggcagcgcgcctatcgtgcccgcatagcccgcggccagtcgccctatctggctgttctggacgatgtgctcaagggtgtggatatcgtggcgcaggagccgctggggctggtggagatcccgtcggacagtcttgtgggcaccaagaccagcggacggcacactgccttttcgtatgactttatgcccttgctggagccggataccgagtttgctgccaagtggtcgaacctgtgtgacgcgcacttggaagagggcatccatactcccattattgcctttgagtatatgaaccggttctatgtgcaggagggcaacaagcgggtctcggtgctcaagtattacggcgccgtcaagatcccgggcacggtcacccggctcatccccgcccgcaccgaggatctggaaaataagatctactacgagtttctggatttctataagctgtccaaggtgaactatgtgcatttctccaagctgggcggctacagcaagctgcagacgctggtgtgcaaggccagcggcgaggcatggtcggaggatgaccggctgaactttgccgccttctacaccatgttccaccagcagttcgaagccttgggcggcagatccctgggtctgaccaccggtgatgcgctgctggtgtacctgtcggtgtaccgctactctgacacctacgacgccaccccggcgcaggtacggcagaacctggaaaagctgtggaacgaggtgaaggtgctcaccgagccccatggcgtggagctttcgctggaaccgcccaagagccccgcagagccgctgctgtccaagctgaatatcttcagccccagcaagcagcccagtgagctgcgggtggtgttcctccacgagtacaacgccaagatcagcgcatgggtgcgtgcgcatgacgaggggcgcgatgcgctggccaaggtcttcccggacaaggtgtatatcagctgctacgaggatgtgaacccggaggtggatgcggagcaggtgctggaggaggtagcccacaacaatgcggacgtggtgttcgccaccagcgtgcggatgtacaacgcctgcctgaaggtggcggcgcagcaccccaagacccgcatcctgaactgctcgctgaacgcgccgcacccgctggtgcgcacctactacccccgcacttatgaggtgacctatctgctggggatgctggccggtatcatgaccaagaccgggcacatcggctatgtggcggcaaaccccgtgtacggcgtgcccgctgcgatcaacgcctttgcgcaggggctgaagagcgtgcgcccggcgggacgcatctggctgcgctgggcctgccagcccgataccgcccatccgctggattttaccgactgcccggagatcgacatggtctacgcccgggacagtcgggagcctgccgacaccaaccgggactacggcctgtgccgcaaactgccggacggcagcttacagccgctgggtctgccgatctggcggtgggataccttttatgtgcagatcgtgcgctccatttttgacggcagctgggacaacgcagccaccacccgcgcagtgaactactggtggggtctgcgcagcggcgcagaggatctggagtatcaggaagcgctgcccagcggtacgcggcagctgctggatctgctggaaacgctgcagggctcggataatgtgcacatcttcccggaaaagctgtatgataacgaggacaacctgcactccccggagaatagagtttacagccccaaagagctgatggagatggattggctggatgcctgtgtacacggcaagctgccccattacgatgaattggacgtcaagactcgtaccgtgctggcgatcaacggactggacaacgtaaagggtctggagaaatgagccggcctgaccggaaacagaatggagcatacgaacgtgaagattcttgccatctcagatgttccgtccaaggcgctgtgggactatgacacccgcgcccggctggaaggcatcgacctgatcctctcctgcggggatctgcccaaaaagtatctggaatatctcacaaactttaccgctgcacccatcctgtatgtgcacggcaaccacgatggcagctaccagactcagggggaacccggcggctgcatctgcgtggacgatcaggtgtacacatggaaggggctgcgcatcatggggctggggggctgtcagcgctataataaagaggatacctaccagtacaccgagaaagccatgcgccgccgtgtgcacaagctgaagcatcaggcgcacaaaaggggcggcatcgacctgctgctgacccacgccccggccaagggactgaacgatggggacgactgtgcccacaggggctttgagtgcttcaacgagattttggacgagtaccagcctaaatggttcatccacgggcacgtacacctgaattacgatgcaaagctgccccgggtatgcacccgcggcaacaccaccgttatcaacgccaccgagcgctatgtgttcgagatcccggacccgacaccgaccgaggagcgtaagaccctttggcggatgctggggttctgagccgctacctatgcaaaaaagacaccgcacagctgtgcggtgtctttttttattggtggagccgtattgtgggaatggcgggcgcggcagcagtgcggtgctgtctgcggccctgtaaaagttacagttccagcttgccggaaaacttattgatgacgtagtaggctgcgccttcctcgggcttgacgtataccttgcaggactgtacgccgaccttgtgggtggtgcggtagtctgccttggcacggtcaatgatgtcggtgatgttgtactgctcaccgcccatctctacatacagctcgggtgccagcggcgggcggccgcggcgggcgggagccttggtggatttgcgggtcttgccctcggcagccggagcatcggctgcgggagtagaaactttcttttcaggcatgatgcataaccttccttctgtatttgatctggtgcagcggggctgcaccggcgggctccaatgatctatcgtaaggcagaagcagtgcaaaaagcacagacccggctgccccatacgaaccggtacgaaactatttgcgtaaagaagttgaacctataattatataatatgtttttgaaattcatttgtaaagctttttttgcaaaaaacattgtaaaatcggtaggaaacagcggaataaatggccgaagcagtcttccggtgctttttcccgggcagagtacgacttttcggcaaaacaaacggccattctcgggaaagccgggcggccctacgggcacaaatacggcgggcaaaaacgaccttctgc

SEQ ID NO: 13799 - DNA, 9787 bp, Unknown
  gut microbiota DNA sequence
gcagataaaaagcagaagctgccgcaccgtatttttgtgcggcagcttctgcttttcggttttgatatgtacccccaatactgggtgtccagtattgggggtacatatcatttttgcttatttctcagtttgtactcagaacagcatttccggtgctttcgatttgtttagcaatcatgctttccagttcctgcgtgatcgttgcacaatttgcaacacggtaattccagaaataagaaacaccttcgcactcttccacggacaaatcgctgttgaccaaaagcaagctttctggtgtcacattcagcttttcgcacagagaagcatactttccataatcaatgcttcgactggatgatttggcttctacccagaaaaattttccattgatggagaacacgacatccagctcatgcgtgctccctacggatgctgtttctgaaagaaccacattggagcaaaccgaaacttctgcgctctgctcctcctgatagtggttcaggatctgctgaacctgatgctctacaaaaagttccagccactttccgctcaaaaaatgccggacggtttcattttgcgcaagttcatagacgatattctgcgggtaaatcacaatggctgcaaaaagccccattttgtcccacgtctgagcaatctctgaaagtgtggcaaacgattttttggacgcaccctttgggatacggaacgaaaaagaaccgtcgctctgcatatgtgttcggataaactgcaagaaatccaccaccaccgggtcgcaaagagcctcgcctgttttccatgccatccgctgaacagcaatcggtgggagtttttccggcacgacctgctgaacgattttatacccacagcgttccagatgctccaatgcggtcaaaggcttctggatttttgctttgacttcgggcttttctgctccggatgtgttctcggccagatagttgaacttccatccgtattcccaagcaggcgaacgggtcagtactccgaccgcatgaaatccgctgtcatgctcctccatcggaaatgtgaacttgttcttatgaacattgatttggagcgttttgttttttagtgctttctgataagcggtaagaaaaaattcctttcccttatacgccagctcactggaattatttgcagaaagaccggcattttttgccaaagagaggagcagacaggtcgctttgggcagctcaaggatctgttccatctgcgcagcgtccggaatatttgcattatcggactgcgacgattcgtctgccgggatctcctttgctggtgcagaaacctcgggtgtcttttttgaagcagtctcagactttccagacttgggcaagggctttggctccgtgtaaacttccgcaatgaatgattcataggaatcgatgcacggaagttttccagccgctgcaagtcctacatagattgcagccgcccgcgaggaatcgccataatattttttagaatccgctgcggcagcaatatcagaaaaggcattatatctgctcagctgcgcagccttttccgggaactgcttcaacgcacggcagtagagccactcaaaaaatgaatccgggtgcggctctatcggatactcacttccttccaaagagtagcgcagcaactttccattggttcgcagtcgagtgtccttatggactttggatggcgcacaggtcagaaggtcagcgaatggcccaccatgttcaaataccttggcggcttcaaaaaccgtactgatgggcacatcctgcgcaacagaattcagacgcagcagaagacgcagagaagaaacagcctcaccctccggctgagcggacgcagagctgacttccagaatggaaacatccgggtctgttgtatggacggcatcatggacggcacggatattctgccgcttgctaccttttatccatgtgaacgtcaccggctgttccttgcaataggggtagccggatatgggaaaacaaatggttcgtgtagccatgaacacctccaactttttaggacgaacaagtttatgtaatcaagtatagcacaatcccggatgtgctgcatagcactattttctgcttccgggaatccatctgtgcaaaaagtgccgataccacaggcatcggcactcagatcaaaaaagcgttttgcaaaaatgcgcagcctgcatccaccggacgcagaacacaaggggtttgggcacagcccaacaagcattttgaatttggattttgaaaaatccgattcaaaaatcgcaagttggtaccaagttgcactgcttgcgacgtagatgtttccgtcaactactgcgttagaaattttcagatcacttcagctttgcgaggatatcgtctgcgctcacgccgcttgccagcagctttttcagcacgtcctctgcttcggctttctttgcggattccgctgctttggtttcagccttgacctttttgacttcgattctggcgatttccttgtcgatagatttcagctcagatttcttggctttcaggtcagctttcagcgcatcgatgttcgcagtgatggattcgatttcagcagtagcggcttcctttgcagactgcttttcagcaatctgtgcagcaaagtcaacggttgcttttacggtcttggtcttgttcttgcttcctttgggacggggcataagggacacctccaatgttttttgatggcttcagtataacactcgttttttatgttcgcaagaggtgcattttgtagaaataaaaatatatctatgagtgaagcaataaatcgattttggaatatgcactggcgtgggtcgctaactagttgaggaatatcccctgctggtcgtagagttgttcaaagcatttggcaacggcatcttttacagtcatggataaagttcacctcaatatgatggtagagaagttcgtgcagttatgcatacgcatctgcgtatgatgcaaaagtattttatgatacagagaatgtgcagccgcgtaatggcaaagaatatatttaataaaaaagtatcctccatagtgataatggaggaataacgtagaaattatgcgccattacgttatatttggcgcgttcctgcccctcatggacacctgatgggagaaaattcggttcatctcccggcgctttcgggtcaggtcagagtgcacatagcgctgcaaggtgatgttggcgttagcgtgtcctaacaattcgctgagggtctttacatcgcaccccgcctgcagacaggtcgttgcaaaggtatggcgcagcgcgtgcggacgtacttgccggacagttgactgcttcagatatgccttgatgctttttcggtagcaacggggttcggtgggcttggactcgttaccggacagaaaccatgtggcattgctgacacatccacgcagttttttcagcataataagcagctgcttcgggattggaatttcccggcgagaggtgcgggttttaggcgtttggatgactacctttgtatgtccatttccgtaggaaattcggcagaccgtccgattgatcttcaacgtgccaagtttcaggtcaaaatcgccccactgtaagccgcaaatctcgccaatacgcagccccaattccacccctaataataagccaattttgcggggcgtggggttctcctgtacatactgataaagccgctgctgctccgccggggagagaggcacagaaattttgtcgacagctttgggcaacgctacttccagctccatcggtcggatcagtcgtaaatgtgcagcatacttacagatacggcgcagcatggagagacattcccgggcagaggaatttcccagcggcttgtgcgtggcatctgtgggcgcgatgatttgctgcatggcctgttccagaaaactttcctcaagagatgcaacgggcactttgctcaaaaccgggagaagatacttgtgcagcgtgtacgaataatgcgcataggtggattcttttatgctgttccgcagggagtgcaaccacacctcagccagtacttcaaaggtcaggtcggttcttttcaggttgtagaagcctgcctctgctttcttttgaatcagcactcgttttacctctgcatagactgttccgtagacgtagccccactggattttgccttcttgtgtgcgcgctttgatgtatcgaccttcccaccgaccatccttgcgtttgtgaatgttttctccccgtcgtgccatttctgtttcctcctgcgtcttggacacccatctgaccacttattctgtccaccttcgttttttgctggatttttcatgcagaactgggcaatgtgcaaaaaactttcagcttctgcgaggttttttctaaggtcaggtgggatgcatttgtaaggatttctattgattcccagatataaccatgataaaataagagaagaattcaaacaacgatgtcgaaagattggtatcctccattatcactgtggaggatacccctttatgcgggaaggggtgaacaaggtggcattgcgtctgtttgagcacaacgagaaagcatatcatgcggcagtccggatgatggaccagtatggcaaggctgccattgttcatcccaccggcaccggaaagagctacattgcgttcaagctgattgaggacaacccagagaaggtcgtaatctggctttctcccagtgaatatatcttcaagacccagctggagagcctgaaaaggaacgacccggattttccgttggcaaacgttcacttttatacctatgccaaactgatgtgctgcacgcaggcacagctggacgaaatagcagtgcagaagcctgcctatattatactcgatgaattccaccgtgccggtgcggaatgttggggcgaaagcacggtggctttattaaagttatgcccggatgcaaaattacttgggctgacggcaacaaacatccgatatctggataataaccgcgatatggccgaagaactttttgatagccgtgttgcgagcaacatgacccttggcgaagcagtcgtcagggggattttgcctgccccgaaatatgtgaccacggtctaccagtaccagaaagcacttgcgaagtatcaggcgcgggtggataacctgcgagcaccgggcattcaggatgtgaaccagaaatatctggacgcgctgcgccgcgctttggaacaagcggatggtctggatagggtctttgcacatcatatcacgaataagactggcaagtacattgtgttctgcgccaacaaggagcacatggacgagatggtatcccatgtgccggagtggttcgccggggtcaacccggacgtggtggtgtacgaagcctactccgatgacccgaataccgacaaggcgtttacagacttcaagacggatacgaccaaccggctgaagctgctgttctgcatcgatatgctcaacgagggcgtccatgtggagggcatttccggggtcattctgttccgacctaccatttctcccattatttacaagcagcagattggccgcgccctgaccgccggggacaccgcagccccgctgatcttggatgtggtcaacaatttcgagggcttgaccagtatatccggtctgcaaagcgagatgcaggaggcggttcaccggctctatgccaacggtgagggcgacaagatcgtgaccgagcggttcgaggtcatcgagcaggtgcacgattgccgggtactgttcgaacagctgcaggcaagcctttcttctggctgggagcactatttctctgaggcgagcatctactatgcggagcacggcaacctgaacgtcccgaaactgtataacacgcccagcggtctgagccttggggtgtggctggtgacccagcgccgggtgcgcgaggggcagatccaaggaaatctgaccgagcagcagatcgcacggctggacaacatcggcatggtctggggcaatcggaaggaaattgcgtggcagcatggatttgaggtcgcgaagaaataccacgacacctacggaaacctgatggtggccagaaagtatgtagccccggacggctatcccttgggacagtggattcttaagacccggcagcaaaagctgaatgaccgcttgaaggaagaacgcatcgcacagcttgatgagattggcatggtgtggagtgtttttgatgccaagtgggaaaaggcttatgcgctggctgccgcctactatgaggaaaacggcaatctgaatatcccacgttcctatgtgacagcggctggtgaacggctggggcaatgggtcgcaagccagcaatgggcgtacccgaaaggaaaactgacggacgaacaagtcgagcgtctcaaccgtatcgggatgtactggggcaatcgtaatgaccgccagtggaacgaggggtatcaggaagcgaagcgctattttgatgcccacggcgacctgaacgtcccggctgattatgtgtcgccgaacggatataatctcggaaattgggtcaagcggcagcgctacacccgccagaatcctgaaaaaagctgcgctgtcctgacagaggagcgtattgcaaagctggatgagatcgggatgcggtgggagaaagcggattcgaggccgcgccggttagaactggcacaagagtccaagaggaaaagtgaaaacctgaatgcttcggctaaccacaaaacgggggaagatatcggtttgtgtagttgatagcgcaatccaaagcacttgctgcaatttgggtcggagaagttacgtgagtcgtaaaaagaaaatctaaaggagttattggagaggattatgtcaaagattcagcatgatgtgatgttgagggtcgtgaagatcctgaatgttctgatgatcgagctaccgtttgcggcttgctggttcctgtactactcgcaccagacctatgcaaatctggcatgggagggtcattttgcgattttaggcctgttttttatcctgtacattgcactcggtaaaatctacgatgcgttctggatgtcgatgcagcgggtctctgagttggtgtacggtcagatccttggcgctatggcaaccgatggtattttgtacatcgtgatctgcctgatgtcggcaaaactctgcaatctgttgccgggtattgcggcaattgtggggcagctggtgatggctgcgatctgggcatcctgcgcacataaatggtactatacgaccttcccgccgcagaagaccgcagtcgtctacgatgtgcgtcatggtatggaaaagctcatcaacgagtatggtctgagccagaaatatgatgtgcaggtcaccttgagcgtgtcggagtgcttggcagatctgagtattctggacggcatggaaacggtttttgtcagcggtgttcacagccatgagcgaaacattatcctgaagcactgcgtagggaagggcatcaatatgttcgtcatcccccgtgtgggcgacgttattatgagcggcgcgtggcccatgcatatgttccatctgccgatgctgcgcgtcggtcgttacatggcaagtccggagtttttgttcgttaagcgcgcaatggacattatgatttcgctggcagcactgatcatcctgagcccgttgttcctgattacggccattgcagtcaagtccgatggtggtcccgccttctacaagcaggtgcgcctgaccaaggacggcaagcagtttgagattttgaagttccgctccatgcgtgtggatgcagaaaaggatggcgtagcacgtctttccaccggcgacaaggatgaccgtattacaaaggtcggtcacattatccgtgcctgccgtctggacgaactgcctcagttgctgaacatcctaaagggtgatctgtccgttgttggccctcgtccggagcgcccggagatcgctgcacagtactgcgaggaaatgccggagtttgcgctgcggcttcaggcaaaggctggtttgaccggttatgcgcaggtgtatggcaagtataacaccaccccctacgataagctgcagatggatttgatgtatattgcccatcccagcctgatcgaggatctgaaaattatgctggcaaccgtgaagatcctgtttatgcctgaaagcacggaaggtgtggcagagggggcgactacggcgatggggcaggagacgaagtgatgcagaattacagcgttttaatgtctgtttatcacaaagaaaaaccggaatatttgagacaggcaatagagagcatacaagcgcagacgctctccacaaatgatttcgtgctggtatgtgatggacctctgaacgaaccattggatagcgtaatcgcagcgaagcaacaggagatgggtgaatctctgaatgttgtccgcctcgcgaagaacggtggacttggcaacgcactcaatgaaggcatcaagcattgcaaaaatgagctggttgcccggatggacagcgatgacatcgcttatccggatcgatgtgaaaaacagatcgctgtgtttaacacacattcggaggtgagtatttgctccggtatcgtggaggagtttactattgatccgcacaccgtcgatacaaggcgtgtgccgcccgagacaaatgcggaaatcgtagagtttgcaaagaagcgcaatccgtttaatcacccctgcgtgatgtataagaaatccgcagtcgaggcagttggctcctatcaggatttctatcttctggaggattattacctctggcttcgaatgctgatggcaggatatcagggttacaacattcaagagccgctgctccatatgagagctggctcggatatgtatttaagaagagccggttggaaatacgccaagacgcaggccaagttgttcaaatttatgaaacagcaaggctttattggagaaggacagtacataaagagctgcgtgattcgcagcgggtcggcgctggctcccaactggctgcggaagtttatgtttgagagggtattaagggatgcaggctaagacagaaaaccgaaatcaatttgtggatatcatgcgtggcatagcgatgcttctggttgttctgcaacatacaatgagtggatgtacggtcggagcagaaaacacatttgtgtttaatattgcatggtccttgcagatgccgttgtttatcttgattagcggatatgtaacgaaatatagccgcccaatctctgatggtaaggggctgtggaaatatgtgaagcgtagaacggttgcttatatgctgccgtgggctgtatggagttttttggttagaggcatcatctttggagaggatagtttcctaaacgttaagcatctcctgtggaatatggattcaggttattggttcctcgcaacgatttggacgattagcatgattttcggcgtggcgtctttcgttgcagagcgggcgagcaaagaaaatctgctgaagaaacagattgtacttctggggtgctacttggcaggaatggttctgctggttggaattggcgtgattttaggactttcgttctttgcaatcaaattgacgctctattatatgcctttctactatgcaggatttttgtatggtcagtttgatgataggatgaaggaatctgagactggcaaaaagatgattgatagcgtagttgctatctgttttgtaatgtggctgttcgttattcttagatttccgctttatgagatgtcggatggcggctttgcgattatcttacgtgcggcaacatcgttggctgggtgtattgcagtatgtggactctgcaaggggatcttctccgaaaaatcggggggggg

SEQ ID NO: 13800 - DNA, 1091 bp, Unknown
  gut microbiota DNA sequence
ggacgaagcaccaattctatacagtccgacagggctgagcatggttctggtcaactatgtgattacggtagcacttactgtgatggcaatagtgatgatgagtcaaaatgttgtgctgagatttgtattaaccggaaagaaaaagtaagggatgttttcctttgggcaggaaaacaaagcatggaaatttacatgatgcacggcctgcttctcaatatcttcaaaagcagtgctgtaatccaatttagcagtattgaagggtatttactggctgccggaaactttgccctgacaatagggctatgtgcagtggttatccgcctgctcaatcaaaatgttgtactcaagaaagtattaaatattcgataaatggtcaaaggagaaatgacatgcatccgagagtgctgatcgtaggaacagttccatataacacaaaatcaacgtcacgcgcttttgatgcgtactttcactattgggagaaagaaaatcttgcacagatattctccaatacaaagaagccgtgcaaggggcattgcgagacgctttttcaggttacggatcaccgtgtgttgcagcggtggatggggaagaaagtcgataccggcgtaatctaccactatgatgagcttgacacgaagtggcttgacaatgatttggaactcggcgatgcaaaagcagaagccgcctacaagtttggtggaaagcatacgccccttacgcatttgctcagaggaatcctctggcgaaagaggttttggtgcacagagaagctaaataattggctcgacaacttcaaaccggaatgtgtgtttctggctttttcggatgactattttatcccgcagattgcaatgtatgtcgccaagaggtataacgtcccgattgtctcctgcattggcgatgactactatttcaatgtggagaaaacgctgaatcccatctatcacctttataaatcgacttataaaaaattgattgataaggttctggcatggccgggcagcgcaatttacatcagcgacaagattcgggataagtataattcggaatttggactggacggcgaaacggtttatttgacttctacggtt

SEQ ID NO: 13801 - DNA, 16600 bp, Unknown
  gut microbiota DNA sequence
aacgagaaacggctcacccctttaccgcattttatgcagcagccttagtcctcatgcggtgcggagggcttttcggggtctggggcgggaaggggttccagcgtcagccagaagtcctcctgttcctcgcggtcttttttgttggggttttctgctttatccatatagcatccctgcctttctgcataaagggtcgcccggtgggctatgctttatgcacaaaaaggaggcagagccatgaaacacgcaaaacgcagcggctggcgtcccttctgggcggcgctgtgcgccgccctgctggtgctgctgccgctggtgggcggcacggtgctgctcagccgcgcccagctgcgcagcagcctgcggcaggccgcaaaaagccagagcggggtgcccatccgtctgcccaaagccactgaccggtgtaccgtgctgctgtgcgtggcagacgagaccccgggctttgtgctggcttacctgaacgccgggcagaactgcatccatctgctggcggtgcccgccgcgctggaagtgccctttgggggcaaaaatgtcccccttgcggactgttacgccgccgcaggccccgcccgctgccgggaggcgctgggcgaggtgttcgccctgccggaggataccgattatcttgccatcgccccggcggtgctgacaaagcttgcggcgcggtacggcgcagtgcgggtgggttttaccggggcgctcacaccggagcagctggcgcggtacggcaaaggcaccggggtgcagggcatttctgccgccgatgcccacagctttttagcggcgctggatgccgacacttctctttcgccccggcgcagcgccgccgcccgggcggcggtgtgggatgcgtttttccggcaggcgctggagctgctgcccaccaccctgccgcagggtctgcgggaggtgagcagcagcctgctgaccagcctgaccgccgtagaccttgctacactggaacgcacgctggaatttttagccaccagcgccgagccggtggatatcaccgccgacgccctgcccggggactgggcaggcggacactatacggtgtccgatgcctcccgggcggcggtgcagagctttttcaacctctccccggcggcggcgcagtccgcgtccggcagtgagccgtaacccagcaccagcgtcccggcggcagagtgcgccgtgccggtcaggtcgtagtcgctcagtagggaacagcgcaccccgtactgccgggcagcagcccgcagggcggcgtccggcggcgggtctttcagctgtgccagcaggtgcagaccggtgtgcaaccccgcaagggtcagctcctccggtgcaaaggaggtgcgcagcgccgccaccagcgcatcccggcgggctttgtaggcggtgcgctcccgcgctaagtgccgggtgaaataccccccggtgataaagcgtgccaaggtctgctgctcaaaccgtcccaccgtgccggagtacagccggtacttggcctgccacgcgcccagcagctgccggggcagtaccatataggcaatgcggatgcccggggcaaggctgcgggagcaggtggacaggtacaccaccgggccgtctgcgcccgccatgccctgcaaactgggcagcggacgggtgtcgaaacggaactcggagtcgtagtcgtcctcaatgatgtaccgccgtcccggggcgcgggccgcccagtgcaacagctcggcccggcgtccggcgggcatggtgaccccggtgggaaactggtggctgggggtgacgtagcacaccgccgcatcgctggcggaaagagccgtcagcgacagcccgtccgcgtccaccggcaggcagcggcagggcacgccgttgttttccagcacctgccgggcgcgggggtagccgggagtctccacggcagcagggccgggcagcagcggtgccagcagccccagcagatattccagtcctgcgcccaccaccagctgctccgggtcgcactgcacgccccggtactcggccagataccctgccagcgcctgccgcagagcggcatcgccccgggcatccccgggagtgagcagttccggcgcggagtacagcagttccttttgcagccgcgcccatgtgcggaaggggaacagccccgggtccacgccccgggtggatagatcgaactgcaccggcggggcggtatcggcggggggcgctgccaccggcgcagagggcgcggcgggcggctgcaccccctgcggcagggcaagatactcctgcactgtgaagccgctgcgctcccgggcagtcaggtagccctcggctgccagcatctggtaggcggtgtccaccgtgttcaccgagaccgacagctccgccgccagccgccgcttgccgggcatccgggtgcccgccgtcagggtgcccgcccgcatctcggcggcaaggctgcggtagagctgctcgtacagcggcaccgccgaagccgggtccagtgccgtggtcagatgtaccatagaatgtccctcccatctgggtattgcgtcaaactgaccccataaaaaaactttattctgggtattttcatggggtcagttctgcgtataataggagcatacccgccggacacccaaatgtcaagtagttttgtggggttatcggcgcgattggagggaaagtatcatgtctactactgcaatgtggctgctgctggcagtcgtcgttatcctgatcctgtttttcagtgtgctgtacaagcgccgctttacggtgcacgagctggcgcttaccggcgtgatggctgcgctgagccttgtggcctacctgttcttccgcatccccttctacggcggctcctcgttccatctgggcaacacctttaccgccctgacggcgctgctgctggacggtgtatccggcggtctggcgggtgccatcggtctggcgctggcagatatccttgccggtgacccgggctacgctattaccaccttcgtgctcaagttcatcatcggcatcacctgcggtgccgtggcacataaggtgttcaagctgcgggatcaggatcgtcacagcgccgggtatctggtcaaggtgatcgtttctgcgggttccggtctgctgctgaacgtgttcactgaccccttccttggctacttccgcaacgtgtacatctttgggcaggagtacaccgtggcacaggcgctgaccaaaattgccggcggcgtcacctttgtgaacagtgtggcttccactgcctgcgccgtggtgctgtatctggcactgcgccccgcgctggagcgtgcaaagctgctttccaagggcgagtaaaaataaaaagggatcctgaagcgccagctggcgcttcaggatcccttttttgttaccgctttcggctgcaaaggtgctttgcggcgtcccgcccggcggcaaggccgctgccgaacgcccagtgcaggttgaagccgccgcagctgccggcgcagtccagcgtttcacccacgaagtacagccccggacagcccttgaactggaaggtgggttccacctcggtcagggcaagcccgccgccggtggtctgtgcctgccgccagccgcagggggtaagcccctcgaaccgccagtgcttggcggtgcgggcaagcttctgccagctgcctgcgggcagggcgtggggggcggtatccggcagggcggcagcttcccagagggcgtagcccagcttgacgttcaacagccctgtccagaacccggcaagggtgtcggatgcggtttggatggcgtgccgggcaagcaggcgggtcaggtctatctcgctcagctccgggaacaggtcaagttccacgacagggtctctcagcctgcgcccgggggcaagcaggccggacagctgcatgatacagatgccggaaagcccgtagtcggtaaactgcacctcgccaatctcttctgccagcacccggtcgccgtccagcaggcgggcggcggctttggcgcggatgcctgcaaggctcttgttcggctttgcgcattgcagggcggtcaggcaggggtaaagcggacgcatctgcccgccgcagtcggcggcaaagcgggtgccgaagccgtccgtgccgaactgcggcccggcggcgccgcccatggcgcagataacggcatctgcccgcaggctttcggtgtcgccctcggcgtttgtaaactgcacggcgtagccgcccttgctctggcgcagggtgcttaccgtgcagccggggcgcagctgtacagtgtgccgctgcaaatgcagctccagcagcgccagcacgtcggctgcctgattggaataggggtacacccgcccggcctcatcggtgcgggtgtacagccccagctgctcaaaccacgccagcggcgcggcggcatccaccgccgccagcagggggcgcagtgcggcggggtcggcggtgaagtacttttccggcgcaatggcggtgttgtccagattgcagcggccgttgccggtagccagcagctttttgcccaccttggggttgcgctccagcaccgtgacgcggacagcgggcgcggcctgtgcagccgccagcgcagcggccagtccggcggcaccgccgcccagaataaggatgtgtgccatgcggacacctgctttctttgggtttattcctatttattgtagcagaaccccgcccggaacgcaatgcggcgggcaaagcaaaaaatgtgctgccggtataatttgccgccgctgacagatactacatacaaaggaaaccgcaaggagggcaaaataatgaaagcaaccggtatcgtgcgccgcatcgacgagcttggcagggtggtgatccccaaggagatccgccgcacccagcgcatccggcggggcgacccgctggagatctttaccaccggcgatggggaagtgatctttaaaaagtactcgcccatgggcgaggtgaacacccttgccgcccagctggcagaggtgctcagccgccagtttgcgctgaccgcctttgtgtgcgacagggaccgcattctggcggtcagcggcagcgggcggcgggagctgaccgaccgcagcatcagccagccgctggaaaagctgatggaagcccgcaagccctaccagagccccggcgcaccggaaaagaccctgctgccctgcgagggcgcaccccgggtgctgctatgcgccgcaccggtactggcgggcggggacgtgaccggcgcggtgggtctgttgaccgaggaccgcgccgcctgcccggaggacgcccagtgcaaggccgtggcagtggcggcggcctttctggcaaagcagatggaggagtaaggcgggacgattaaacgcatttttatgagggagtttcacccgcaaaaacaccgccgcccggcctgtgaaagcaagccgggcggcggtgtacatgaaaggatgaatgagaaaatgattagttaatggtcacgggcacttttttcaggctgttccatgcgcggatgatgcgtgcattggtcaccttggtgtccgggccaaaggttgcaccgtagtcggacatcagaccctgctctacgcaccagcgggcagccttctgctgctcgatgtcgtcagcggggatatcggtgtacagggcggtgcttacggggtcgggcttgccggcagtcgtccacaggacggttgccagctcctgacgggtggaggggataaagccgcccggcagcgcatagtgcagatacagggaagaaccgtaggcataggtaaggtaacccagacccgcagcgcccagcacgatgccaagtgcggctgcaccggaggagaacgccgagtcgatctcggagtcatccagtgtaggcggtgtaggctccgcggtcaccagcacgatggacttcggctgggatacctcgatggtgtaactgccgtccgcgttttgttgtacgctatccataatggattcgccgtctgcaaggcagtcggtcaatacggtatcggtctttacggtaatggggtttgcctgctcagatgtaccgtgaggcacataaagggttccgtagccgttttcagaaaagtcttcatttacaggcacttggaaggttctgccattctgatcgcgcacagtggcaaagccggtgttgctgccttgcggcatgataggctttgccacaaaataaccgccggtgatagaaagattgcccgtgctgatggtgtatacatccacatctttggtaaacaggccgccggtgatggaaagcgagccgtaacgtcctttgttgacaaccacgccgtcaaacaggccgtcgctgatggtgatggaagcgtcaccattcatgagcagcactttcttttcaaaggtcccgccggagatggtgccccggttggacgcttctccttggaaggtgccgccggagatggtgccccggttggacgcttctccttggaaggtgccgccggagatggtgccccggtagttgttgttcacatccccttggaaggtgccgccggagatggtgccgtcgttggacatagccccttggaaggtgccgtcggagatggtgccctggttggacgcttctccttggaaggtgccgccggagatggtgccccggttggtggtccaattgccggcggtgccgcccttaaattcggcagatctcttaataaagagacccggctgcaatgcgcttgctgccccgggctccgaggagggctgcagggtgaaggtgccggagttcaagaacaaggcggttgcgttgtagtaccaatgggcaacgtcaccttggcttgtgggattgcctttggcgtccagatcgatggtaatgctttcggcggtgttgttctctgcgtccagatcacggctgctgcgggtggcggcttcctcctcggtgctgcgggagacgtcggcctcctgtacaaggggtgcagcctttttggccgtggtctgggcgggtgcatcgaacaccggggcggctgccagtgcagacaccggcagcagggacagcagcatactgccggtcagcaggatgcttacaatgcgtttggctttcataaagtttcgctcctttcgtgtgggttttatacggggtgtcgttaccataaatataccataaactaggcaaaaacaaaagaaattctgcgcgaatgggggttaaaactgcgcgaatggctgaaaaaggggggaaaactaaaacactgctgcccggggatgttctcttttgacaccaaaagagaaccagaaaagtgccagcgatttcgacgcgctggagccacgaaaaaggggctgctcgccccttttaaccccaaaggggtgggctgcaccggaaaaaactgaagattcacgcctgttcggcgtgaagatcttttaaccgttttttccggctccgccgatttgaagcccctcagtcgctgcgcgacagctcccccaagggggagcgggcacgcccgcaaactttgcgcttgagccggaaactgtgccaccatgccaaaggctccccctgagaggaaagactccccccggccggggggagatgtcgcgcagcgacaaaagggggaatctggcacgccgtcaggcgtgactgagagggttcagccccgccccacctagggcgcacatcccctttatgacagaattatgaatctttataaacatttttgcaaagggcttgacagcagggcaaaaacggttataatggtcttagcactcaggaacaaggagtgctaaacaaacaaaagcaatacaaaaaggaggcaggcgctatgacgatggatgcacgcaagcaacgggtcttgcaggcaatcgtggcgctgtatggccttgagggcgagccggtgggcagcagcgtgctggcaaactactttgacatggcagtgtccagcgcaacgctgcgcaacgagatggcggcgctgacaaagctgggtctgctggagcagccccacaccagcgcgggccgcgtgcccagcgccaagggctaccggtattatctggacaacctgctgaccgatgatcagccgctggaccgcgttacccgcgcccgggtagatgcggtgttcgccagccttgaccacgagccggaaaagctggcacagggcgctgccaaggcgctggccgccatcagcggctgcaccgccgccgtcagcaccccctgcgccgaggatctgtgcatcgcccattacgaggtggtgcaggtgggccgcagcgcagccgctgtgctggctgtgaccaccgccggttacgtccgcacccgggtggcgcgggtacgcaccgggctttcccgggaaaatgcagctgcccttgcggcgctgctcaaccgcaaccttacctttgtggcgccggtggatctttccacccggatgctcagcgagctgtgcggccagatcgcaccggagcttgtgccggtggtcagcgccgcagccgcaattttgcaggacagcgtaaagccccatgtatttctgggcggcgagcagtacctgctggactggccgcagctggacggccgggtgggtgatatccttaccctgctgaacgacgaggaacaggccgcaagcctgatcgcacccccggaaaaccgcagcgaaagcgtgctgctgggcgaggatctggaaccgcagatccccgggctgtgcatcgtgagcgaccggtatctggtaggcggcgggctgtggggctccattgccctgatcggccccacccggatgcccttccagaagctgatgcccctgctgcacgagtttgcagaccagcttggcgagggcatgagcggcaaacgaaaagacaccccgcaggctgccgtaccacggcggactgtgatctataaggaggatctggaatgagcgaagaagcaaagaacacggtgcccgagaccgagcagccggagactgcccccgaggaaaagaccgctgccgcagcgcccgaacaggctgctgccgaggctgccgctaccgaagaggacaagaagaaggacggcggctggttcaacaagaaggcccgggagctggaagccgttaaggcaaagctggatgcagcggaaaagaatgctgcacaggccaaggatcagctgctgcgcatggctgccgagtacgacaactaccgcaagcgctccacccgcgaggccgaccagaagtttggcgacggtgtttcccatgcagtggaaaagatcatccccattctggatacgctggatatggctgccaacgcccccaccactgacgagaactacaaaaagggcgtggtcatgacgctggataaggcggcaaaggcactggaagccctccatgtggaggagatcgaggtgctgggcaagccctttgaccccaactttatgaatgctgtgcagcagatccccgccccggacgggcaggagagcggcacggtggtcaccgttttccagaagggttacaagctgggtgacaagatcatccgccatgcaaccgttgtggtggccgaataaacaagccgaacctcccgcaagggagtttgcaataacatccgcttgacatcatcataagcatcatataaacaagatttgttctttcgagaggagacttcattatgagtaagattattggtatcgaccttggtactaccaacagctgcgtggctgttatggagggcggcgagcccgttgtcatcgccaactctgagggtgcccgcaccaccccgtccgttgtcggcttcaccaagaccggcgaccgtctggtaggtcaggttgcaaagcgtcaggctatcaccaaccccgacaacaccgtttcttccatcaagcgtcagatgggcaccgaccacaaggtgaccctgaacggcaaggagtacactccccagcaggtcagcgctatgatcctgcagaagctgaaggctgacgccgaggcttatctgggcgagaccgtcaccgaggctgtcatcactgtgcctgcctacttcaacgacagccagcgtcaggcaaccaaggacgcaggcactattgcaggcctgaacgtccgccgtatcatcaacgagcccaccgcagctgctctggcttacggtgtggataaggaagatgaccagaagatcatggtctacgatctgggcggcggcaccttcgatgtgtccatcatcgagatgggcgacggcgttaccgaggttctggccaccaacggtgatacccatctgggcggcgatgatttcgaccagcgcatcattgattggatggcagacgccttccagaccgagaacggcatcgacctgcgcaaggacaagatggctgcacagcgcttgaaggaagctgccgagaaggctaagatcgagctgtccagcgcaatgagcagccagatcaacctgcccttcatcaccgccgatgctaccggccccaagcacctggatatgaccctgacccgcgcaaagttcaacgaactgaccgctgatctggtcgaccgcaccatgacccccgtgcgcaaggctctgcaggatgcaggtctgcgtgcttccgacctgaagaaggtgctgatggtcggtggttccacccgtatccccgctgtctacgacgccgtgaagaaggaactgaactgcgagcccttcaagggcatcaaccccgatgagtgcgtggctgtcggtgctgctattcagggcggcgttctgaacggcgagaagaagggtctgctgctgctggatgtcaccccgctgagcctcggcattgagactttgggcggcgtgtgcaccaagatcatcgaccgcaacaccaccatccccacccacaagagtcaggtgttctccaccgcagccgacaaccagccctctgttgaggtcaacgtgctgcagggcgagcgtgagtttgcccgcgacaacaagagcctgggtgtgttccatctggacggcattgctccggctccccgtggcgtgcctcagatcgaagttaccttcgatatcgatgccaacggcatcgtgaaggtcagcgccaaggatctgggtaccggcaaggagcagaacatcaccatcaccgcttccaccaatatgtccaaggaggacatcgacaaggctgtgaaggaagctgagcagtttgctgccgacgataagaagaagcgtgaagaggtcgatatccgcaacggtgccgaccagatggtgttccagaccgagaagatgctgaaggagaacggcgacaagctgcccgcagacgtgaagagcgatgccgaggcaaagcttgctgacctgaagaccgctgtccagtccggcaatgtggacgacatcaaggcaaagcaggaagccctgagccaggtgttcgagaagatgtatcaggcagccgctgccgcacagcaggccgccggtgcacagcccggtgctgacgcaggcgcagccaacgaaaagcccaacgatgacggcgttgtggatgccgacttcaaggaagtctaagtctgaaacaaagcgctgtgtccggccaaaccggcgggcacaggcgcaataaagcaaaagccgctccggtttaggccggggcggctcttgctggtttataagtaaaagagttctcgctgccgcaaaagccttcccccggacgggggaaggtggcatgacgcgaagcggcatgacggatgagggcgcagacaacagctgcgaaagaccaaagcgggagcttttgaacaggaggaaccgaccggggcgttacccggggagggcgttcccggagaggtgagtggatatggcacaggaaaagcgtgattattacgaagtgctgggggtatccaagggcgcaagcgatgccgagatcaaaaaggcataccgcaagcttgccatgaagtaccacccggactataaccccggcgataaggacgccgaggcaaagttcaaggagatcaacgaagcaaacgaggtgctttcggacccgaaaaagcgccagctgtacgaccagtacggctttgccggagttgaccccacctacgcagcacagaacggcggcggccccggcggcttcagcggttttggcggcgacggtgtggacttgggcgacatttttggcgatatcttcggcggcggctttggcggcttcggcggctcgtcccgtcaggcaaatcccaacgccccccgcaagggtcaggacatccgggtgcgcatcaccctgagctttgacgaggccgtgcacggctgcaagaagaacattaccatcacccgtcagcaggagtgcaccgagtgtcacggctccggctgcgccgccggtgctagccccgagacctgcccggactgcggtggacgcggctttgtcatccgccagcagcgcaccccctttggcgtaatgcagacccagcagccctgctcccgctgcggcggcaagggcaagctggtaaagaacccctgcaaggtctgccacggcagcggcaaggtggctaccaaaaagacgctggaggtgtccatccccatgggcatcgacgacgaccagagctttgcactgcgcggcatgggcgatgccggtaccaacggcggccccgccggtgatgtcatcgtcatggtcagcgtgcgccccagcgaggtgttccagcgcgacggctacgatgtgtgggtcaccgtgcccatcacttacagtcaggctgtgctgggcgacagtgtcaccgtaccctccattgacggcaaggtggagtacaccgtgcccgagggcacccagagcggcaccaccttccgcctgcgcggcaagggcatccagtacctgaacggccgtggccgcggtgatatgtacgtcaagtgcgaggtggagatccccaaaaagctgaacaagacccagcgcgatgccctgaaaaaatttgagggcactttgaaagaagaaaactacgaaaagcgtaagggcttcttcaaaaagctgaaggatatgttcaacgcataaaaaccaaacggcggcgcgttccattggagcgtgccgccgttttttgcgtgtgaaccctacaaaaacagcggaggcgctgccctttcgggcagcgcctccgcctgctttgttctttggtgtactccgagccggtcttatgagataataagatggatcagagcaggatgatcgctgcgttgatgaccagaccgacaccagaagcggttgaagtgacgaaccatgcagcgcaggcgaggtcgcggatggtgttggcagtgctcttctccatatcagtagccagagcatccagacccttctccatccaagtgttggggttcttacggcggtagtcgcggacagcggtcacgcctttgaaccagccgtacggaggaatcagccagcacagcagagcctcagacatggtagcagtagcgccgccttcggtgtaggtcatttcctcagtggacaggacgttgtaatacgcgggcatcatcattttttccataataacactccttttgaaacaaagctatccaaaacggtgcacccaaaaacgcaccgctttttctgaataaagggtctcagcgcacgaccagcagaatggcgctcaggggagccagtgccaccaccatgatggtggaaacggcatcccgcacaaagttgccggcggatttgcccatatcggcggcaagggcatcggtggcgcggcccatcacggtaaagaagttgccgtccttgttgccgtcctgctgcagccatgtgcgtgcctgcttgatgccccagatgtagctggaggccagcaccacagcacctacgaccgttgcggcagtagtggcgagactggcagcatcatccactgcgccgccgccggtggtataggtcatttcttcgttggaaagtaccgcataatctgcgggataattcatctttttcatcatcaatactcctttgtcaaagggaaatgccgcattgcatcccgatcccccggcgtctatacccaaaggctgatagagcattgttctctatatggccattctacaacagtggtcggattttatcaaggggttttggcacatctgtgcaaaaactggcgggacgcatgaaattgcggctataaatttgtgaaaatagactgcaataatttaggcttttggctgtttagccctgtaccccggcgcggtagaggtaggggtcgctcttgaagctgtcaaagttgtacagcacaaggatctggtcgtagccgttatcggcgatcagcttgtccaagccgtagttgtagttgcggaagtccaccacgtcgatgtcggcgtagttggcggtcaggtagggtacaaagcagttggcgtagctgtccttgatgacaaggatgcgcccgctgccgttgccctgcacccggcttaaaccgttgttgccgtgcaggaacatggcgtatttatcataaacggagagcttctctgtgtcgtacaggccggtggtctgcccctcggtgggctggcctgccgccgtcacgttccataccgtcagggtgttggcaaggtcgtagtaggtgatcacgtccggcacggcgttccatgtgcgcgccttggcgtagtgggtgccgtaaaagccgtcggcagtcagcgcagtgtgggcggcggtatcaaagggggtaaggccaagggtctggcacagctggctgtaagcgtagtaggcgccaaggctcgtccagtggtggtcggtgcggtaataaatatactcgctcttgtgggcggaaagggtgggacgcacgtccacaaagctgccgccggccgcctgcaccgcagcagaaagctggtcaaggtagccgtcctcgtccagcaggggggcgtttgcgggcacgttttctttatagatatcgctggcggcgggtgccagcagcacattcaccttgcccgggtagcgctggcacaggctggtgagcgctgcggtgtttttgggcagggtgcgctcctcgctggaaagcagcccgtaggtgcgggggaacatcatgtgctccttgcccagcaggatgccgccgttctgctgcttttgcagcagagtggtctccaccacgctctgcaggctgatccactggtcgcgccccgccacctgatccttgacgtatttggtgtaggcggtaaagtagctgttcagccccttggcggtgaactgggtcagcgccggacgctggctcagggtagtgttctccaactcgctgtaactgcggtccggggtgaccatatccagcgcgaacagtccgatgaaaaacaggctgaacaccaccagcaccgggtagtgcaaaagggaggaggtctttttctcgtgtttggacatcttcccgcctccttaaaagttaaaatacaggaacgggctgttggtgctgcccaccacataggcggtggagaccaccagcagcgtcaggatggcggcgcagcgggtgaccacgttcttgcgcagcacatcccacagcttttcgatcagcggggtgcagcacaccacgcttaccgccagcagcacgccgtaattccgcaggaaatacagcggcgataccccgccggaggggataaagagcttctggaacagcagcccgaaggacacgccggtgtcgttgcccacgaacattgcccagcctaccaccacaaggaacagggtgtagaaatgcggccacaccttaccctttttcaggtagggcagcaagaacagcttttcagccgccagcagcacaaagtagtaaagaccccagcagataaagttccagttcgcgccgtgccagatgccggtgagcaactccacgatgaacaggttcaaaatctgccgcttaaggcccttgcggttgccgcccagcgggatatacacatactcccggaaccagccggacagggtcatgtgccagcgccgccagaactcggtgatggaagcggagatataggggtagttgaagtttgcagggaagtcgaagcccagcatcttgcccatgccgatgcccatgagggagtagccggagaaatcgaagtacagctgtaagctgtatgcgatgatgcccagccacaccagcggggtggaggcgtttgccagacccacaaaggtggtggaggggctgtctgccaccccgatgatatccgtccacagtgcgcccacagcgtccgccagcagcacctttttggcaagaccgaaggtgaacagggtcatgccctcttcaatctgctttaaattatagcggtgcttgtagacgtgcagctggtcggagacgtcccggtacttgacgatgggccccgcgatgagctgcgggaacatgaccacataagcgccgaagtcgatgatattgcgctcggcttttacatcccggcggtagacgtcgatggagtaggaaagggtctggaaggtgtagaagctgatgcccagcggcagggtgccgatgccctgaatttcggcaaaggcggtgcccagcagggcattcacgctgcgcagcacaaagtttgcgtacttgaagtagaacagcatccctaagctgccaatgagcgctaccagcagaaaaaagcggcgcagcgcgggctttgcatcaaagtgctcgatggcaaggccgctgagatagttgatgaggataagcgccaccatgaccgggaaaaagcgcacctcgccccagcagtagaacaccagactgcacaaaaacagcacggtgttcttcagttttgcgggggcaagatagtacagcgccagcgtgatgggcaaaaagcggaacaggaagatgatggtgctgaaaaccaaggggtcagcctcctttgtgttgtgatgtcaaagctccccccttcgg

SEQ ID NO: 13802 - DNA, 11644 bp, Unknown
  gut microbiota DNA sequence
gctgttcagggcgctgtccacagcactgttcaggtctgcggtgcactcgttggaggcgatcaccatgaccacacggtcacccttggaggagatgatggcgttttccacgttgctctgtgcctgtgcaaactcggcgtagttgccatagaaagccacctgatcctgcttgtagctctccagcgcagtcaccacgtcctgtgccttgccggaagcggcttccaccaccagcacaaggccggcgtcgccgttgtcgttgctctttacgcccttgtaggcggctacgtcctccgccttcaggccgaagtcgtactcgatgttcatggcagcgatctcgaactggttggagatggggttcgcagccagcagggtctccacagcgctgtccagatcggcagtgccgttttcagcggtatccaccgccggagaagctgcatcggagaccggtgcagaggcagaggcgctggacacggaggacggcgcggaagaagcgctgccgccgcagccggtcagggcaacagccagcacggcgctgacggcgatcacagagagttttgtgcggtttatcataaaatattccttcttttgttgaattcgtttgtcggggtgcggggctgcgccgcgcacacgggcagactgtatttatcttaccataacagcaggtaaattgcaacgcaccccacagggttttccggcagttttcatcggattttaaccggtcacggtctccccggcggcaatgcgctgcaaaacggctaccgcgtcctccagacacaggccgctctggttgagcagggcggcgttttccgcgcctacatagcgccagtgccacggctcgtaggtgatgccggtcacgctttccgcctccttggggtagcgcaggataaagccgtactgctccgcgttctcgcacagccagcggaaggcggcagtgtcggcaaagccggtgtcaagggtggtgtgctccgggctgttcaggtcggcggcaaggccgcagttgtgctccgagcagcccggcgggttgacgatggcagcggccttttcccgggcggcggcttcgctcaggcccttattgcggtagtactgggtcttgttgtcgtacagctttttctggtagctgacgctgcggtagccgctctgcatccgcacatccacgccgtccttggcggcagcggcctgcatggagagaaaagcctcggcggcttcggtctgcaaggttttgttgatggcggtggccgagccgcactccttggtctcaacggggtagtcctccgttatccggtgggtgcggctcacaaggatcatgcgggggtcgtccagcagcgcctgcgcctgtgcggcggtaaggaggctctgctgcgtgccgttctcggcgggcagctccggcagctgcggcacagcagctttgcgggtgcaggcgtaggcggtgccgcccgccacaaagcaggccagcgccgtcaggcagagcagacgccgggcgtgatggttacggtgatgggaagaacgcatggaacctaccttctttcacaaaaaaggataagcacccgccgccccgggcagactatccgcaaaagggggcgcgggaagatgaagatgacagcgcaggaatacgcacggcgggtgcaaaaggcggggccgcactcgccgcttttggcagactgcctgtgggcgttctgcgtgggcggcggcatctgcctgctgggcgaagggctgcggcagctgtttttgcggcagggcgcggacgccgaagcggcgggcaccctgaccagctgcactttgatcttgctctcggcggtgctgaccacgctgggctggtaccagaagctggcagcaaaggccggggcggggtcgctggtacccatcaccggctttgccaacgcggtggtcagcgcggccatcgagttcaaggccgagggacgggtgacgggcacgggcgccaagatgtttctcatcgccgggccggtcatcgtgtacggcacgctggcggcggtggtgtacggcgcggtgctctggctgctgggggcctctgctttataatacggaacagctccgccggatattgcagcgccgcagcaccagtatagcacgtgccggggcattttttgtagaaaaaaggagaaaattttatgacagagcgccggggcgataccctgttgttccataccccgccggtcatcgccgcacaggcggcggtgggcggcaaaaaagagagcgatggtccgctggcggcgggctttgacgaactgaccaccgacaaccggctgggacagcgcagctgggaagccgccgaaaagcagctgcagctgcgggcggcacggctctgcctgcaaaaggcgtctctgcccgcagagcgggtagaccttgcgctggcaggggacttgcaggcgcagtgcaccgcttccggctatgcactgcgggagctgggcgtgccctttgcggggctgttcggggcgtgcagcaccatggccgaggcgctggcgctgggcgcggcgctgtgcagcagcggggcggcgcagaacctgctggccatgacctccagccatttctgcgcggcagagcgtcagttccgcaccccgctgagctatggtgcggtgcgcacccctaccgcgcagtggacggccaccgccgccgggtgctgcctgctgcgtccggcagggcagggggtgggcgttgccgccgccacccttgggcgggtgcaggattataacatcaaggatatcaacaatatgggcgcagccatggcaccggcagcagctgccaccctgctgcactatcttgccgatacccatgcagaactgcgggattttgactgcatctacaccggcgaccttgggctggtgggcagtcagatgctgcgggagctgttggcagcagagggtctgctgctgaaaaaccacgcggactgcggctgcctgctttacgatgccggggagcagcgggtaaaaagcggcggctcgggcgcgggctgctgcgccgccgtgctctgcgcgcatatcctgccaaagctgctgcgccgcggcagccgccgggtgctgtttatcgccactggggcactgatgagccagactacctttttgcagaaggagagcatcccggcggtggcgcacttggtagagctgaccgcaccggaaaaggagaactgaaatgaactatctgtgggcatttttagtgggcggtgtcctctgcgcggtggggcagctgttcatcgacctgacaaagctgaccccggcacgcatcctcaccggctatgtggtggcgggggtggtgctctcggcggtggggctgtatgcgccgctggcagagtttgccggtgcgggggcgagcgtgccgctgctgggcttcgggcatctgctggcaaagggagtgcgcaccgccgtggcggaaaagggtgccatcggcatcctgaccggtgggctgaccgctgcctctgcgggcatcaccgcaagccttgtctgcggcgtggtatgcagccttgtgggcaaaagccacgaccagaactgatgttttgtccgcgctgcttcgccacattttgcgcccggcggctggtaaactgggggcaaaacggaggtgaggcgcatgaaacacagcggacagaccgtattgtgggagctgtgggcggcgctgtgcctgtgcacggcgctggtgctgccgccgggcagtccgtggctgcacgagccggcacttttgtacccggggcttatgctggcggcggtggttcccgcagcgtgggcggtgtggtgggttgtggtgccgccgcagccgttgccgccggagcagctgctggaaccggtgcagcggcagagccttgccgcactgtgcgggacataacagcggaaaaaacaaaaacccctgtgccggttacccggtacagaggttttgttcgtcaatcaaactgcgcgatcaagcgttcttgttagcacgctttgccatacggctgatcttgcggctggcggtgttcttcttgatgacacccttagcgcgagccttgtcgatcgcggaaacagcagccaggacggttgcgtccttgtcagcggcattcgcatcgatggcagcgtctgccttcttgacgactgttttcaggttggtcttaatggccttgttgtgagcctgctctgcagcagcctgcacgacgcggtccttctgagatttgatgttaggcattcgttccacctccttggctacctataacagcgcaccctatgataccatatttcgcgtaccagcgcaagcgtttttttgatttttgtttggaaaagttttatttttcccatactttccggcaagaaggcgggcttttgccccaaaaaggaacggagagtgtggaaaatgcgtactacggatatggctgacgagctgttttcagcagcggcgcagccgctgcccgcaggggtgcggctggccaccgcccgccacggcggggtcacggtgacgcgggtggagatcgcccgcgaggggctcagccgcccccggggcaggtatgtcacgctggaaatgcccagcgtcagcgtgctggacgagcgggacgccgctgtcatcgaggtgtgcgcccgggagctgcgcgccctgctgccgccggaagggccggtgctggtgctgggggtgggcaaccgccgcattaccgccgatgcccttggcccgcgcacggtgcagcgcatccttgtcaccatgggcgcgggcgctgccccgccggtgcgggggctgcgcccggtggcagccgttgcgcccggggtggcggcagccaccgggctttccctgcagcagctggcggcggcgctggtgggacagctgcgcccggcggcggtggtctgcgtggacagtctctgctccgccgaggggcagcggctggggcgcacggtgcagttttcggacgcagggctttacccggcgcaggccgaccacacccgtcacctgacccgggacaccgtaggcgtgccggtggtggcggcgggcatccccaccctgatgcaggcgcaggagggggcagaccttgtggtcaccccccgggcgctggacagcgtcatcgcccacggcgcggcgctgctggcgggcagcgtcaaccgcgctttgcagccccgccttaccgtgcagcagctctgctggctgacggggtgaagaaaggaggtcttgccatgcgcagcagagagccttggcgtctgcctgcggggcagagcagggcagtgccctttttgcaggctgcggtgctgtttgcagccctgtgcatctttgcccgcagcgccgcgctggtgctggcggcctttctggcagcgccggtgcccgccgcgcagactttgctgcatctggggcagcaggccgtggagagccgggcagcagaatcgtctgcggaaagcgcggtggaggctgcgtctgtgccgccggagcaagaaactgccgctccggtgcagaccggggtggagcagtattttgtggccttgcagccggacgaggcccgccccgccgatgcgggtacggtgacagagcagcagttcgggcagggcagcggcgaaaagtacattccctgcggtgcgggcagcatcaagaataacacccggcagacggcggcagacgtcgccgccgaggcggcgcagcccctgccctttgccattgaaaaggacagcgccgcgccgcaggtgctcatcatgcacacccacgctaccgaggactaccgcctttctgccgggctgtggttcacccccggggacggtgcccgcagcaccgaccgcagcatcaatatgtgcgcggtggggcgggtgatggccgataccctcaatgcggcgggcatctgcaccctgcacgacgagaccctgaacgactaccccagctacaccggcagttacgccaacagccgggcggtggtgcagcagtatctggcgcagtaccccagcatcaaggtggtgctggacgtccaccgggacgccatcgagcgggaaaacggcacccgctgcgccccggtgtgcaccatagacgggcggcaggcggcgcaggtgatgatcatctgcgggtgcgacaacggcaccagcgtgcagctgcccgcatggcggcagaacctgcgttttgccgctgcgtgggagcgcagcatggaggcaaaataccccggccttacccgcccggtgctgttcagctaccggttctataatcaggacctgaccaccggcagtctgctgatcgagatcggcgggcacggcaacaacttaaatgaggccctgtacgccggatatctggcagcacagggcctcgtggaaacattattaggctgaatcagccgccaaggctggagatcatgctgctcttggcagactgatagtagctccaggcctgatcggctacggtctcgggctggttatactcctgcagcacgctgcgcatctcgctgaccaccgaggagacggcactgtcgtaggtgctctccaccgaggaaagatgcttgtaggcgatgctgactttattggcaaaggtccgctgagaggcgggcagggcgtggtattcatcctttgcgctctggatggcactgctgacatccgaccgtgcagaggactccagcgagtacagctcgctcatcagcgacgagatcttggcgtcgcactcggggttgggctcggcgtagacgtgaccggagtcccccgatgcggaaccttccgcagcggtggtctccccggcgcttgggggagaggggaaccagtcgccgaacaaaaactcgttgtacccggcaatgaattcctctttggtgcagccgctcagcagggctgccagtgcgcagctgaccacagcgagggtcagcagacggatgatgcggtgtgtgtgcttcatgatctcctccagaatctgtttttgcggaataccgctttttcccattttatcagagaaaaggcgttctgacaagaaaaaacgcagaattttctccgatgccgcgcggtaaggttgacaaaatgccgccaacgtgctattttaaaacaacaaatgcaaggaacgggaaaagtagcgcgggccgtccggcccagagagtgcggcacagctgagagccgcgcccgtgcgccgcgtgaacgaacacccgggagcagcaaactgaacacggcagtgcgtctgccgttaagtaggtgcgccgcaggtccagcgttacagggacagcgcttaaacaaagagcgcgtgagcgaccggacacatccggtaattcaggtggcaccgcggacattacaagacagcttgttcgccctgaactttcagggcaaaagctgtcttttttgtttataaaggagaactactatggaacgtaccgagatcctttcgctgttcaagagcaccccggcggacggcaccgagatcaccgtctgcggctgggcaaagaacatccgcgactccaagaacatcggctttatcgccctgtcggacggcggctgcttcaagaccctgcaggtcgtgctggaagccggtaagctggcaaactacgacgaagtcatccacaccggtctgtacagcagcctgcgcatcaagggcaagctggtgctcaccccgcaggcaaagcagccctttgagctgaacgccgagagcgtggagattttgggcgactgccccgccgacgaataccccctgcagaaaaagaagatgagcatggagtatctgcgcaccatgcccaccctgcgcccccgcaccaacaccttcaacgccgctttccgcgtgcgcagcgtggctgcctacgccatccacaagttcttccaggagaacggctttgtctacgcccactctccgctgatcaccgcctccgactgcgagggcgccggcgagatgttccgcgtgaccacgctggatctggacaatctgcccaagaccgaggacggcgcggtggattacagcaaggacttctttgaaaagccggtcaacctgaccgtttccggccagctggaggccgaggccatggctatggcctttggcaaggtgtacacctttggccccaccttccgcgcggagaagagctttaccacccgccacgctgcggagttctggatgatcgagccggagatggccttctgcgatctgaacggctacatggacaatgccgaggctatgatcaagttcgtcatccgctatgtactggacaactgcccggacgagatggccttctttaaccagttcatcgacaagggccttgtcgagcgtctggagctggtggcaaacagcgagttcgcccgcatcagctacaccgaggctatcgaaattctgaaaaagaacaacaagaagttccagtaccccgtggagtggggcgtggatatccagaccgagcacgagcgctacctgaccgaggtggtgtacaaaaagccggtgttcgtcaccgactaccccaaggagatcaagagcttctacatgaagcagaacgccgacggcaagaccgtggccgcagcagatatgctggtgcccggcatcggcgagctgatcggcggcagccagcgtgaagaggactacggcaagctggtggcccgcatggacgagctgggcatggacaagaccaactacgagtggtacctgaacctgcgcaagttcggcggcgtggagcacgcaggctacggcttgggctttgagcgcatgatcatgtacctcaccggcatccagaacatccgtgacgtgctgcccttcccccgcaccgcatacggcttctgagaagcgcgcatactgtaactaaagaaagccgccgcctctgcggcggctttcttgttcttcatttttcaacaaggagcacaaaacaagtggaaaatatttcgcctgccctcttggagtggttttacaaaaaccgccgcagcctgcccttccgggaggaccccaccccttaccatgtgtggctcagcgaggtgatgctgcagcagacccgggtgtcggcggtgctgccgtattactaccgctttctggaagcgctgccggatatccccgcgcttgccgcctgcggggaggaaaagctgcataagctgtgggaggggctgggctattacagccgggtgcgcaacctgcaaaaggccgcaaagctcgtttgtgcacagtacggcgggcagctgcccgccgactatgccgccctgcgtgcgctgcccggcatcggggagtacaccgccggagccatcgcgtccatcagcttcggacttcccgtgcccgccgtggacggcaatgtgctgcgggtgttttcccgcctgtataatgacccgggcgtgattacagaaccggcggtaaaaaaggcctttaccgcccgggtcatggagcatcagccgccggaaaaggccggggattacaatcaggcgctgatggagctgggtgcgctggtctgcgtgcccaatggcgcacctttgtgcgggcagtgcccgctggcagaagtctgccttgcccgggcggcgggcaccaccgcccagctgccccaaaaggcaaagcccaagccccgcaagattgtgccggtaacgctggcgcttgtggaaagcccggcgggttttctggtgcagcagcggccggaaaaaggtctgctggccgggctgtggcagccggtcttgtgggagggcgagcatcttttgcaggccgaggtgctggcgcggcttgcggcactggggctggacaccggcacggcagctcccgccgccctgcccgccgcaaagcacatctttacccacatcgagtggctcatgtccggggtacagctgcacgttccggtgcagagtgccccggcgggctatgtctgggcaagccgggagcagctgcgcaccacctacaccctgcccggggcgttccgggcgtataagccgctgctgctgtgattttggcaatttgctgtaatgcaccgcgccaaaaccggcacactgcccaaactgtgccccgcagcaccttcggggcgtgaaaattggggtgcaacggttgtaattttgggcgggaacgggtataataaaagctacaaagcggcgctgatcgccgtttgcatcaagatccttttgcgggacgcccgctggaaaaatcaagctgaaacaacgtttcaactgcaaaaaggagtgtactgaatctatgaaaaaatcttgcttggtcgctgtgatcgccgttctggctgctgtggctggtgcgctggctgctgtggcactttacctgaaccgccgcgagaaggaactggacgaatacgagcgcctgctgttcggcgaggatgacgcagaaaccgtagagccggaggaagctgctgctgaggacgagaccgaggcagaatgatcctgaaataccggaaactaccgggaagatgagcacatcggggcgcacggagcagtctgtctgaacggaccgcaccggtgcgccctttttgtacataaggagaaggaacatgaagcgttttttgctttggctcatcagtgtggcgctgggcgtggtggtgctgctggcggctgtgatgggggtaagctatgcctttaccaccgagggcggctgcccggacggtgcggcgcagttcggcgggcaggcgctggaagccaacggctcctgctggcaggtgccgttgctgggtggtcagctggataaggtgttcgccagccccgccaccctgagtgtgcagaagctgggggtgctgtacaccgctcacccggaactttctttgccggagtggaccggctacaccgccctgaccatccagaatgcggcggggaatgtgctgtttgcgggcagcgcgggggagtaccagaacttcctcttccctgcgaacggcgagtataaggcggagctgacagcgtggcgtgtgcccaagggcggggtcatcacccagttcgagggcggcagcaccggacagctgcgcaaaaacttaggtctggagcgccccgcaaagcccaccggctggtaccggtacagcttccggttcaccttgcaggccagtgcggaggtggagctttccgccgagcgggtggagcagggcggcacggtgggcgtgcgcatctccggcatgaccggggacgccgtgcctgccatcgagaccgaccttggcagcgtgcagtgtgtgcgcgccgcagagggctggcgtgcctatatcccggcagcctataacgcctcctccggcgggcatgaggtgaacatcacggtgaacggcgagaccatcacccgcaccctgaccgtgctgccgaaggacttcggcacggtggaggtggaggccgaggagcccgccccggagagcgccaacgcccagttccgcagtgccatctggccgctgtacgaggctgccgccaccgccaagcagtggcagggcggctttgtgccccccgccgaggactccatgaccttggtggactatgggcaaattaaagtaacgaacggccagcagggcagccgctccaactctacaaagctgtacaccatcccgggcgcgccctgccgcgcagcggccaacggcacggtggtgtttgcgggcaatctggaacttaccggcaacacggtggtcatcgaccacggctgcgggctgcgcagctacctgtacggcttgcaggagctttcggtcagcaagggacagaccgtggaaaaggggcaggccgtgggtgtactgggtgaggagctgaccatggacttcaagctgggcagcagaagcgtgaacccccggctgctgttccagacttccggcgggttgttctggaaagaaaactgaaaaatcttgtaacgtttttcctct

SEQ ID NO: 13803 - DNA, 1472 bp, Unknown
  gut microbiota DNA sequence
ctttgcacggggggtaaatgccctctccactcctctcccagcaaaagccttgcgtatcggcggcgggtgcgctattatatattatatacattatagagcgctgcgaaaggagccctgaccatgatcctcaccgtcaatatcggcaacacccacattactgtgggcggctacgagcaagatacccttattttctgcgggcggctgcactccgaccccgctgccacggtggaggaatacgccatccggctggtgaacctgttacagctgtacggggtatccccggcgcagatcgagggcggcattctgggcagcgtggtgcccatgctcagcgggcgggtgctggcggccttacagcttttatgcaaggcgcgcatcctgaccgtgggaccagggctgaaaagcggcatcaagctgcggctggacaaccccgcgcagctgggtgcagagctgctgtgcggcgcggtggcggcgctggcagagtgccccgggccgctggtggtcatctcggcagacacggccatctccctgatggcggtgaacgccaagcaggaacttgtgggcggcgtgatcctgcccgggccgcagctttccatgaatgcgctggtgcaaaagactgcccagctgccccagatcgaccctgccgcccgcgccccggagtcggtgctgggcaagagcacctcggcctgcttacaaaacggctttgtgctgggcactgccagcctgctggacggtctggccgaccgcttctgcgccgagctgggcgcgcagaccgccttttacgccaccggcgatttgccccgctccatccgggaggcctgccgcacccccatccactaccgcgagaccctgatcaccgacggcctgcaccgcatctggctgcgaaaccggaagggctgacgattttcgtttgcattttgcattccgatgtgttatactgtgttgtacccaccaaaggggtacggcatttgcgatcgtagctcagctggatagagcgttcggctccgacccggaaggccagaggttcgaatcctcccggtcgcaccaaacaatgaaaatccgaaccttttctcgataggagaagggttcggattttttgttttcttcggaaagcaagatgaaggctccttcccgatggctgtgtgtccaaaaccttatcagaagaaccgtataacaaaagtcacaactgtaaaggtgccgtaaggcagaaaggacacaaacatgaagtacgatgcaagagcctgcaaattcaacatggacaccgggtgcgtggaactgctgctccaggatgggagaaaaatctccatcgactgcaccggggtcgaggatgcgttggatgttaccatggcacagaggtcagagttggactacctcatttataatgacccacttggttatgccgatttgattctgaatggcaatccagaagaatacttgaaaaacgtaaccgggagccatgggttagaagattaaga

SEQ ID NO: 13804 - DNA, 5208 bp, Unknown
  gut microbiota DNA sequence
gcggggtcatgccgtacttttgccggaacagttcgtagaagtgggtgcggttggtaaatttgagttgtagggcgatctcgctgacggaaagtgttgtttcccgcaaaagccgttcagccttctggaaacagaaggtcatgccgtaatcgaaaagacacagaccggtgcggcgctggacgatggaattgaggtagctgccattgtaattcaaaagccgtgccagttcgctgcgaggcaaccgaccatctgtatcttccagcaaacggctgatacgcagaaagagcaggctttcggggctgctgctcaggtgcaccggggtgacatagaacccggacgacagaaaatcgaacagttcgcaaagtgcgcccttcaaataataggtggcggcagtactgggttcgtgcaggatgtgggtcatgcgggcgatgagcgttgtcagggtttgaacgctatcggtgttttctggtgtggggaaaaggtcctgatattcctttcggagatcctgtcccagattggccagcatgaactgcaaaacgggattttccggcagatgacgctcggcttcaaataattgcagggatgcagattccgtcaggctgcggacaaaatccacagacagaccaagaaaacagagtttggcggggccaatgaagcgttcgttatggaggatgctgcggtttaccagacaacaggttccggcacggtaggggtattctttttcctcgatctgttggatgacctccccttccagcaccagcatcagttcaaaataatcgtggcggtgtagcggacgggagctgagggcacggaataaagcatccatagagttttcatgcagccagcagccattcggtgagaacatctgaatgctgtattggtcggtttctcccagaccggtacaggactccagcgtgatctgcaccggggacatgatcttgtagaaggtagagagctgactgccccagttttcaacctccaaaatattctcatagctggtggaatccggtttcatgaaagcgtctccttttctgtaatgtgcgaatatgatacaatctgatggatgcggcacacgatgctgtcattgtggaatatgaacggaattgctaaaatataggcacaatacaaaaacattctgtaaaagctgtgcggccgatggctttattatagagtgcttttgaaaaaatgtaaagcgacagacgcattctgtcgccgtgaatgatacagcacatcttgaaaggagaatccccatgtctgctactgcaacgacagagaaaaaatatctgaaatggtatcagaagctggcctacggttccggcgatctggcctctaactgctcctatggtctggtttccagctttgtactgctttatctgaccggaacactgggtctggacagcgccatcattggctctttgatgctggcttccaaggttctggacggcatcagcgatgtgatctttggcaccctgatcgaccgcacccactccaagctgggcaaggcacgtccgtggatgctgtttggtcaggtaggtgtttccctctgcctgtttttgctgtttgccatcccggctggcagcaccaccatgcagtatatctacttcttcatcgtgtacacggcactgaacgcagtgttctatactgccaacggcattgcatattcctctctggtggcactgatcaccaagaacaacaatgagcgtgtgcagctgggctccttccgttttatgtttgcggtcgtcaccaacatctttatgggctttgccgttaccggcatggtggagaagttcggcagcggtgccgcaggctggcgtaccacggctctgatcttcgcgatcgttggtctggtggtcaacaccatcagctgccttgcagttaaagagctgccggaggaagaactgagcggcaacaccagcgaagccgcagaggaaggcaaagcagttgccgaggagaaaaagcatggctttgccgagaccgctaagatcctcgtccacaacaagtattacctgatgatccttgccatctacatcgtgtactatatcatgagcaacctgaccaccggtgccggtgtgttctgcgccacctattactggggcgatggcagcctgctgggtcagttctccatgatgaagatgttccctgttatcatcgcactggccattgcacctgtcctcatcaaaaagaccggcagtatgcagaaggtcaacttctggggctacgccatcagcagcgtgctgggcattcccatgatctactttgccatgcagaagaacatctccatgttcctgctgttcatgttcatcaagggcatctttgcaggtaccctcagcggctctttgaacgctcttattgctgaggccagcggctacaccacacgcaccaccggcgtccacatggacggtatgatgtacagctgctcctctctgggcgtgaaggtgggcggcggcatcggtactgcggctgtgggttggctgttgaagctgggcggctttgtgggcaccgcaacggtccagagcgaaagcgccattcggatgatcttcaacctgtacatcactttcccctttgtgattggcatcattattacagtgctgctggctttccttgatgtggaaaaggccaataagaagtgggatgctgaacaccagaaagaggcacaggcatgattcgacagaatttcaacgcagattggacggtagaaaagggcgatggcaattcccggatgaattcctttctgggaaatacccagaccaaaaccgtgcatctgccctacgatgccatgatccatgaagcccgcaccccggacacgaaaaacggtgcacagaccggcttctaccccggcggcgagtacatttttcagaagcatttcaccgcaccgcaggcgtggcaaggcaagccggtgtccctcgtatttgagggcgtgtaccagacggcgctggtctacctgaacggctggctgctgacccggaacgtgaacggctatgcggagtttaccgtggaggctggtccctacctgaaatatggtgccgacaacctgctgaaggtcattgcagataacagtctggaacccaacagccgctggtataccggcagcggcatctaccgcccggtgcggctgctggtgggcaacaaggtctatctgccgcaggataccgtgcgtatcaccacccgggaggcggacgagggctttgccctgctggatgtgacggcacaggtgcagtctgccagcactgttacagaacgggtgaccctgcagcagaccatctgccgggagggcacggcagtgctcaccgaccggcaaaacctcctgctccagcccggcgaaagcagaaccgtctccttccggtactgcgtggacagcccggctctgtggagcccggagaaccccaacctctacaccagcaccatgcaggtgctggagggcgaggaagaactggaccgggaagagaccggcttcggcatccgtaccctgagcatcgatgcagcgcatggggtacgcatcaacgggcagaccgtcaagctacggggtgcctgcatccaccacgacaacggcattcttggtgcagctaccctgcccgatgccgaggagcgccgcattcgtcaactaaaggaagcgggcttcaacgccatccgctcctcccatcacccggcagggcgggcgctgctggatgcctgcgaccggtacggcgtgctggtaatggacgaactgagcgacgtatggaacgtgcggaaaaatccctacgactatgccctgtactttgagcaggactggaagcccaccattcaaaagatggtggccaaggattacaaccatcccagtgtcattttgtactgtgtgggcaacgagatctccgaggcgggctcggaaagcggagcggagaccaaccgtcggctctgcaacaccttccgggagctggaccccacccgttacaccaccaacgccctcaacggccttatggcagctggttaccgcctgcgggagatcatgggggatgtgatgcgaaagttcccggcacagcccggtccctccggcggtgatggcggcggcagcaatgccctgaacagctttatgagcctgatgtccgggaaaaagggcgactactttgccacccatccgctgctgactgaggcgctgtccggctgcgaggattcctgcgatgtgatcggtctgaactaccttaccggacgccatgtgctggagcatgaactgcacccccacaaggcagtgctaggcactgagacttacccagcagacatcgtgcggctgtggcgcatcgtggaggagaatcctcacatgattggcgacttcacatgggctggctacgactatctgggggaggcaggctgcggcatcttccattacgatggtggtgccaacttcagcagcatttacccggaacgcaccgcctacattggagatctggatctgctgggcaaccgccgccccatcagctatctgcgggagatcgtttacggtctgcggaaggcaccctatctggcagtgctgcgaatggaacacaacggtcagacctccagcaagaccccttggatgttcaaggataacctttccagttggacatggcccggttttgagggacagacggcttcggtagatgtgtactccgcctcggaggaggtggagctgttcctgaacggagcttctctgggccgccgtgccatggtggattttaccgccacctacagtgtgccatacactcccggcgagctgaaggctgtgggctataccggcggtgtgtgtgacggcgagttcacgctgcgcaccgcacaggatgcacagatgacccttacagcagatcgtaagaccctgcaagctaacggcgaggatgctacctttgtgatgatccaattcgtggatgcaaatggcaccgcagatctgcacaccaagcacaccctgaaggtggagttggagggtgcaggcattctggaagccgtaggcagcgcaaacccctgctccgaggagcgttacgacacctcggaaagcgagacctttgacggctgctgtatggcggtgatccgcgcaggagaagctgcgggcgaaattcatctgaccgtcacagcagatgacagcgttcagaagcagctgacgattctggttcagaaagcagagggctgaatctcaaaaagccggtgaaggctcaaaacaaaaacagggtgcgcccctgaataggacgcaccctgccaaaagccacagac

SEQ ID NO: 13805 - DNA, 9065 bp, Unknown
  gut microbiota DNA sequence
ccccattatggtggtcgtgatgacctactgatatgcgcaaacgccgctgacgggaagtcggcggcgtttttgtgtggtctgccggacaacgcaaaaacaccccggccgggcggaaaagccgcttggccggggtgctgtttttgcaagaaaaatattactgctcgttttcgtaaatcttgatatagcgcggggcgcttttatcctgccagagcagcagaatggcggtcagggcgacagccagtgtggtgaggacggcgagcagagctttgagaactttcatggtttggtgcctccttgtgaagttcgggagcggagcgggggacgttccgcctgtcatgttaggtatagtatagcatattcccacagtaaaggcaaacggcagaagagggagaacaaaaagaaaaatacggcggttagttaaaactaatctgcgaaaacgaataagaaagttcaggaaaattcatcatttgagccgtgatgtcgttgacttcccgcgccaaaatgatacaataagtgtgttaagcagctgctgtccctgtaccagtgcgcctgcatgggcgtggggatggcaattcaagcagaatgggggatttgaaatccatgttgaacaagctgaaacgtgcggcgcttggcgcgcatacgccgcatgacaaggcaactgctgcaagcaaacctatcccgatgcctctgcccgcgcaggtacgcatccttatgagccagcacattggcgcacccgccaaggcactggtgaaaaaaggcgatgaagtgttcgtcggcaccaagatcggtgaggcgggcggctttgtctccgcaaacatccactccagcgtttccggtacggtagctgcagtggaacctttccgtctgtccaatggccgtatgtgcgattctgttgtcatcaagaccgatggcaagcagaccgtagacccggctgtcaaggcaccggaagtcaccgataaggctagcttccttgctgccgtgcgcgagtgcggtctggtaggtctgggcggcgcaggcttccccaccgatgtgaagctgcagcccaagcagtcggtggatactttactgatcaacgcctccgagtgcgaggtgtggctgaccagcgacacgcaggagatgctggagtgcagcgatgatatcatccgcggtatcaaggctgtgctgcagtataccggcatcccgaagtgcatcattggtattgagaacaacaagcccgagtgcatcgacctgctgtgcaaaaagaccaaggacgacagcgctattgaggtcaagcccctgcccagtgtctacggcaccggcgcagagctgatcctcattgagaagtgcctcggccgcgaggtgccccacggcggtctgcccgccgatgcaggcgctatcgtgatgaacgtgaccagcgtttccacgctgggcaagtatctggctaccggtatgccggtggtccagcgtaccatcaccgtggacggcgatgcctgcgcaaagccccagaacgttgttgtgcccgtgggcaccgcttatcaggacattctggactatgtgggcgtcaagggcgagctgggcaaggtggttgccggcggtgccatgatgggccccgctgtggagaacctttcctaccccaccaccaagaccacttccggtctgatcctgctgagcaaggcagctgcacagcccgcacaggtcaacccctgcatccgctgcggccgctgcgtggagtactgccccatgggtctggagcccgtggaggtcaatcaggcctacgccgcccgcgatgtgcaggagctgggcaagctgcacgctgactactgcttcaactgcggcagctgctccttcgtctgcccggcaaagcgccctgtcacccagatgatgagtctggccaaggccttctatcttggcgaaatcaaaaaaggaggcaataagtaatggatacgaagcttattgtttcggcttccccgcacgtccgcagtgacgagaccacccaaagcctgatggctaacgtgatcgttgcactgtgcccctgcgtggttgcctctgcgatcattttcggcgtgcgcgccctgctggtcaccgccgtttccgtggtggcctgtgtggtttttgagtggctgtactgcaagctgctgaagcgtgcaaaccccatcagcgacctgtccgctgtggtcaccggcatcattctggccatgaacgtgcccgtgggtatgcccatcggtcagctgatcatcggcgatctggtggctatcatcgttgtcaagcagctgttcggcggcattggcatgaactttgcaaaccccgctctggtgggccgtatcgtgctgtttatcagctttgccggttctatgaataagtgggtgttcccggatgcagcggtggatcagctgtccaaggctaccccgctggctgtggcagatccctccaagctgagcctgctggatctgttcatgggcatccacggcggtgtgctgggcgagacctgcgcactggctatcgtgctgggtctgatctatctggtggctaccaagaccatcagcatcgctatccctgcttcctacgttggcagcgtgttcgtgttctacctgatcgctaccaaggatctgcacagcgcactggttgccgtgctgagcggcggcctgctgttcggcgctgtgttcatggctaccgactacgttaccagcccctttaccctgaagggtaagctggtgtacggcgtgtgccttggcatcgttacctttgctatccgctactggggcagctacaccgagggcgtgtccttcgcactgctgttcatgaacctgtgggtcccgtacatcaatgatctgacccgtcagaccccgtatggctatgtgaagcctgcaaagaaagcgaaggagggtgctggcaaatgagtaagactgcaaattccagctgggaaaccaccggtaagccgatcgttgtgctgaccgttatctctctgatcgtcagcctgctgctggctctggtgaacggcatgaccgctcccgttatcaaggagaacacccgccgcaccacgctggccgcttatgtcagcgtgatgccctctgtttcggacgcagctacgctggaggaagtgaccgactacaccaccgccaatgttaccggcgtggtaaaggctccggatggcggcattgccatcaaggctgaggaaaagggctttgacggcggcatcctgaccgtcatcatgggctttgacgccaacggcgccgagaccggcatctgggtagatgcttctacccagaccaagggcatcggctccaatgtgtccaccgatgacttcctggcacagttcaacggcatggacggcaccaagaacattgtgatgaatcaggatttcgatgcgtacagtggcgcaaccatttcgtccaccgctctgtttgctgccatcaatgattgtatcaactgcttcaacgagctggcataaaaggaggttggtaagaaatggcacaagaaaataagtccaaggtaagcatccttaccaacggcatcatcaaagaaaaccctgttctgcgtctggttctgggcacctgctccattctggccgttaccacggcagtttccagcgcactgggcatgggcgccgccttcaccttcgtgctggtgtgctccaatatcatgatctccctgctgcggaaagtcatccccggcaaggtgcatctgccctgctacatcgtcatcattgcaggctttgtgaccatcgtgcagatgttcatgcaggcctacatggaaagcctgtacaacgctctgggcgtgttcctgcccctgatcgttgtcaactgtatcattctgggccgtgccgagatgttcgcctgcaagaacaatgtggtggattccgcactggacggcgtgggcatgggcctcggctacaccctcaccgctactctgatggcctccatccgtgagatcctgggcagcggcacctggctgggcttccagatcatcccggaaagcgttgccaaggtgtccatcatgacgcaggctcccggtgcattcttctgctttggcctgttgatggccggctgtgtgtggctggaaggcaagctggacgcccgcatcgagcgcaagagctgctgtgatcttgacaatctgaagaaggaggcggaataagatgctcgtcaaactcgctgcgatcttcttcagcatgatccttgtcaacaactatgtgctggtgaagttctacggtatctgcccgttcctgggcgtttccaaaaagctggattccgctgttggtatgtccggtgctgtcatcttcgtcatgttcatggcaacggccgttaccttccccatccagatcttcattctggacccggctggtctgggctacctgcagaccatcgtgttcattctggtcatcgctgtgctggtgcagttcatcgagatcttcctcaagaagtacatcgttgcactgtataactcgctgggcgtttatctgcccctgatcaccaccaactgctgcgtgctggctgtgaccattctggtcgtgggcgactacggtgcagatgtggctgcacacggctttggctacgcctacatcgaggctctgatctgtgctatcggcgcaggctgcggctttatgctggccatggtcatgttcagcggcgtgcgtaagcgcgtggaagcctgcgatcccccggcacccttcaagggcctgcccatcaccctgatcgcagctgcaatcaccagcctgtccttcatgggcttcggcggcatcgtcgaaaacctgttcaatgttacgctgtaagggaggaacaggactatgaatattgtatctgctgttatcctgtgcaccatcgtgggcgctgtgggtgctatcgttctggtggctgccgcaaagttcatggcggtggaggaagacccccgcattgaggaagtttctgcctgtctggccggtgcaaactgcggcggctgcggctacgccggctgtgccgactacgccaaggctgttgttctggacggcgtgccctgcgacaagtgcgcacccggcggccccaaggctgctgctgccattgccaagatcatgggcggcgaggcaagcgccgtagaaaagaaggctgtggtgcagtgtcagggcagctccgagcactgcaagcccgcctacgactacaagggcatccagacttgtgctgctgcggcagctctgtacggcggccccaagacctgcaccttcgcctgcattggtctgggcgactgcaccaaggtgtgtaagttcgacgccatccacatcgtagacggtgtggcaaaggtggacaaggacaagtgcaccggctgtggtgcctgtgccaacatctgccccaagcaggtcatcatgatcgacgctgccggcccccgcaagccggtggtcatgtgctccaacaaggataagggtgctgtggcaaacaagctgtgcaccacctcctgcatcgcctgcggcatgtgcgagcgcacctgtaagttcgacgctatccatgttgtggacggcgtggcacgcattgattacgacaagtgcaagggctgcggtatgtgcgcccagaagtgccccaagcacatcatcctgttcccgctgaaggacgatcccaatcccccgaagcccgtggtgaagcccgccgctcccgctgctgctcccgcagcaaagccggaagccaaggctgaggcaaagcccgagaccaaggcagagtaaactgtaaaccaaagcccgccgtgcacaatgcccggcgggctttttttgtacccgtttattccgtcttagtgggacgaatagtcacctcgccgcagcgcagcgcctcggtgcgcccgccctcccgctgtaccaccagccgcccggcatcgtcaatggaaagcgcctgtgcggcgtaggtctcggagccggtgcacacggtcacccaatgaccgggcacaaagcagcgggcgcggtactcgtccagacaggcaaagcccgggcacagcgctaacagctcccgcccgatggcacctgccagcgccgcccggcttaccggggcagggccgccggggtataggctgcccgctttggcggcaagctccgggggaaagtcctccgccgtggcggtcaggttcagcccgatgcccaccaccagccattccagctggccactttcaaggtctgtgccggcttcggtcaggatgccgcacacctttttgcccctgtaatacaggtcgttcacccacttgatggcaagttccagcccacacagcatctgcaccgcccggcacactgccactgccgcgccgatggtggcggtctgggcgttggcggcaggcagcggcgggcgcagcaccaccgagcagtacacccccttgcccgccgggctggcaaagctgcgtcccagccgcccgcgcccggcggtctgcccgccagccagcaccagcgtgccgtgggcggcaccttccagcgccagcagctttgcggtgcggttggtgctttccaacgtgtcgtacagctgcaccggggcagggtaggggccgaccgcctcggtgcagaaggggtcgccgcccagcagacggtacccccggcgggaggcggcttccagcgcatagccctgcgcggtaagcgccgctgccgccttgtgcacggcagcgcggctgacccccagctgctgcgccagctgctggccggaaatatatgcgccctcggcggcgctgagcgcctgtaaaagcgcctgacgggtggtagaagccatggcgaaaatcctccctgtgtgctatactgctattgtaccatatctgcggcagaagaaaaagtttgaaaatattttagtttttttgcaggaactgccgccgctccctcgtattaaagacagaagggcggcgcagagcagcgcatccaaaaccggaaaggaggccgtgcagcgcgttgacaacacaggaattcagcacgatggtgcagaaatatcaggcgctcgtgtacacggtctgccaccagctggtaccggatgtacaggaagcgcaggatctgacgcaggagacctttctggcagcatggcgggccatcgaccgctgcccgcccggctttgaaaagcagtggctggcgcgtatcgcggccaacaaagccaaggactatctgcgcagcgcatgggtgcgcaagatgaacacccccggcgacgaggtgctggcgctggagggcgcgccgcccggtatgcagccggagcagcaggtgctggaggcgctgggcgaagaggagcttaccggaatgatcttaaatctgcgcgagccctactgcacgccctgccgtctggtgctgctggaacagcacactatggccgaagctgcaagactgtgcggacgcccgcccaaaacggtggaagcgcaggtctaccgcgccaaaaagatgctggcgcagcagatcttgcaaaacgaccgcataccctgtgaaaggaggagcgtacatggaactgtttgacgcaaaaggctgtctgagtgaggaaggcttacaggcactggtcggcgggcaattggacgaaacgcagcggctggaagccgccgagcatcttgcctactgcgaccgctgcatggaccgctacaccgccctgctgaccgatgatgtgctggagcagccgccgcgctccgcccggggcgcggtgatgggcaccatctggatacggctgatgcagaacacatggggacgcgccgctgtggccaccgtagccgccgtgctggcgctgacgctgtggcgcgccggtacgctggagcagatcctgcacaccgggcagcagctgaacacatggctgccgcagaccacgcaacagaccgaaccggaactgctgggcaagccggtgaacgacaaagcgccgcagccctccaccgccccgctgggcaagcccatagaggacaaaaagcagctgactgaaaaactatccgatgcactggacgcgcttttgcaccacagtgcagacaccactgagaaatgagggaactgattatgaagaaaaacgggatcctgaccctgctgtttgcctgcatccccggtgcggggcagatgtatcagggctatatgaagcgggggctctcgctcatcaccatgttctgcctgtttattatcctaggcagcaccacggggctggacgcactggtagtcggctgcatcgttgtgtatatgtacagctttttcgataccttgaacctccgcgcacagctggcggcagaaaaagccccggaggacgattatctggtgcactttaactggcacgatgcccgcatgacccagttcatgggcgaaagccacaagctggtgggctgggggctcatcgcgctgggcgcgatcgtgttctacaacaacatcatcatgcgggtgctgggcgatgtgatgtggcgctggggacaggataacccggttttccgcgccatctacctgatgctggacgccctgccgcagatcgtggtctgcgtggcgctgatcgtgtgcggtatgtggctggtgcgcggcccgaaaaacaaaaagggcaagcagcccgccgaggaggaacccgaggacttccacgcctacacggctgcgccgcaggcagaggatgcagaggatgcagaggacaccgcagacacggacacccattttgccatgccggagctttcggcactgctgggggagccggtgaccggtgcagagcaggacgaaacccctgcggaggatgacgatgaccgagcagaataagacccctttgacggcacagccgggcagtgcgcccgcgccggagcagaaaccggcagaaaaacgacccgctgaaaagcccctgcgccgggtgggcagcctgaccttgggcgcgtgtctcattgcggcgggcgtgttctttctgctgtatttcttcgtgccgggctttgatgtgcagctgaccctgaaaattgccccggcggtggcgctggttctgctggggtgcgaggtgctcttctttgccgcccgccccggccgctggaagtacgattttgtgtccgtgctggtctgtctggtgctgatggcgggctgcttttgcatggcgatgctgcccgtgatgtttgacgagctgacacccgaaaaacagcaagtcatgaaccgactgagtacgcaggccattgacgaattgtacaccgcctgcaagcag

SEQ ID NO: 13806 - DNA, 21427 bp, Unknown
  gut microbiota DNA sequence
cgcaggacattgccatccgggatatcagcggcagaatgttcctgagcggcccgcaggtcgagaccttgcagcaggccgccgccctgcccgccggggatgtctacttgaccttgaccgtggagttgttcggtccctacgacagcgccgctgcctttgcccgggattgctacactttgaccgcactggcaaagcagtgcaccgtgccgccggaaagtctgtactttacatgggatgcccgcagcccggcagaaagcagcctgaacaccggtagtctgctgtataccgaggattactcgctggacctgagcggcgctgtgcagctggactggaccgcgcagcagatggagcagcagaccgagaccgagtatctgctggatgcagagaatatccccgacgaggattaaaaaataccgccgcacagctgtgcggcggtatttttgtagtatggctgaaaggataaacgaaaaccgccccgaagtcctaagacttcagggcggttaagctggagctgctatccagattcgaactggagacctcatccttaccaaggatgcgctctaccaactgagctatagcagcacatcacagctcgataagtatagcacagctttgccggctttgcaagctttttttgcaaaaaataaaaaattagtgcaaaaagtccccggagcatccgcagacgctccggggactctggaaatgcgtttactttgtcagactggtcaggatgggctcgcactgctctacggtggaggagagcatcaggttataggcggtgaccatctcctgaatggcggtgcggttctccttggtcagggcgtagctctgggtggtgccgtcccggccaacgaatacggcggtgacgctcttggcgttcagccactcgctcagcaggctgacctcctcatcgctcagctggaacagctccatgtcgaaccagcagcccagatcctgatcgtagccgccgccgtattcctcgtcacaggtaaaggtgtacagctcgtcatcagcagatacgttgaccgttttgatgtccagcttcttgctgcccacataggtcaggatcatattaaaggcaatgctatcgtcctgcaagaacatataggggtacagcccgcaggactttttatccatgctggcctgctcctgcggagaggaaagatcccagccgccggcctcctcgtcgtaggtgacggtgaacttggaaaaggcggccttgagttcggcatcgctgggggcggcgttggtggcctccaccgcagcaggggcggcgggcagtgcgggcgcagcagccgaagcggccatgccgccgcacagcatggcggcagcgcacagaccggcaacgacgcgccggaacaaacgggaagatctcataagtcagcactcctttccattttcgaagggggatctctggcttcagtatatcgcagcacgacagaaaaagcaagaaaactgtcacgaaacgctctgccgctgacacgaaacgactttagcccacctgatgctcttccagccagcgggtcatctgctgggcaatgcccttgacgctgccttcctcaaagggcaccttcagcccggcggtctgcagcagctcggtgtagctggcaagaccggcgcggcgcaccagtttgaggtagcgctcccatgcgtccttgtggtcgtcaaggctcagcaggaagaactgcaaggcggccatggtggacaggcagtagtcgatataatagaaggggcactcgtagatgtgcagctggcgctgccaaccggcaccgcggccgtagaagggcagattgtcaaaatcgatccacggacggtacttcttttccagcttgagccactcggcgttgcgctggtcgggggtcaggtccgggttctgatacatgatatgctggaactcgtccacggcgcagccgtaggcaaggaacacaaagctgtcctcggcgtggagcagggcatacttctcggtgtccttgccgaacagcaggtggtgccacggcgcggtgaggaactccatggccatggagtggatctcggcgctttccatggcggggcattccagatcggcaggcacgttggggtcacgctcggccacatagccctcaaaggcgtggccgcactcgtgggtcagcacgtccacatcgccggaggtgttattccagttggcaaagatgaagggtgccttgtagctgggcaggctggtcatgtagccgccggacatcttgccggggcggctttctacgtcaaacagctcgttgtcctgcataaagtcgatgaactccgccgtttcggggctgagttcgtggtacatggtgcgggcggcatccatgcgtgcctgatagcccgggatgggcttggggttgccgtccttgaagatgatgggcaggtcggtaaaggtggggtgggtgatgccggtgcgcttggcgcgcatggccatcaccttttgcagctcgggcacaacgtcccttgccacctgatcccggaaggcctgaatttcggcctgtccgtagccgatgcggttcatgcgcacataggaaagctcgctgtaatccttgtagcccagcaccttggcctgctgattcaggtttttgacgatcttagtgtacagtgtgtccagctcgtcccggtgggcatcaaagtaaccggcctcggcttcataagcggcgcggcgcacggtggggtccagatcctccttgtaggggcccagctgggggatggtcagctgcttgccgtccagctccaccagtgcgccgccgtagatctgctggtactggctgaccagcgcgttgaactcctgctgcagctccacggtgcggtcgtccatgcccagcacggcgttcttcataccggctacgcaggtggtgccgaagtgctcggtaagggcatccacataggggtttgccagaaacgcccggctgatctctacactggcgttggtcacagcggggccgttggcatcaaaaaagtcctgctcagccttccagtaggcatcgcgggtgtcgcaggtgtagtggatgttggccagctgggaggcggtggtgtagtccgcaaaggcgcggctctgctcgtagtacacctgaatgagggcgtcgccgtcctgcgcatcggcggccttggcagccagctgcttgcaccgtgccagcagggcgttgatgtccgggcgggtataggtcatttcgctgaatttcatggaaaatttcctttccggggcagtttcccctttggtatcttgtgttcatcttaccacgttctgcgccaaaagaaaagagggaggcaagcgggcaaaagtcctacgtttatacaacactgccaaaaataaaaacgctcctttggcaaagatgtctgtttgggcgcttgcagtgcagcaaaaaaaggattataatggcatcatcaacagagtaagaccctgcgcgttaagtgccgcatcaacggggagttgtgctgcggacgaaggtattgaccgcggtgcagggtctgcatcccgctgctgcatggacttgggtgcaggcgagagccgtctgcggtttttgcccggaagtgaatgttgttggaattcacgccctcctttgtgcggtctgtcacaggggagggcgtttttgcgtcctgcctgctgttcctttttaaggaggacaactacaatgaacgacaaaaaaacttcggtgcgtaccctgaccatgctggctttgctggtagccatgagcatcgtgttcagccgggtgctgagcatctccaccggcttcgtccggttcaatctgggcagtctgccggtgctgctggcggcggtggtgttcggccccggcgcaggctttgcggtgggtgcagtggccgatatcatcggcggtgtgctggcgggctacgccatcaacccgctcatcacgctgggtgcgggcgccatcggcttagtggcgggttttgcgtggcagaagctgagcagcctctccaccaacctgcggctggcggccagcgtgctgctggggcattttgtgggctccatggtcatcacctcgctggcgctgcgcctgttttacggctatccgtgggcaacgctggcggtgcgcatccccaacgccctcattctgagcgccgtgaacgttgtgctgctgcgcatcctgctggaaaaccgcagcctgatgaagctggcaaagaagtaagagattcgtaaaatggaacaccggagcgtctgccgacgctccggtgttccgaaatttttaatattattccttgaatcgaggcagtatctatgaactacgaacaggcaatggaatacatccacgcggtgcagtgggcggggcataagcccgggcttacccgtacccgcaccctgctggcggcactgggcgacccgcacaaaaagctgcaattcgtccatgtggcgggcaccaacggcaagggcagtacggcggcgatgctggcttcctgcctgcaagccgccggttaccgggtggggctgtatacctcgcccttcatcaaccggtttaacgagcgcatccagatcaacgggcagcagatcccggacgaagcgctggtggaactggtggagcaggtaaagcccgccgctgatgccatggaggacgtgcccaccgagttcgagatcatcaccgcactgggcatgctctattttgcgcagcagcagtgcgatatcgtggtgctggaggtgggacttggcggcacgctggattccaccaacgtcatcgaaaagcctgcctgcgcggtgatcacggcactgggcatggatcacgtcaaggagctgggccctacgctggcggatatcgccgccgctaaggcgggcatcatcaaaccgggctgcccggtggtgagctacggcggcgcaccggaggcagacgccgtgctgcgccgggtggcagcgcagcagcacgcttcttttacggaagtggactttgcaaagctgcaggtcaccggcggggatctggacgcagttaccttcagctttgacgggctggacggagtgcggctgccgctcatcggcagctatcagccccgcaacgccgcactggccatcaccgccctgcgggtgctgcggcagcagggctggaacatcccggaaagcgccatccgcaccgggctggagcaggtaagctggcccgggcgctttgagctgctgcgccacagcccggcctttgtgctggacggcagccacaacgcccacgggatgcgcgccacagtgcagagtctgaaagaccgcttccccgggcagaaattcgtctttctggtcagcatcatggccgacaaggacgtggacgagatgctggcgctgctggcaccgctggccgagcggttcgtgaccgtgacggcgcacaacccccgcgccatgccggcgcagacactggccgagcatatccgcgcctacggctgcaccgccgaggctgcggacagcattgaggccggtgtagcgcgtgcggaagaactgggcggcgaaggcccggtgtgcgcactgggcacgctgtatttctccggcgatgtccggcaggcctttgccaaaataaataaagcataaagcgatggggctactgcaaaatgcagtagccccatcgcttatataatactatttatacccgcagctgcttttttgcaatttgcagcgcacggcgcagcgggcggtagagcagcagcatcagcacaaaattgccgacgccatgcagtgcatcgtagctcaggccgctgagccaccagctcagggcaaaggcgggcgttttggcaaatagatacaccgccgcgcacagcccgccgaagcacaggccgtacagcccgctgaacaccgcccagaaaaaggcgttgtccatgcggcgcagcagccatgccagcagcgccagcagataccacacatacaggtacatcacccaccacagaccaaagccgtacagcacgccttgcagcagaatgaataccgtgatggcgccgggggtctctcggggcagctccagtgcaaacaggatgatgagcaggctcaccggctccagattgggcagaccgctcatggcctgcttgctcaccaccagtagcgcgcccatcaggccgctgagcaccagccgcagcacccgggtgtgcaacgccaccggctttttaccccttggtgtaggtaaaggcatagctgtcaccgtcgtggagttcaatgtcggccacgcccaccgtggtcatctcaccggcagcatcggtcaggcaccaccatgcctgatccttatcatagtcggcagtctcgccgttcacggtggtcacaaagccggcatcagcctcttcctgactgatgataccggcctcagccagtgcggtgctcagcttttcgccgtcggtcacgttcagcagtacgctggacacgctgccgtccgcagcggtaacggtgaactccaccgtggcctgtgccttactggcagcggaagaagcaacctcagaagcggccacagaagaagccacagaggaggctgcgctggaagcggtagaggaagcggaagcgccgcagcctgccagcaggcagacggtcagcacagcactgagggtcagaacggcaaatttatgcagagtgttcatggttcaaaatctccttgtttcgtgttttgcgtgcagagcacacggcagatatagtaccatgaaaccggctggaaatcaacattttttctgcatagcttcaaaatatgcggcggcaacgcccacctgattggcctcgctgctgaaggcgcagggcacgatctggcagcggggtaagccctccatgtaagcttgtcccgcccgggaggcgtacagtccatcgtaggcgctgcgcaagctttccagcagcaggggctgcttgctgatgccgccgccgatggccactttttccacatccagcagaacggtcaggttgtagatctgcaccgccaccgcgtggcagaaccgccgcagcacctctaaggcctccggctctccggcattggcggcggcaaaaaagctccgaccgtccagcggggcatcctccggcagtgccttgcgggcgcggtaccatttaagcagattgctggtgctgcactggcaggccatgttctggtccggggcgtcccacgcctcggcgttggtgttgacaaagctgtactctccggcggtaaagtgcaccccgcgcaccagctgtccgttggcaataatgccgccgcccacgccggtgccgatgatgaacaccgcagcgttgcagcagtccttcagcgcgccgtttgccagctctgccatggcggcggctttgccgtcattttccagtatgacagggcagccgcacttttccgccagcagctgccccaccggggtggcggtgttgtacagcagcgctccgccgttggaaacatagccggtgcggttatccacaaagcccggcagcgccatggcaatgccgctcacctcgtccttatggggcgcatacagccggtagactgcatccagaaactgcgcctgcgtatcctgcggcgtgggcaccgcgccgctgttcgtgcggtgcatctgctcatccatgaccgagtatttgatctcggtgccgcctacatcaaaaaccatgatcttcatcttgtagccctcccgtaaacggtcgttttctgtccctattatggcaaatcatcgcgggaaagtaaagccccggcggtaaaaaagaaaactgcaaaaaacgcaccggcttgcggttgcaatccaccccgccctgtgatatcctgaaaagagagtatctgttatataaaggaagaaactgccatggattgcaaactgcgtgccaaaaattgcggcggctgccccctgctggggttggactatgccgaacagctgaaacagaaggaagaaaaagtgcgtgctctggtgggcaaatacggcccggtgcaccccatccggggcatggagcagccttaccactaccgcaataaggtgatttccacctttgccaccggctttggtggaaaactgacctccggcatctacgcggcaaacagccacaaggtgctgccggtggaaagctgcctgctgcaggacgaggtgctggacaagaccatgcaggcggtgcgtgctgccgccaacgcctgccgctaccagccctatgatgaggacaagggcaccggccttgtgcgccactgcctgctgcggcggggcgtagccaccgggcaggtgatggtggtgctggtgacagcgcagccggtgctgccgggcgcgaaaaactttgtcaaggcactgctggccgaagcggcgcagcgcggcgtgactgtgaccaccgtggtgcagaacgtgaacagccgcaagaccagcgtggtgctgggcgaagcggaaaaggtgctgtacggcaaggggttcattctggataccctctgcggcaagacctatgccatcagcccgcgcagcttttatcaaatcaatcacgcccagaccgaagtgctgtacggccttgcggtggaggccgcgaagctgaccggcaaagaggtggtgttggacgcctactgcggcattggcaccattggcctgaccgccgccgaccatgcaaagcaggtggtgggcgtggaactgaaccgggacgccgtgcaggacgccattggcaacgcaaggcacaacggcgtaaagaacgcccgcttctttgccgccgacgccacacgctggattggcgaagcggccgcagcaggggagaaggcagacgtgatctttatggaccccccgcgcgagggctccaccccggaatttcttgccagcgtggcccgcatggcaccgaagcgggtggtctatgtcagctgcaaccccgtcaccctcgcccgcgaccttgccaccctgacaaagctgggctataaggccgagggctttaccccggtggatatgttcccgcatacggagcatatcgagacggtatgtgcattgtccaaactggagatccaccgcaaaaagccgtccgggaggcgctgaagcatttttagcgtgtcctctctgccgaggacttttatgcagagaaaagaacgttttgcaattttccctgcaaatggactgcgaaggtaaatccgcagctcccggttgagaaaagctttgtggagtgatacaatactattgtatgtgccctgtccggggcatcagttcacagaacggaataacttgcaatggatagatatttttttattttaacgaccattgatctttttgtgctcggctttatgtgtcttcttacaaggctgagcgaatctttaaataaaaagcagaagcgcgggttccttctggcctttgcgctcattgcgtgcatctcggtgctggaggtcatcaccatcgtggtggacggcgcaccgccgggctaccgctggctgaatattttgtccaactatctgggctttggactgacaccggcggtgccgctgtgtctggtatatgtgctggataaaaaatccatcatccggcgcgggttcaaggcggcggtgtgctgcgagggtgcgtatctgctttttctggcggcaacgctgccctatgggctggtgttctcggtgagcagggaaaacctctacgcccggggcgcgtatttctatatttatgtggccatgtactatgccgccatgctgtaccttatggtggctacggtgcgcacggcggcggcctttcagaaccgcagccgcatgctgatctatccgttgaccctgtttctgggcgcggagaccgtgatccagctcgcgctgccggagctgcacgttacatggctgtgtgtcacgttgctgtcggtgctgtactatatttattgcagcgaaatgtggaaccagctggacgcgctgaccgggcttttgaaccagaacagctacctgaaccgcaccgctgagatgcgccgcagcggcggggtgctggtggtgtttgatgtggatgacttcaagcagatcaacgaccgctacggccatttgcagggagatgtctgccttgccgagatcgcagactgcatcaaaaaagcctacgcccgctgcggctactgctaccgcatcggcggcgatgaattctgcgtgctgctgaaggacgaggaaagcgaagcccgctgcgcaaaaacgctgcaagctttgctggcagagcggcgcaaggtgtttgccattttgccgacggtctctcttggctctgccgccttttccggggaggacgtggtcacagtgaaggaccgcgccgaccgcgcgctctactgcgccaaaaaggaacagaaggcccgtgccgcagcggaaaagcacgcagacgacagcgagcagacagcttgaaattctgtccgcacaacggataaacggaggaacaccgatgaacacagattggaacagcccgcagggcgattttgataccgctgaaaagcagggagaactgctgatgctgctcagccggcagcaagtcaccgtgcacacatgggatgacccggactttgactatatggaggagcaggatctggcgctggtggtgcaaagcccctccggcacagaggatctgctgattgaactgtgcggagagttctcggtgttttttgaaaagtggcacggagagtacgccgccaccgccgagggctacgcgcagctgcagcaggacatcaccgccattctggacggcaaggcgggcgcactgagcctgtatacggaaaacggctggcagggcacggtgctgtgcaccgaactgcccggcgcagaggatgccgctgcggcgctcaagcgctgctggcaggcggcaaagccggacgccgccctgcctgcgggcagtcggctggagctggtgtgctgggacccggcacagaaccggaaatgccagctcccggtggaataatagagcaaaaaggtcgctgcacaaaatgcgtgcagcgaccttttcttatacaatttgttgttttttcttacgatttgccatatagtttgcaaatgcggaggccgcagcgcccagtgcgatgcccagcactgcgccgccgaggacatcggtggggaagtgcacatagaggtacagccgggtaaaggcgataaaagctgccagcaccagcgcgggcgcgcccagctttcggttttgcagccaaagcgcgtaggcagccgccaccccggaggcggtgtgcccggaggggaaggaatgcccatgcggacgcgccaccagcatggtgatggaagtgttgagatcacaggggcgggggcgggcgaacagcggcttgaggaagaagtgccccgccgccatgtacagcaccagcgccaccgccatggcaaagcccgctttgcgggtgcgccggaagagcagaagcagcagggtgaacgcaatccagatctcgccgtgggcaccggcataatcaaaaaagatggagatcgtgttcattaccgggttgcggaactggtacagccagtccaaaaaagcaaactcaaagggcatgggttcctccttttgggcggtgaaagagcggattttttatacaatatagcatataaatgttaaaaaatacagaacgggcggtaaaatcgcccctcagagccggggaaaatcggcttccggctgctccatctgtgccaaggtggggtagctgtcgatggcgccgtggtgctgcacgctgatggcacagaagcggttggaaaaggccagatactcagtcaggcgcttgcgggaaagctttggcaactcggcggcggtcacgccgtcccgctgcagctgccacagaaacgagccgataaagccgtcccccgcgccggtggtgtctaccgccgtcactttggggctgcgggcgcgggcactggcggtgcgggtgtaggcgcgggcacccttgctgccgcaggtgtacagcaccagctgcacatctccggtaaagagcgcgggcagtgcggcttcaatatcctcggtgtcggtgaggaagggcagttcctcgtccgaaagcttcaggatatgggtcagggggagaaactgccacacggtctgacgcagctgctcccggtccggccagaggggaaagcggagattagggtcaaagctgaggatggcgcccgcctcccgcgcggcagtgatggcagccagatgggcgtagcgcatggggctgtccaccagcgagacgctgcaaaaatgcagggcaaaggcctgcgagaaccagcccgggtcgatctgctccggggcgtacagcaggtctgcggagggcttgcggcagaagctgaaagtacgctcgccgttttccgctaagctgacgaaggccagcgcggtgctggctttgccggtaaattccagatgggaaagctccacgccgcatccggccagcacccgggtaatcttatgaccgaagggatcgtcgcccagctggctcagcagcgcactgcgcccgcccagccgggcaacggcggcgcagacattggccggggcaccacccacccgggggctgaaggcgggcacttcgtcaaagctgcaccccacccgggaggggatcatatcgatcagcgcttcgccgatggaaaataagatcctgtcggacatagggcttcttcctttctgcatacaggtgtgccgcaaggtgcggcagtgttcagtatacacccgcagggcgctgtgcgcaactgcttcttttatacggtaatgggcgggttttgcggttgacttgcggcggcagatatgctacaatttccagacgtatgcaaaaacaggaaaaaaggaaaaagtgtatggatctgacaaaacagttctttaaatatgtctcgcagaatatttttggtctgctgggcacttcgtgctatattctggccgatacctattttattgcacaggccgccggtacagacggtgttaccctgctcaacctctgcctgcccatttataactttatttttgccattggctccatgatcgcgctgggctcggctacccgctacgccattgccaaggcgcagaacgatgcccggggacagcggtatttttccaacgccatcctgtgcgccgttctggcgtctattccgtggatgctggcgggtgcctttgtgcctggggcgctgctgcggctcatgggcggcgatgcaggcatcgtgacgctgggcatcccctacgcccgcatctttctgctgttcaccccgttttttatgtgcaactacatcgtgtcggcctttgtccgcaacgacggcgacccctcccttgccatggtggcgaccttgagcggcagtctgttcaacgtggtgttcgactatatcttcatgttccccttggggctgggcttggccggtgcggcgctggcaacggcggtttcgcccatcatcagcatcgccatttgcagccgccacttctttaaaaaggagaacaccctgcaattcgtgcggcagatgccctcggtaaggctgctggggcagagttgtcagctgggcatctccggctttgtgggcgagctttcctccggcgtgaccaccacggtgttcaactttctgctgctgggtctggcaggcaacgtgggcgtagcagcctacggcgtggtggcaaactttgcgctggtggctaccgccatcttcaacggcgtggcacagggcgcacagccgctggtgagccgctgctacggccagaacgaccacgccggggcgcggaaactgctgctgctgggcagcggcacggtgctggtgctggcggcggtgctgtacgctgcggtgttcggcctgaccgatacccttgtaagctggttcaacagcgaaaactcggtgcagatggcgcagtacgcccacaccgggatgcggatgtactttgtgggctacttctttgcaggcttcaacattatggcggcgggctatctgagcgccgtgaaccgcccggtggaggcctccgttacctctatctgccggggcatggtagccattgtggtttgctcgctggtgctcagtgcggtgttcgggatgccgggtgtatgggcagccttcccagcctcggaactgctcaccgcgttgctgaccctgtttttgctgcgcagaaaaaaggccgagacggcttaaatatacatctcctgttcccgcatggtctcctcgggcgtaagcccggactgtgcggcgcgaccggtcagtgcccgccattgtgcaggggactggccggtttcttttttgaagacccggcacaggtagttggccccggaaaaaccgcacaggctggccaccacgtccagcgtatactcccggtgcagcagcagccgctgtgcggcttcgatgcgcacggtggtcaggtacttgcccggcggcacgcccacggcggcggtaaaggtgcgcaccagatggcttttggagacgcccagccgttcgctgagctcctccacgccgtacagcccggcgtaattggcgcggatatcctcaatagcggcctgcaccagcgggggcagggcaggcgcggcgctgtcggcatctgccagttcgcacagcagggcaaagaccagctggctgcgggcgcggctgtgggtgggcttttcctccgcaaggcgccccatcagctcggcggcggcaggacaggtctcgcctttggcaaggtagggcagctcccgcaggccgtttaaaaactgcgtgctggcctgcccggtcagctggacgcacagcaggtggcagctatcctccggggtcagggtgagcggggcgcggcttaagatcaggtgccccgccgctgcggactgcggcggcagtaccagcacagagccggcgggcgcagccgacgccccgggcagggaggctgtgcatctgccgctggaaacaaggcagacccacagcccctcgccggtcagggtgcggggcgcggaaagctgcacgtccagcagtgcagccggtgcggcgatggtgttccagtcaaacagcaatatctgacacctctaatcaataaaatgctattttatatcacaaaattatctgttattatagtaccaacgaaacaacacgccgtcaagggcgtgaaacaccaaatatttacggaggataacgattatggcttccattagctgccagcacatctacaagatctatccgggcgcaactgccccgtctgttaccgacttcaacctggagatccaggataaggagttcatcatcttcgtcggcccctctggctgcggcaagtccaccaccctgcgtatgatcgccggtctggaggagatctccaagggcgagatgtacatcggcggccgtctgatcaacgacgttcccccgaaggatcgtgatatcgccatggtgttccagagctacgctctgtacccccacatgaccgtttacaagaacatcgctttcggtctggaactgcgcaagaccccgaaggacgagatcgacaagcgcgtgcacgaggctgctaagatcctggagatcgagcacctgctggatcgcaagcccaaggctctgtccggtggtcagcgtcagcgtgttgctctgggccgtgcaatggttcgtaacccggcagtcttcctgctggacgagcccctgtccaacctggatgctaagctgcgtacctccatgcgcaccgagatcatcaagctgcacaagaagctggctaccaccttcatctacgttacccacgaccagaccgaggctatgaccatgggcgaccgtatcgtggttatgaaggacggcatcatccagcaggtcgataccccgcagaacctgtacgatatgccctgcaatatgttcgttgcaggcttcatcggcagcccccagatgaacttcctggacggcaccctgatcaagaagggcgacctgtacggtattgacctgggcggcgacgtgatccccctgcccaaggaaaagaccgccgacggcaagctggattcctacgttggcaagaagatcaagatgggcatccgtcccgaggatatcgacgacgagcccgagtttatggcaaagcacaccgactgccagctggatgctaaggtcgatgtttccgaaatgatgggcgctgagatctacctgtacctggagtacaagggcaacaagatgaccgctcgtgttgctcccacctccaaggctcgcaacggagacaccgtccgcgttgccttcgatccccataaggtgcacctgttcgacatcgagaccgagcagaccatcctgaactaagacttagcaaagatcatttttgatcctcctatcatacgaaagaccgccgaaggaaaaccttcggcggtttttcgttttggaaaaccctcccgtgaaaatggggttcagaaacgcccacaggcgtttctgaaccccgaaataaaataatttttacgctgaatatgcccaaagcaacgcggcgggcattcccaatcattttgtctgtgcgccctgccgcaccagctcgatgaatacattcatctgcggggtcacccatttatcgcggtggtagaacagctgccggtgcatcatgacggtgcagtccggtacgttcagccgcgccagacgcccttcggccagtgcgctgcgcacgatgtactccggcaaaaaggaaagccccatgccctgctctaccatctggcacagcagcgcagcgctgcccagttccagataggggtggatggcaaggccgtgcgccgccatgcactggtccagtgcgtcccggtagctcatgccccgctcggtgagcagaaactcctgccggggcagaatgtccagcgggagcacgctttcctgcgccagcggatgctgcagcggcgcaatgaagcacaccggctctggtacatctgccgccagcaccagtgcaggctgcaaaaggggctgatccagcgtgtagacaaggtctacctgattggtgctcagcaattgcagcatctcgtccgagctggcggtgtgcagcaccagctccacctgcgggcagcgggcatgatagcgctgcaacagccccggtaaaaaggtgctgcacacggaatccgccagcgcgatgcgcagactgccccgcacctgctgggcgggctgcaaggcggcctgtgcctgctgggcagtttccagcagggtgcgggcgtagcctaaaaaggtctgcccggcatcggtcaggcgcaccgttttacccacacggtcaaacagcggggtgcccagttcggcttccaactgtgcgatttgggaggacaccgccgactgcgagtagcccagctgccgcgcggtgcgggaaaagctgtgcagctcagcgatgtgcaaaaaggtattgacagtccgcagttccatgaacggctccttttataacagggtgatatcctgcacggtgagctgagcaccgtccacggtaaaatgcacctccagcccggcaaattccatgccgtacacccgctgcgggtcgtgctggtaggaggggcgggggtcactggcaagcacgccttgcagggcggcgcggtcggcctccggtacggtttgccacagcgtctccgggcaggagacttccagatggtgggtgcgggtctgcccggtaaagccctcggcggcgtccgggtggcagtccgcataggggatgtagggcttgatatcgtagatgggggtgccgtccatcaggtcggcaccgcgcacgatgagcaccggccccacgtccgggcgctgctcaatagcttccagctttacgctggaaagccccagagggttcggtcggaagggggagcgggtggcaaacacgcccacccgggtgttgccgccaaggcgcggcgggcgcacggtgggagaccagctttcccgcaccgcgccggaaaactgccacaccagccagatatgactgaaatcctccagtccgcgcagggcgtcggggttgcggtattccggggtgaaaacgatctcgccccgcagctcttctaccagcccgctctggcgcggaatgccgaacttggtgggaaaggcggtatggatatgggcaatgaccttcagggtcatggcttcgggtgcctgctgcatgatgaactccttgctcaatagatcttttcaatggggcagtcggcggggatgccgtaccggctgcggaaggcctgcaattcctgcgggctgcggatcagctgtacctcgataaaatggccggtgtgcagatcctgaaacccggccacctgctccccggtgcagatgctgcaccgcagcaccggcttctgggcggcggggtcgtaagcgggggacgttttctttttgccgaacacaggctgctcctttctctccttatcttataggccgcggcaaagccccacggccttgccctcgatgtgcagctccgaaagctgctctccggcgtagaacatgggcgggcagacggcggcgttatcggccagcagcatcacggcatcgccctgccggtggaagtgcttgagggtggcttcctcgcccacccgcacggcagcgatctcgccctgctccacctcgggctggcagcggatgcatacgatgtctccgttgcatatcgtgggagacatactgtcgccgtggcaggtcagggcaaaatccgcgtgccacgcggcgggcaccccgatatagcactcgatgttctgctcggcggtgatgggcgtgccgcaggcgatggagccgatcagcggcacctgcaccatggtgggcagcggctcaaagcccgggggacaggcgcagggcgcgtctagccccagcagagcggcggaagtggtctccagcgcctgtgccagctcctccactttggactggggcagatcgttgatgcctttttccagcttggtgatggaggaacgggagcggtagcccatgcgccgggcaagctcctcctgcgaaagacccagctgctcccggcgcagacggacacgggtggacagatcagacatgacggttctcctgaaaactatgtgttgtggtgtacgatacagtgttctgccttgagtatagcagaaaatttcctgaaaatcaacaattacagcgcgttttggaaataataggttgacagataatcaacaacggagtataatacaaccaatgattgtttcaaacgcagcgaactacaaaaaaggagcgaagccatggcaaacacgaatctgatctacacctacattcaggacagcggctacaagctgcaatatgtggccagtgtgctgcacatcagcagcaacaccctgcggcacaagctgctgggcgagacccagttcaagctggacgaggccgagcggctttccaccatgctgggcctgacgatggctgagcgggacgcctgctttttcgatgccgagaaccggttctcgcgcagtgcaacgctggagctgcccaaaagggggaagcgccagtgacaccggagcagcgcgatgtgacccggaacgccctgcgcaagtacggcgagcggcactgggcgcgcacgccggaaaaccgccgctggcaaagcgccattgatgagggcctcgactactatcaggtgcacgaccccatgcgggcagacctgctgcggatgcgcttttttgagcagcgcccggaggacgagatcttggagcagctgcacatcggccgcaccacctaccagaaggcgttgcaggaccttttgagcaccatcgctgtctacgccgcccagcgcggcgcgttctgagcaaacagccgtgaaaagtgccccagaaacgctcgcggtcgtttctgtggcacaaccataaaacagggctgctgcaccgtgtttcgtgcagcagccctgttttggttatttcttcttggtgtccgggtcctcgcaatggctgtggcaggaggcgcagttgccgttgcagccctcgcccttccagccgccctgtctggagatccagaccacagccagcgcaaacagcacagccaatattaccagcgtgatgatcccgcgaagtgtcatattcatccctcgatttcttttgtacggctttctgccccaagtatacacgatttgcaggcaaagagcaacagcctgccgcacattttttgtgcagggtgcagccgatgcggctgcccggcggtaatgttgcacgcccggcggtcagcgcaccatttttgcagccggagaaggtgtttcgaaaaaagtaaaataattttaaattagggcttgcatttcggcaaaggccgtgctataataatcacgttccagttcggagcacacaacacaagcaaatatggaggattagctcagctggttagagcacctgcatcacacgcagggggtctggggttcgagtccctaattctccaccaaacgtaaggccgtttacctgaaaaggtaagcggctttttcttgtatctacgtgctttttgatacgaaaaagtgaaacggattcacttttgcatattgataatgaaacgtgtaggaggcccccttttcagtcgtttgtagcaagtttgtagcagatctgtagcaaaattcggagaggaacggcaaaatgacctcagaaacccaatttttgcagatttttgggtgtaaaattttatccttgaattttgtgcagaatgacgacggtgcttttcattcggattctgatgccgtacaataaaggaaaagatcatggatgaaaggagaaatcgctgtgcgctacaccatccggcattttgatttgccgctgcttacctttgaagcaaacatggacagtgcagatactggcctccattttataaaggtctacgaagaaaaccgttcttttctacctttgaatctgactgtatcagaagatggtgtagaacgctggctgcggcatcgcgcaattccgaagaaccgagcgtatgtagatgctctgctctctaaggtggggctttctttgaatcgaccgcttggaattattgcagccaataaaggtctttcactcaatgattgcttttgtgtagatgcagagggctccggtgacacctttaaaaaagtaaatctttacgataaccgattcagtcaggtgctggcagcaatcgcctttacaggatatggcagcagcatacgaacttcgcttgcgtcctgcccggagttctcgactaacgggatgctgccaaaatgctggtgcagacaaaacggaaaaatctacctttataaagggggtacgtcagggttcagcaatctgggatttgaaccgtactcggaactgtatgcttatcaagttgcgcgggcaatgggtgtaaatgcaattcgctacactctgacgaaagacctgaaaaagacgctctgttccaagtgtgagctgttcaccagcaaagagtattcttatattcccatcgggcagcttgtgtccaaaggtggaataaaagcaatttttgcgtattatcagacgttaggtcagaactttatggatgcgctggaagatatgctggtctttgatgcgatcatctgcaacactgaccgccactatggaaactttggtgtgctggtagataataagaccaacacgattgcggcacccgcaccgctgtttgaccacggaaactcgctgttcagtctgggcggaacggatctttgggacaaccagaaagcatttgatgaatatgcccgcacactgcttccgcttgcatacgatgatttttttgcagctgcaaagagtgcaatgaaacctcgtcaccgtgcaatgctccataagctgctggatttccattttgaccgcagagcgacacgttataatctgccg

SEQ ID NO: 13807 - DNA, 15452 bp, Unknown
  gut microbiota DNA sequence
aaatattttttgatcttttgcctcagatgcaggaaaccgccgctttgattcgtattatcagtagcagaacgatggtattttttacaagttccacaaattattttttcagtgcttgacaaagttttcacctttcgttcttgcaatcttcatcgttcgggcgtataatttctcaatgctatcgagttctgctcttctgcaaaaggaggctattctatgaaacgcagctggcttgcgcgccaccccatcgggttcatggcgctgtattctatattttatctttccgtttttcactctctggaggcaaacgtccccctgcgcagcattctggtgcactgccgtctggacgatctgatccccttctgcaaatatgcggtgatcccctattttgcatggttcgtatggatccccttcaccctgttctatctgctgtggaaggccccgcgggaggacttctggcggctgtgcctgccgctgttctccggcatgaccattgcactggcgtgctacgcggtgctgcccaccgcgctggacctgcgcccctactgggtgccgggcagcgatatctttgcacagactgtgcgctttttgtaccgcaccgacaccgccaccaacgtctgcccctccattcatgtgttcaactcggtaacgctgctgctggcgtactaccgcagccgcatttttgatgcgccccgccgccgctggatgcgtcccgcagccgccgtgctgtgcgtttccatcgtctgctctaccgtgctgctcaagcagcacagctgcattgacgtagccttgggtgcgctgctggcactggcgctggacagcgcctttaccgccctcgagcgcagccagctgccgcaggtgcggagagcctaaggaagaaagaaaaagcgactcctgtcagcgcctttggcgctggcaggggtcgttttttcattttctttttcagaacagcccctcgggcaggcagatatcctgcttggggacttttgtccacgcaaagtccggcacaaggctttccggggtgcggggcgctggctccggctgcaatccgtaggcaaacgccagtttgccgatgatctccggggcggtatattttgcccgcagattttcaaggctctggtcgccgtcccgcttggacagccgccgcccgtccgctgccagcagcagcgggcagtgggcaaaacggggcggctgcaaacccagcagccggtacaggtacagctgccgcgccgtggaggaaagcaggtctgcaccgcgcaccacctcggtaacgcccatgcgggcatcatccaccaccactgccagctgataggcaaacacgccgtctgcccggcgcagatagaaatcgccgcaatcccgcagcaggttttccgtgtgggtgcccatgcagccgtccgtaaaggtgatctcctcgtccggcaccatcagacggtaggcaggggctttctttttgcgcttttccgcaatttcctccggcgtcagtccccggcaggtgcccgggtagatgacgttgccgtccgaggtgtggggtgcgctggcggcgtgcagctgggagcgggagcagaagcaagggtacaccagccccttctgctccagcttgcggtagctttcggtatagatgtccccgcattcgctctggtaatagggtgcgtgtgcgccgccggtgctgccgccctcgtcccaagtaagccccagccatgcaaggtcctgctccagcaggtcggcatagacgcgggggcagcgctcggcatccagatcctcgatgcgcagcacgatgcgcccgccctgactttttgcgctgagccacgccagcaggctgcacgccagattgcccagatgcagccgtccgctggggctgggcgcaaagcgcccggtgaccgggcggttttgggatacagggacttggttttgcatgggtgtgcttcctttcgcttttactggttttttctcattataagcccttgctgtgcaaaggtcaatgcgcataaaaaagccgccgcaggcggcaatgcctgcggcggcgggaaagccggctgctcagtgcagctccggccagtagcccttgttggcttcgatcatatcgtccagaatggcctttgcaacgctcatgctgggcacagtcttgttcagggtgaaggcctgcagcaccttctcgtagctgccttccacgcagccctctaccagcagcttttcgctgttgagctgctgcatcatcaagccctgctggaacagcgggatgttgtcccgggcaatgacctccgggccgtttttgccgatgtaggcgggcagctccaccattgcgtcatagggcatattggggatcgcgccgcggttctcggtgatgatgaggaagcgtgccttggtgtcgttcttcagcgcagcggaaagatctgcgatccagtcgccgtggctgccggcatagaaggtgttggcgtctacctcgccggtcttgaggtagtggtcgatgccgtcgaacaggttcttttcgcgggtctcctccacctcattggcgcgggtgtggttcgggtccgagtgctccacgaactccttggcctgcagatagtagttcaggtaggtgttgggcaggtactccgggaagttttccatgatctcgtactcgcccttccacacatagtaccagctgcccttggtgtggcggttctggctgctggaggaggtcagcgcgcccatgcccttgaggtagctttccggcagaaggatcttgttctccttgatgtaggcgcgcagcttgggcatcaggtcctcgccgtggtactggatggaggtgaaccagccaaagtggttcaggccaaagtaatcgtaaacgatctccttcttgttctggatgcccatggcagctgccaccacgtcaatgatggcgatgggcatatcgcagatgttgatgatccgtgccttcgggcgcagcttgcggcaggcctcggatacgatggcggcggggttggagtagttcaggatccagtagtccttcttggcatacttttccacatcgtcgatcagcttgatcatggggaagatggtgcgcattccataggccatgccgccgcagccgcaggtctcctgtcccacgcagccgtggcgcagggggatcttttcgtcctgctcacgcatggcgtagccgcccacacgcatctgggcaaacacaaaagaggcatccgtgtaagcctgctgcacatcggtggtgaccaccagcttgatgtcggtattcagttccttgtgcaggacccagtccaccacaacggcaaccttgtcctgccgctccttgttgatgtcgaacagacggatctcgtccacttccagttcttcccggcgcagggcgatggatttgacgataccggcggtaaacgtgctaccgccgccagcaatggtaatgaccatagtataaacgctccttttttgtatttttcaggttagcccggcgcaatccgccggggcgcggaaaagcggtttactggttttccagctgtgcctccacggcacgcttgatatcggctacctgcagaccgtaaacgatctggatatcggtaccctttttcacgatgccgctgttcggcagtttgttgatggcagcttcgtccagctttgcagggtccttgatgtttacccgcagacgggtgaagcagttgtccaccgacaggatgttttccttgccgcccagaccatcgatgacgcactgcacctcggcggcgttcttcacgcttgccttcttggcgggtgcatcgctccctgcggtctcggtgctcacctcttcccggccgggggtgtgcaggttgaacgccttgatcagcagggtgaacaccacaaagtacactgcgatctggcacagtgccagcaggtacagggtgggatagttggtcttatctgcaccggcagaaaggttcatcagaatcgagccgaggaggttggtggtaaagccggtgacatggaagatgtgcagcagcacgatgaacaggccggagatgcaggcgtgtgccacccacaggatgggcgcagagaagcagaacatgaagtccagcggctcggtgatggaggccagagaagcggtaaaggccagcggcaccagaacggcagcggtctttttgcggttctccttgcgggcgcagaagatgaaggccgccacgatgccaaaatagccgaaggtcttggtgaagccggtgtacatccacacgatgccgtccgagaagggcagacccatgctgtactccatcatcatgacgatgtaggagccggtgtaggtggcatcgcccacggtcaggctgttgcccagtgcagagaactggaagggggtgtagatgaggtggtgcaggccggtggggatgaggaagcgctccaaaaagccgtacaggaacaggccgaagttgccggaggtggcgatcaggtcggtcagtgcgctgatgacgttctgcaccggcggccagaagaagcaggagccaaagccgaacaggatggaaaagaccaccatgcaggtaaaggaccagcggttgccggagtagatctgggtgatgatgcccttgaactgcttttcacaggtgcggttgtacacccagccgcagaccaagcccagcaggatgccgccaaacacgcccatatccaccgtctggatgccgaacacggtggactgaccggtgccgtacagacccaccatcgggtcagcctcggccagcatacccagctgggtcagggtgacgttgccggcggtcaggtacataaagtagctcatcaggccgatgatggcagcctgctgcttgttctttttggcaagcgccgctgcgatgcccacgcagaacatcaggctgaggttgttgatgatgaccatgatgcagttgtagatcagctgacccagcagcttgatgggggtccactgcagaacggggatcatcgcactaaggcttgtgctggtaagcaatgcgcccagcacaaggatcaggcctgctgccgagatatacgacagcggtgagagcatggctttggagaacttttccaagccattcatgactttttctttcatcgtgtaatactcctcactttttgacttgactgttttgggggatgatttctattccgcagggcttccggacgccctgttgaaacattttaaccaacgatcttggtcaggcggatgagcagatagacctgctcctgatgatccagctcataatcaaattcctgccgcagataggcattgatgcgctgcaagcacacctcgttgcggctgtcgcgctgcaaaagcaccgtatacatggattccagcccggcgtcctgccaaggagtatgccgcaggatgcgcgccgccagaaacttgaggtgcacggtcaggcgggtggtctcaaggctttcttcctcaaaggtgcagtgataggtgtcgcagatgatctccttgaccgccttgacgaattttacggtatcataggccagcgcaccgtccgccgcaccggctaccagatgcagggcaatgtagcccgcttcgtcctccggcagctgtacgccgcagaactgccgaacaagttccagcgccctttgccccactgcgtactccttcgggtacagcatccgggtctccgagagcatgaggttgggcagaaaggtgcccttttccacacgttccagcgcaaaactgatgtgatccaccagcgagatggtgcttttgctgctgagcaggatgccctgctcctctgccgccagcgagatacgctcggcggcctgcatcacctgcggggtgacgttatccagcatcttgagaaacttggtctgcagctcgttctgcacatagtacaccttggaaacgcggcttttgtcgatcacgtcccccgggcggcggccaaacccaagcccgttgcccacgagaatggcttccctgccgtccggcatgaccaccgacaccgcattgttattgaatacctttacagcctgcatcgccgcactcctccgcttccatgccgcagcttttgtgaaaaagaaaaagggcacaagaaccaaagggatgccgttgccgccttccctctgatgctcatgcctgatcgaacagttacacgcactgataaattcacttgtctgcttttgattatacgagccagcgcaggaaatgtcaatctgttgaactgcccgaaattcaagctgtatttttgtatatcctgcacaggactgcttgaaattcgtcctgcgcagaacgattgacaacgccgtgcgcagaacgtatacttagggtgtagatcccgcattgctccggcggcttgctggagcaccagttacggaggtttttcttatgacatcgaaatatatccgctcccttgcgctgctgctgtgcgccgctttcctgggctgtctgctggcagcctgcggcggctctgcaagcagccccgcatccagcgctgcgcccgcctcggacagcgcatccgcttccggcagcagtgagctgccctcctccaccacagaagccaacaccggagagctgaaccccggcaatttcgacgagaattcggtgttctccatcaccggcacctcaaacgcctttgcgccctgtctgggctgggggcccggggtatccggctgctccttgaaatcggtcatcgcggcggcatcgctgctgcactgggccgaggacgcgcggatgtccagccgctccccagaagccattcaggatgccttttacagctggtacgacggcctgaccgataacgagcaggaaggctttgccgaggcatggccgctggtcaaggacgccgcgctggacctgctcagcgataaggacagcatgaccggccgcatcgcggacgcagggctggacgctgacaccctgcccggctgcaccctgaaaaactggcaggcgctgcaagctgtgctggacggcattgtgccggagacaaacggcgaagcttaataaaacaaaaaagcatctgcaaccatcgcttctgaatttcagaatcagcgattttgttgcagatgctttttctttagcgggctcgccctctccgtcacctacggtgacacctctcccaaagggagaggccttggcagaaagatgaagtctgcgtggactgccaagggctcccactttgggggagctggcatcgcgtagcgatggctgagagggcgaggatgctgaccatgtgcagcatcccttctgtttctgatttttatacctttttcagcacatactggcgggtgcccatgcccaccttctcggcctgttcaagggtggccttccactcgatgttggggttggagtccttgaagttgtcgtgatagcagttccagcccggctttgcaaggtttgcgcccagctggctgttgggcagcggggcggcgttcaggcaggcgtccacgcaggcctgatccagcgccaccgggtcgaaggacgcaaagatgccgatatccggcagaatgggtgcatcgttctcgccgtggcagtcgcagttggggctgatgtcctgcaccagagaaatatggaagcaggggcggcctgcgcagactgcggcggcgtactctgccattttgcggtccagcagctcgttggcacagtcgttgggagaatagatggcgtcaaagctgcacgcaccgatgcagcggccgcagcccttgcacttgtcgtagtcgatgacagctttgttttcggcattgtaagtaatggcgtccgagccgcactccttggcgcagcggtggcagccgcggcacagcccctcctgcacggcgggcttgccggcagcgtgctgctccatcttgcccgcgcgggagccgcagcccatgccgatattcttgagcgcaccgccgaaaccggtggactcgtggcccttgaagtgggtcaggctgatgaacacgtccgcatccatgatggcgcggccgatttttgcggtcttgcagtattcgccgttcggcaccggcacttccacctcgtccgtgccgcgcagaccgtcaccgatgatcacctgacagccggtggtcatgggccagaaaccgttcagctgggcgcagttcagatgctccagcgcattcttgcggctgcccgggtacagggtgttgcagtcggtcagaaagggcataccgccctgctccttgcacaggtctgccaccaccttggcgtagttgggacgcagaaaagccagattgcccagctcgccgaagtgcatcttgatggccacgaatcggccgtccatgtcgatgttcctgatgccggcggcaatgcacacccggcgcagcttttccagcaggctggtgcccaccggacagcggaaatccgtatagtaaactttggatgcttccatggtgtttttcctcccatatccttccggcggcgtctgccgcgcggtctctcttttgttcaggcaataccacatgattccaagtgccgatacggcgagcgaggtgcggcagatgctaagccaaaagcgcagataatactttgtgtattatcgagcattttggcaacgcagatgccgtgccgcagccgccggaacggtgcttgagccgtcaggcgggaattgtgcggtactgccttcagtatagcacacccgggcgagcggtgtaaacagaaaatggagcagcgccgtttttctctgcccattttggggttgacagccctgccctgcggtgttattttatatcggttccaaaaaacggaacggacgtcaagatacaggagttatgtctatgaacgattttgatacattccggcacgaagctgaagccgccctgcgggtggcgctgcaatggttccttctggcagtccccatgggtctgctctgtggatttctgggcaccttgttccaccttgccgtcgagcacgccaccgaactgcgcgccgcgcagccctggctgctgttccttttgcctgtggtgggtctgctcatcactgccctttataaggtaacaaagtgcgagggtgtgggcaccaacaacgttctccgcgccgtgcagagcggcgagccggtcagcattctgctggtgcccgccatctttctgggtacggtgctcacccacctgtgcggcggctctgccggccgcgagggcgctgcattgcagatgggcggcagcatcggctggaatcttggcaccctgctgcggctcaaggaccacgaccgccgtaccgctaccatcagcggcatggctgcgttcttctctgccctgttcggcaccccgctggcggcggcctgctttgctatgatggtggaggatgtgggcctgacctttaccgctgcctttgtccccgcctttacctctgccctgatcgcctacggctgctcgctggtctttggcatcgcgcccacccactttgccctcactgcgccggagctgaatgtccggactgccctgctggtcatcctgctgggtgtggcctgcgctgccgtttcccgcctgttctgctacaccctccacttcatggagcacaccgtgccaaagcttctcccgaacccgtgggtgcgggtctttgcgggcggcgtgctggtcatcggcttttcctatctcttcggcgtggggcggtataacggcgcgggcatgagcgtcatcaccgctgccgtggagcagggacaggcgctgccgtgggattttctgtgcaagatcttcctcaccgcgctgacccttgcctgcgggttcaagggcggcgaggtggtgcccagcttttttgtgggcgctaccttcggctgcgtggtcggcccgctgctgggtctgcccgccgggtttgcggcagcggtggggctggtgtccatcttctgcggcgccaccaacgccctgatcccctccatcctgctggcctttgagctgttcagcggcgcggggctggagctcatcgcgctgggctgcggcatctgctatatgctctccggccaccacggcctgtacagcagccagacctttgtcaccaacaagctgcgctcggagtatatgtcccacaagtggcgcgtaaaggtgaaaaaagcggaagagtgagcgtttaatactaaaaaacaggggctgctgcaccgaatgccgtgcagcagcccctgttatcattataagattttctcttatgccagcgcggtgatggctgccacagccagcacgatcgcacccagcacgatgcggtagatgccgaagaacttgaagtcgtggcgcttgacgtaatccatcaggaagcggatggccgcaaggctgacgacaaaggccacgacgcagcccaccagcagcacggcgacctcggtgccggtgatggatacgccggagaccgcgaacttgaccaccttgagcagggatgcacccgccatgaccgggatggccagatagaaggtgaactctgccacacaggcgcgggagagacccagcagcagaccgcccacgatggtagcaccggagcgggaggtgccggggatgatggcaaggcactgccacacgccgatgagcagcgcgtcccggtagctgatctgttccagctttgtgacccggggcgtggtgcggcggttttccaccacaaggaagagcacgccgtacaggatcagcatggcggctacggtgatgtagttatagaagtgtgcctccatccagtcgtccagcgggctgatgaccagcaccggcagggtggcggctaccaccttgaaccacaagttccacacactgggcttggagatgaccttgccctgccgcagcccgaagggccacagcttattccagaacagcaccaccacggccagaatggcacccagctggatgaccacccggaacatggacatgaattcttcactggcattgaacttgacgacctgctccaccagaatcatgtggccggtggaggagatgggcagccactcggtaatgccctctacgatacccatcaggatcgctttgatgatctcgaaaaacgtaataaatccctcctgcagcacccggttggatgcgtagttttttcaaaagcagttccagtataccatactatgagccgctgtgcatacagattatagaaattttcccccgggcgctgtatttatctgccccgggaaatgtgctatactataaaaataagaagtctgtccgctttctgcgcccggcgctgaaagctctgagaacaacgaggtgaaccttcatgaacatactggtgatcggctgcgatcaggtgggtgcggcgctgatccgcgatctggagcgcatcggccatgatatctcggtggtggaaaaggaccctgagcagctcaagcgtctggatgcctttgacgattatacctttcacggcactgcccttgtgggcgaccccaccgacccggacaccctgcgccggggcggcgtggaaaactgcgacgccgtggcggcggtgaccgaggaggactcggtgaacctgatggcggcgcagctggccaagaacatcttccgccgggacaaagtcatctgccgggtatccgacccgcatctgcaaattttataccacaaggcctacgagctggagaccatctgccccaccgtgctgactgagcaggcggtgtttcgggctctttccaagtaaaacagcctgtttttgctttacagaccgtagaatgaggtaacgatatgaaagtttgtattgccggcggcggccgggtggggatgtatcttgcccaaagcctgctgtcccaccaccataaggtgaccatcatcgagccgcaggaggcgctgtgccgcacccttgccgacacgctggatatcccggtcatctgcggcgactctctgagttttgacaccctgcgcaccgccgatgtggccagctgcgacgcctttgtggcggtgaccaacaccgacgagaccaatctggtggcgtgccagatcgccaagcgggagtttggtgtgaaccgcaccgtggcgcgcgcctccaaccccaaaaaccgggacattctgcacacgctgggcgtggacaccgtggtgtgcggcaccgacaacctgagccatatcctggagcgggagatcgagaccgacaccatccggcagctgctgtctcttggcggcggcactgccagcctgaacgagatcctgctgccggaggactttcagttcgcgggcaaggagatcaaggagatccccattcccggcgatgccattctggtcagcatcacccgggataccgagttcatcatccctcacggcagcacggtgctgctgccgtgggaccggctgctgtgcctgacacaggacgacaccctgcatctgctgatggatgcatggggtctttcctcccacaaatgagcgagcaggagctgctgcgcaccgcgctggtgctgccgccccgcgcccgccgggtgctctgcgtctgggcagctgtgcccgggctggtctgcgcgccctttgccttctggcagagcgtgtgggcgggggcagtcttttgcgctgtatgggcggcgctggtggcgcttgtccgggcgcgctgctgcagctttgtcgccgccctgacggcggacagcgtcacggtgcaggccggggtagctgtccctgtgctgcaccgcatcccgcgccgggcggtcaccggggtgcagctgctgcgcaccccgctgctgtgggcggcagggtgcactgtgctccttgtgcgcagcccggggctgcaattggtgctgcccggcatccccgccgcacaggcgactgcgctggcagcggttctgatggagggcaacgtatgaaccgggaaaagcactttcacccgctggcggcgctgcatctgctgcgcaagaccctgctggtctaccttctgccgctggtacaggtgctttttgaccgcaactgggacgctttgcgtgcggcgctgcggcaggagcttgtattgctcttctttatcagtgccgtgtgctgggcggtgtactacggcggccgctggcaggtggatgccgaaggcacggtgcacgtcagctggcggctgggcgtgcggctggaccgcgccctgcgcgccgaggggctggcggcgctgatgttggagcagcccctgctctaccgcctgaccggtgcctgccgggtggtgctgtaccctgtggggcagaccaagaccatcacgctgtatcttacccggcagcaggccgaggagcttgccgatgtgctgctgccggtgacagacccgctgtggcacgcgcccaagggcggcgaaaagctggcctttacggtgctgggtgccaacggcctgtccaccctgattttatggtggctggccatccaccagacccagagctacgccccggatgcccagaccgctgcccttgcgcagctgggacatctggcggcgtttgccgcccgctggctgccgctgggcacggcgtggctgctggtgctggcgggcaccctgttctgcatcagtctggtgcgcagcgctttgcaggcggtacattacaccgtctggcgcaccgacacccagctgggcagccggggcggattgatccgccggtacgagatgcggctgcggctctgccagctgaactacgccgacctgcgccgctcccccgccacatgggcgctgcattattgcccggtatttgtctcggcaggggcgtgccgcccggagctgcccttgttcgtctggcgggagggcaccccgctgctgcgggagctgctgccggagatggcacagctgcccccggatacccgcgccgacaccaccgaccgcagcatggtattttttctgccggcgggcatcccgctggggctctgcctgctgctgacggcggtatcccgcaccactctgcctgcccttaccctgccgctgctcatccccaccggggtgtttgccgccctgctgggcgctgccgccgtgggctggcaccgggagggcgtatggcagcagcaaggacagctgctgctctgtcggcagcaccagttccatctgcaccagctgtgcgtgttccacccggacaccggctttaccgcgttgcaatccccttgggcggtgacggtacagcgtgccaacctgacccttgtatttcccggcaaagaaaaggtcaccgtgcgcagcgtgccgctggcggctcttgattttctggagatatagaagtatacttgcgatgccccgctgaacctacggtcggcggggcattttttgtatcacagaccaacggagactattttatgataaagactgtattatttgatctggacggcaccctgctgaacaccatcgacgaccttgccgatgccggcaactgggtgtgcgcacaaaacggctggcccacctttacggtggcacagttcaagctgatggtgggcaacggcatccccaagctggtggagcgattctcccccgctgacgcccgcaccccggcgcagctggcggcgacgctggcgcagttcaccgtccggtacgatgcccacaaggaggacaagaccgcgccctaccccggcattccggcactgctggacgcactgaaggccgagggcatccagtgcgcggtgttctccaacaaggctgatgccctgtgcggcggcatcattgcccactactttggtaccggccgctttgacgccgtgcggggcaaccgcccgggcgtacccaccaagcccgaccccaccgggctgtacgccctgatggccgagctgggcgcagaccccgccgccaccctttttgtgggcgacagcgatgtggacattctcaccggacacaacgcgcagctgcccgccatgggcgcgctgtggggcttccgcggccgcgccgagctgaccgccgccggtgccgatgcactggcagaggtgccggaggatatcctgcggtatgtgcaggagcagaataaataaataaataaaaacacgggaaggtctgcggatcttcccgtgtttttgcgtatttttgcggctcaggatgccgattccagcgggtctaccaccacagggcaggtctcgtacaactcgatgggatccagatcgacacagctgcccgggtcccggtcgcctttcacatcccatgctgctgtatcgttcaggacggtcaggcggcttttgaaaaaagcttcatcctgcaagggcgcaaagactccacccagtttaagcagcggctttgcgtcatacagacgcacagagccatcgttgaaatagaggtacaccgtaaagtcctcgcccgcaacagcctgcaagaccttggggaacaatgtatccatagagatgcctcctttttagatcagcggtgcaatgtgattgagcggtgcagcagttctggccagttcccaattctgcatcagctcatccttatgcagctcgcaccatgcaaggatcagcttcagctgccgccccggcaatgcaccacggatcacacaggaattttgaatatcgatcaatgccttgaatccgccgtattcggcgtgaaaatgcggcggattatggtcactgtaaaacattgtgacccgtatcccgcaaaacaaactgatctccggcataacacatcccaccttttcaacgtaagtatatcttattttttgaaaaaagtctatcctgtattatatagctaagattcccgtacgggtcagaacggcagcaaccacggt
